United States Patent Application Publication US 2018/0126003 A1 - sequence listing, part 21

SEQ ID NO: 35204 - DNA, 1410 bp, Artificial Sequence
  derived and/or modified sequence
atggcccggggcctgggcgccccccactgggtggccgtgggcctgctcacctgggctacccttggcctactcgtggccggcctgggagggcatgacgatctgcatgatgatttacaagaggacttccatggccatagccaccgccatagccacgaagattttcatcatgggcattctcacgctcacggccacggccacacccatgaaagcatctggcatgggcacacacacgaccacgaccatggacacagccacgaagatctgcaccacggtcattctcacggctattcccacgaatctttatatcatagagggcacggacatgaccacgagcattcccacggcggctacggagagtccggagccccagggatcaagcaggacctggatgctgtgaccttgtgggcatatgccctcggggctacagtgctcattagcgcagctccctttttcgttctcttcctgatccccgtggagagcaatagcccaaggcaccggtctttgttacaaatccttttaagcttcgcatctggggggcttctcggggacgcctttctgcaccttatccctcacgccctggagccgcactcacatcataccctcgagcagcccggacacggccatagtcattccggacaaggaccgatcctttcagtgggcctgtgggtgttatccggcatagttgcttttttagtggtcgagaaattcgtcaggcacgtgaaaggtgggcatggccatagccatggtcatggacacgcgcactctcacaccagagggtcccatgggcacggaaggcaggaacggagtaccaaagaaaagcagagcagcgaggaggaagagaaggagacaaggggcgttcagaaacgtcgtggcggcagcaccgtcccaaaggatgggcccgtgaggccccagaacgccgaagaggagaaacgcggactcgatctgagggtcagcggttacctgaacctggccgctgacctggcacacaactttaccgatgggctggccattggtgcatcgttcagagggggtagggggctggggattctgaccacaatgactgtccttctccacgaggtgccgcatgaagttggagactttgccatcctagttcaatcaggctgctcaaaaaaacaggctatgagactgcagttactgaccgccgtcggggccctagccggaacagcatgtgcactgttaaccgaaggcggtgctgtggggagcgagatagctggcggtgcgggccctggctgggtgctacctttcactgcaggaggcttcatttatgtggccacagtcagcgtgctgcctgagttgctgcgtgaggcctcaccactgcaaagtcttcttgaggttctgggtttactgggaggtgtcatcatgatggtcttaattgcacacctcgaatag

SEQ ID NO: 35205 - DNA, 1353 bp, Artificial Sequence
  derived and/or modified sequence
atggcccggggcctgggcgccccccactgggtggccgtgggcctgttgacatgggcaactttgggcctgctggtggcagggctcggtggacatgacgatctccacgatgacctccaggaggatttccacggacatggacatactcatgaatcaatttggcatggccacacgcacgaccacgaccacggccattctcatgaagatctgcatcacgggcacagtcacgggtattcacacgaaagcctataccaccgcgggcacggccacgaccacgagcactcccatggcgggtacggcgagtctggtgcgcctggtatcaagcaagacctggatgctgtgacactgtgggcttacgctttaggcgccactgtgttaatttcagcagccccattcttcgttctgttccttattcccgtggagagtaatagtcctcggcataggtctctgttgcagatcctgctgtcgtttgcaagcggaggactgctgggagatgcatttctgcatctaattccccacgccctggagcctcacagccatcatactctggagcagcctggacatggccattcacacagtggacagggtcctatactgagcgtgggcttgtgggtgctttctggtatagtcgcttttctcgtggttgagaaattcgtccgccatgtcaagggtggccatggccatagccatgggcacggccatgcccatagccatactcgggggtcccacggacatggccggcaggagagatcaaccaaggaaaagcaatcgtcagaggaagaggagaaagaaacccggggcgttcagaagcgtcgagggggttcaaccgtgcccaaagatggtcctgttagaccccagaatgctgaggaagagaaacgcgggcttgacctgagggtctccggatacctgaatttggcggccgatttagcccataatttcactgacggtttagctattggcgcctctttccgaggcggtcggggtttgggaatcctgacgaccatgactgtgctcctgcacgaagtgccgcatgaagtgggggactttgctatactggtgcaatcagggtgcagcaagaaacaggccatgagactgcaattactgactgcagtgggggctttagccggtactgcttgcgctctccttaccgaggggggcgctgtcggaagcgaaatagccggtggagccggcccaggttgggtgttgcccttcaccgccggtgggttcatctacgtggctaccgtgtctgtcttaccggaactgttgcgggaggcatccccattacagtccttgctcgaagtcctgggtctgctgggaggcgtcatcatgatggtgttgatcgcccatctggagtag

SEQ ID NO: 35206 - DNA, 1353 bp, Artificial Sequence
  derived and/or modified sequence
atggcccggggcctgggcgccccccactgggtggccgtgggcctgctgacatgggccaccctcggtcttctagtcgctggtctgggggggcacgatgaccttcacgatgacttgcaggaagattttcacgggcacgggcacacccacgaatctatttggcacggccacactcatgatcatgatcacggacactcacatgaagatctgcatcacggtcacagtcatggttattctcatgaatccttataccatagaggacacggtcacgatcacgagcatagtcacggaggctacggggagtccggagctcccggtatcaaacaagatttggacgcggttactctgtgggcctacgccttgggcgcaaccgttctgatcagcgccgctccttttttcgtgctgttcctcataccagtagagtccaactctccccgccacagaagcttactgcagatcctgttgagctttgcctctggaggactgctgggcgatgcctttcttcatctcattccccatgcgttggagcctcattcccatcatacattagagcaaccaggccacgggcactcccactccggccaaggtcctatcctttccgtaggtctgtgggtcctcagcggcattgtggcctttcttgttgtggaaaagtttgtgaggcacgtcaaaggtggacacggccactctcatgggcatggacatgcccatagccacactagggggagtcatggacacggcagacaggaaaggtctactaaagaaaaacagtcttccgaagaggaagagaaagagactaggggcgtgcaaaaaaggagaggtggaagcaccgtaccgaaggatggacctgtgcggccacaaaatgccgaggaggagaaaagaggtttggacctacgggtgtccggataccttaacctcgctgcagacctggctcacaattttaccgatggcctggcaataggggccagcttcagggggggtcggggcctcggcatattgaccaccatgaccgtgcttctccacgaagttccccatgaggtgggggacttcgccattctcgttcagagtggatgctctaagaagcaggctatgaggctccaacttctgacagccgtgggggcactagccggcactgcatgtgctctgctcaccgaggggggggccgtggggagcgagattgctggaggcgccggcccgggctgggtgctgccatttactgccggtggcttcatttatgtggcaactgtctccgtattaccagagctgttgcgagaggcgtctccacttcaaagcctgcttgaggtacttgggcttcttggaggagttatcatgatggtcttgattgcccacctagagtag

SEQ ID NO: 35207 - DNA, 1353 bp, Artificial Sequence
  derived and/or modified sequence
atggcccggggcctgggcgccccccactgggtggccgtgggcctgctcacttgggctaccttagggcttctggtggctgggctgggcgggcacgacgatctgcacgacgacctccaagaggactttcatggacacggccacacacacgaatcgatatggcacggacatacacacgaccacgaccacggacatagtcatgaggacctacatcacgggcactcacacggttattctcatgaaagcctataccaccgaggacatggacacgaccacgaacacagtcacggaggttatggcgaaagcggcgctccggggatcaaacaggacctggatgctgtgaccttgtgggcgtatgccctgggagctaccgtcctgataagtgccgcccccttttttgtgctgttcctaattcccgttgaatcaaattcgcctcggcacaggtccctactgcagattctgctgagtttcgccagcggcggtttgctgggcgatgccttcctgcatttgattcctcacgccttagagcctcacagccaccacacgttggagcagcccggccatggccacagccattctggacagggtccaattctttcagttggcctctgggtactctctggcattgtcgcattcctggtggtcgagaagtttgtgcgccacgtgaagggagggcacgggcactctcacggacatgggcacgctcatagtcacacccgcggttcccacgggcacggacggcaggagcgatctaccaaggagaagcagtcttccgaagaggaagaaaaagagactagaggcgttcagaagagaaggggtgggtccacggttccaaaagacgggccagttcgcccccagaatgccgaggaagaaaagagagggctcgacttgagggtgtcaggatatctcaaccttgccgccgacctcgcacataatttcactgatggactagccatcggggcttcttttcggggcgggagagggctgggcattctaacaactatgaccgttctgctccatgaagtaccccacgaggttggcgattttgcaatcctggtgcagagcggatgcagcaaaaagcaggctatgcgcctgcagcttctgacggcagttggggccctcgctgggactgcttgtgccctcttgacggaggggggggctgtgggaagcgaaatagccgggggagctggtcccggctgggtgctgccttttaccgccgggggattcatctacgtcgccacggtgtccgtgctccccgagttactccgcgaggcgagtcctctgcagtctctgctggaggtgttgggcctcctgggcggtgtcataatgatggtactcatcgctcatctggagtag

SEQ ID NO: 35208 - DNA, 1353 bp, Artificial Sequence
  derived and/or modified sequence
atggcccggggcctgggcgccccccactgggtggccgtgggcctgctgacctgggcgaccttgggtctgctggtggctgggctcggcggacatgacgatctgcatgacgaccttcaggaggattttcatggtcatggccacacacacgaatctatctggcatggtcatacacatgaccacgaccatggacacagtcatgaagatctccaccatggccactcacacggatacagccacgagtctctttaccatagaggacatgggcacgaccacgagcactctcatggagggtatggagagtcaggagcaccaggcattaaacaggacctggacgcggtgactttatgggcttatgctcttggggccacagtcctaatctcagccgctcccttctttgtgcttttcttgatccccgtggagagcaactctccgcgccaccgttccctattacagattctcctgagcttcgctagcggtgggttgctgggcgacgcttttctgcatctgatcccccacgcacttgagccgcactcccaccacaccctggagcagcccggacacgggcactcccatagcggccaggggcctatcctctctgttggcctgtgggttctcagcggcatcgtggcgttcttggtggtagagaagtttgtaagacatgttaaaggaggtcatggtcactcgcacggccacgggcacgcccatagccatacgcggggcagccatggtcacgggcgccaggaacggtccaccaaagaaaagcagtcctctgaagaggaggagaaggaaacaagaggagtgcagaaaaggcgcggaggatccaccgtccccaaggacggacccgtgcggccccagaatgccgaggaggagaaacgcggtctcgacttacgcgtgagcgggtacctgaacctcgcggccgaccttgcacataatttcactgacggtttggctataggagcatccttcaggggaggaagagggctcggtattctgacaaccatgactgtgctgctccatgaggtgccccacgaagttggagactttgccattctggtgcagtctgggtgctcaaagaagcaagccatgcggctccaacttctaacagcagttggcgcccttgctggaactgcgtgcgccctgttgactgagggcggggccgtgggtagtgagatagccggaggcgccggccccggctgggtgcttccattcaccgcagggggcttcatctacgtcgcaacagtctcggttctgcccgaactgctccgggaagcttccccgctccagagtctgctggaagtgctgggcctgctgggcggagtcatcatgatggtgctgatcgcacatctggagtag

SEQ ID NO: 35209 - DNA, 1353 bp, Artificial Sequence
  derived and/or modified sequence
atggcccggggcctgggcgccccccactgggtggccgtgggcctgctcacatgggcaacactcgggctgttggtggcgggtctgggcgggcacgacgacctccatgatgatctgcaagaggatttccatggccacggacatacacatgaaagcatatggcatggccacacgcacgatcacgaccacggtcattctcacgaagacctgcaccatggccattcccacggttacagccacgagagcctgtaccaccgaggacacgggcacgatcatgagcatagtcacggaggctacggggagagcggtgctcctggcatcaagcaggatctggatgcagtgacactgtgggcatacgcactgggcgctacagtgttaatctctgccgctccttttttcgtgcttttcctcatcccagtggagtctaatagtccacgccacaggtcactactgcagattttgctgtcatttgcatccggaggcctccttggcgatgcgtttctgcatttgataccccatgccctggagcctcacagtcatcatacacttgaacagcctgggcacggccacagtcactctggtcagggacctatactttctgttgggctgtgggtgctctccgggatcgtcgctttcctagttgttgaaaaattcgtgaggcacgtgaaaggtgggcatggacactcccacggccacggccacgcgcacagccacacgagggggtcccacggccacgggcgacaggagagaagcaccaaggagaaacagtcttcagaagaagaggaaaaagaaacacggggcgtacaaaaaaggcggggtggttcaaccgtccccaaagacggccctgttcgcccccagaatgccgaggaagagaagcggggcctggacctccgcgtgtctggatacctaaacttagcagccgacctggcacataattttacagatggactggcgatcggcgcttcctttaggggcggtagaggacttggcattttgacaacgatgactgtacttttgcacgaggttccccatgaagtaggggatttcgcgattttagtgcagtccggctgctctaaaaaacaggccatgcggttacaacttctgaccgccgtgggtgccctggccggtaccgcttgcgctcttctgacagaggggggggctgtcgggtcggaaatagccggtggcgccggtccaggctgggtcctcccttttaccgcaggcggatttatttacgtagctaccgtctctgtgctaccagaattgctgagagaggcctccccactgcagtccctactcgaggtccttggcctcctgggcggggttataatgatggttctaatagcgcacctggaatag

SEQ ID NO: 35210 - DNA, 1410 bp, Artificial Sequence
  derived and/or modified sequence
atggctcggggacttggggctccccactgggtggctgtgggcctgctgacatgggcgacccttggcctgctggtggcgggacttgggggtcacgacgatcttcatgatgacttgcaggaggacttccacggccacagtcacaggcattcccatgaagactttcatcacggtcattcccacgcacatggacatggacatacccacgaatcgatctggcacggccatactcacgaccacgatcatgggcacagtcacgaggaccttcaccacgggcattcccacgggtactcacatgagagtttgtaccatcgcggacacgggcatgaccacgagcacagtcacggcggatacggagagagcggagccccagggatcaagcaggatctcgacgccgtaacactgtgggcatacgccctcggcgctacggtgctaatatcagccgcacccttttttgtgctcttcttaattccggttgagtcaaacagtccaaggcatagatcgctgttgcaaatcctgttgtcctttgcaagcggcggactgcttggagacgccttcctgcacctaattcctcacgccctggagcctcatagccatcatactttagaacagcctggccatgggcactcacattccggccagggtcccatattgagtgtaggactttgggttctttctggtatcgtggcttttcttgtggtggagaagtttgtgagacatgtcaaaggcggacatggccactcccatgggcatggtcatgcccactcccatacacggggtagccatggtcacggcagacaggaacgcagtactaaagagaagcagagctctgaggaggaggagaaagagacgcggggagtccaaaagagacgcggaggctccaccgttccgaaggatggccctgtcagaccacaaaacgccgaggaggagaagcgaggactggatcttcgggtcagcggatacttgaacctagccgcagacctcgcacataatttcactgacggcttggccatcggcgctagtttccgcggaggcagaggattgggaatcctcacaaccatgaccgtgcttctacacgaggttccccatgaagtgggcgattttgccatccttgtgcagagtgggtgctccaagaagcaggcgatgcggctgcaactgctcacggccgtgggagctctggccggtaccgcttgtgctctcttaactgagggaggcgctgtggggtcggaaatcgcaggcggagccggacccggttgggttctcccctttacggctggcggatttatatatgtggcaactgtgagcgtgctgccagaactgctccgggaagcatcccctttgcagtcccttctggaagtcttggggttgcttggcggagtgatcatgatggtgcttatcgctcatcttgagtag

SEQ ID NO: 35211 - DNA, 1410 bp, Artificial Sequence
  derived and/or modified sequence
atggctcgaggactgggagcaccacactgggtcgccgtcggtttattaacctgggccacgcttggattactggtggcaggtttgggcggtcacgacgaccttcacgacgatcttcaagaagatttccacggccacagccaccggcattctcacgaggattttcaccatggccactcacatgctcatggacatggacacacgcacgaaagtatctggcatggccatacgcacgatcacgaccacgggcatagtcatgaggacctgcaccacggtcactctcacggatactcacatgagtctctgtaccacaggggccatggccacgaccatgagcactcacatgggggatatggggagtctggagcgcctggaattaaacaggatttagacgctgtgacgctgtgggcatacgcgctgggagcgacagtgctgattagcgccgcacccttttttgtgctcttcttgattcccgtcgagtccaacagtcccagacatcggagtctattacagattctcctaagcttcgccagcggcggattactcggagacgcatttctgcacctgatccctcatgccctcgagccccacagccaccatactctggagcagccgggacacggtcacagccattcaggccagggtcccatcctcagcgtggggctgtgggtgcttagcggaattgtcgcctttctggttgtggagaaatttgtccgccatgtaaaaggcggacacggtcatagccacggccacggtcacgctcattcgcacacccggggaagtcacggccatggcaggcaagaacggtcaaccaaagaaaagcagagcagcgaagaggaagagaaggaaacaagaggcgtccagaagagacgaggcggaagtaccgtgcccaaagatggcccagtgagacctcagaatgctgaggaggagaaaagaggactcgacctccgggtcagcggctacctcaacctggccgcagacttggcccacaattttactgacggcttggcgatcggcgcatccttcagaggaggaagagggctgggcattctgaccaccatgacagtcctgctccacgaagtgccacatgaagtcggtgacttcgctatcctggtccaatccggttgctctaagaaacaggctatgaggcttcagcttctcacagcggtcggcgcacttgccggaaccgcatgcgccctgctgacagaggggggtgctgtggggtcagagatcgctggaggcgctggtcccggatgggttttaccctttaccgccggtggctttatttacgttgcgaccgtgagtgttctccctgaattgctcagggaggcttcgccactgcagtccctgttagaagtattaggccttttgggcggagttatcatgatggttctgattgcccatctggaatag

SEQ ID NO: 35212 - DNA, 1410 bp, Artificial Sequence
  derived and/or modified sequence
atggctcgcggtcttggtgcccctcactgggtggccgtgggcttacttacctgggccaccctggggttgcttgtagcaggattgggcggacatgatgatctgcatgacgatctccaggaggattttcacggccactcccatcgtcattctcacgaagattttcaccatggtcattcccatgcccacggccacggacatactcatgagagcatttggcacggccacacgcatgatcatgaccatgggcactcgcacgaggatttgcatcatgggcattcacatggttatagccacgaatccctctatcataggggccacggccacgatcatgaacactctcacggcggatacggcgagtctggagctcctggcattaagcaggatctggacgccgtgactctgtgggcttatgccttgggagcgacggtgctcatctcagctgccccattttttgtgctattcttaattcctgtggagtctaatagtcccagacatcgctcactgttacagatcttacttagctttgcctctggcggattgctgggcgatgctttcctgcatctcatcccgcacgcattagaaccccactcccatcatacactggagcagcccggacatggccactctcacagtggccagggccctattctgtcagtggggctatgggtgctttcagggatagttgctttcttagttgtcgagaaattcgtgagacacgttaagggcggacacggacactcccatggacatgggcacgcacactcacataccaggggttcgcatggtcatggacgccaggaaaggtccacaaaagaaaagcagtccagcgaagaagaggaaaaagagacaaggggcgtgcagaaacgaagaggcggatccaccgtacctaaagatgggccagtgcgccctcagaacgctgaagaggagaaacggggtctggacttgcgggtgtccggctatctcaatctggctgccgacctagcccataatttcaccgacggccttgctatcggcgcatcctttcgaggcggtcgtggtctcggcatcctgacaaccatgactgtcctcctccacgaagtgccacacgaggtgggggacttcgcgatactcgttcaatcaggctgctctaagaaacaggcgatgcggctgcaattactgaccgctgtcggggcactggccggtacagcctgtgccttactcacagaagggggagctgtcggctccgagatcgccggtggcgctggcccaggatgggtgctcccatttaccgctggtggcttcatttatgtggccacagtgtccgtgcttccagagctgctgcgggaggcatcccctctgcaatcgctgctcgaggttcttggtctgcttgggggagtgattatgatggttttaattgcccaccttgagtag

SEQ ID NO: 35213 - DNA, 1410 bp, Artificial Sequence
  derived and/or modified sequence
atggccaggggcctcggtgcacctcactgggtggctgtaggactcctgacctgggccaccctcggcctgctcgtcgccggactgggcggacatgatgatcttcatgacgaccttcaagaggactttcacggccactcacaccggcatagccatgaggatttccaccacggtcacagtcatgcccacgggcacgggcacacacatgagagcatctggcatggccacactcacgatcacgaccacggacatagtcacgaggatctgcatcacggccatagccatggatacagtcacgaatccctgtaccatcgcggtcacggtcacgaccacgagcactctcacggcggatatggtgagtccggggctccagggatcaaacaggatctagacgcagtgactttgtgggcttatgccctgggagctacagtgctgattagtgcagcccctttttttgtactcttcctgatccctgtggaatcaaactcacctaggcaccgttcactgctgcagattctcctgtcctttgcatccgggggactccttggtgacgcctttctgcacctgatcccacacgccctggagccccactcacatcacacattggaacaacccggacacgggcactcacatagcggacagggccctatcctgagtgtgggcctctgggtattatccgggatcgtcgcctttctggtcgtcgagaagtttgtacggcacgtcaaagggggtcacggccattcacatggacatggtcacgctcattctcacacccgcggatcacacggacacggaagacaagagcggagcactaaggaaaagcaatcatccgaagaggaggaaaaagaaacgcgcggagtgcagaaaagacgaggcggatccacagtacccaaagacggacccgtgcgcccacagaacgcagaggaggagaagagaggcctggacctgagggtcagtggctacctaaaccttgctgctgatctcgcacacaattttacagacgggttggctatcggcgctagctttcgcggtggacgcggacttgggattctcaccacaatgacagtcctgctccacgaggttcctcatgaagttggggattttgccatcctggtgcagtctggttgttcaaaaaagcaggccatgaggctgcagctccttaccgctgttggcgcactggctggaacagcatgcgccctgttgactgaaggcggagccgtggggtctgagatcgccggaggcgcaggacctggttgggtccttcctttcacagccggagggttcatatatgtggccacagtctcagtgctcccagagctactgagagaagcttcgcctctacagtctctgctcgaggtactgggtcttctcggaggggtaatcatgatggttctgatcgcgcacctggagtag

SEQ ID NO: 35214 - DNA, 663 bp, Artificial Sequence
  derived and/or modified sequence
atggactcgtcgttgcctgaatgtcgccatattggcaaaggcatccgcgctaaagtcgagcggaactttctgttcagtcgggacctcaaggcaggacttcccagacctagtaagccaggaaaagaaaggatcccagagcctgcgctcggagccaccgtgctgatttctgcggcaccgtttttcgtgctgttcctgatccctgtagaatcgaactctccgagacacaggagcctgctccagatcctgctgagcttcgcctctggaggacttctgggtgatgcctttcttcatctcattccacacgctctggaaccccactctcaccataccttagaacagcctggccacggacacagccacagtggccaagggcctatcctgagcgtcggcctctgggttctttctgggatcgttgcttttttagttgtggaaaagtttgtaagacacgtaaaggggggacacggccactcccacggtcacggtcacgcacattctcacactcggggatcgcacggacacgggagacaggagcggtccactaaggaaaagcaatccagtgaagaggaagagaaagaaacccggggagtgcagaaacgcagaggaggctccaccgtccctaaggacggccctgttaggccgcagaacgcggaagaggagaagtag

SEQ ID NO: 35215 - DNA, 663 bp, Artificial Sequence
  derived and/or modified sequence
atggatagcagtctgcccgaatgcaggcatatcggaaaaggtataagggcgaaggtagagcgcaacttcttgttctcccgcgacctgaaggccggtctgcctcggccatctaagccaggcaaggaacgtatcccagagcccgctctgggcgcaacagtgcttatctctgcagctcctttttttgttcttttccttattccagtggaatccaatagtccacgccaccggtccctcctgcagatcctgctgagctttgccagcggaggcttactcggcgacgcattcttgcacctgatcccacacgccttggaacctcactcccatcacacccttgagcaacctggccacggccactctcacagtggacagggccctattctcagtgtcggcctatgggtgttatccgggatcgtggcgttcctggtcgttgaaaaattcgtgcggcacgttaaaggaggtcatgggcactcccatggccacggccacgcacactcgcatacaagaggatcacatggacacggaaggcaggagcggtctacaaaagagaagcagagcagcgaggaggaggaaaaagagacccgaggggtccagaagcggagagggggatctacagtcccgaaggacggcccagtccggcctcagaacgcagaggaagaaaagtag

SEQ ID NO: 35216 - DNA, 1410 bp, Artificial Sequence
  derived and/or modified sequence
atggcacggggactgggagcccctcactgggtcgccgtgggcctgctgacctgggcaactttggggctcctagtcgctggcctgggcggtcatgacgatctgcacgatgatctccaggaggacttccacggacattcacatcggcatagccacgaagacttccatcacggtcattcccacgcccatggccacgggcacacgcacgaaagcatttggcacggccacacccacgatcacgatcatggacactcgcatgaggacctgcaccatggacactctcacggctactcccatgagtctctgtaccacagaggacacggacatgaccacgagcattcccacggtggttatggcgaatctggcgctccaggaattaaacaggacctggacgccgttaccttgtgggcctatgctctgggcgcaacagtgctcatttccgctgccccattctttgtactgttcctcataccagtggagagcaattctcctcgacaccggtccctgctgcagattctgcttagcttcgcaagtggaggtctgctgggggacgcgtttcttcacttaattcctcatgccttagagcctcattctcaccacaccctcgaacaacctgggcacggccactcacacagcggccagggcccaatcctttctgtaggcctctgggtcctcagcggcatcgtggccttcttagtcgtggagaaatttgtccgccacgttaagggaggacacgggcactcacacgggcacggacacgcccattctcataccaggggtagtcatggccacgggcgacaagaacggtcaactaaagagaaacagtcttcagaggaggaagaaaaggaaactcgaggcgttcaaaaaagacggggaggaagcaccgtaccgaaggatgggccagtgaggccccagaatgccgaggaggagaagagaggtctggatctcagggtatcgggctacttaaacttggccgctgatctggcgcacaacttcacagatggactcgcaatcggagccagctttcgcggaggccgtgggctgggtattctgaccacgatgacagtgctgctacacgaagtgccccacgaggtgggagatttcgccattctggtccaaagtggctgctcgaaaaagcaagcgatgaggttacagctcttaacagctgtgggcgcactcgccggtactgcctgcgctcttctaactgaagggggtgcagtaggcagcgagatcgccggtggcgcagggccaggatgggttctgccctttactgccggtggtttcatctacgtggcaaccgtctccgtgttgcctgagctactacgagaggcttctcctctgcagtctttactagaggtgctcggcctccttggaggagtgatcatgatggttctaatagcacacctcgaatag

SEQ ID NO: 35217 - DNA, 1410 bp, Artificial Sequence
  derived and/or modified sequence
atggccagggggcttggagctccacactgggtggctgtcggtctgctgacttgggccacactgggcctgcttgttgcagggctgggcggacacgatgacctgcacgacgatctgcaggaggactttcacggccattcccatcgccattcccacgaagattttcaccacggccacagtcatgcccacggacatgggcatacgcacgagtccatctggcacggacacacccacgaccatgaccacggccattcccacgaagatctgcatcatggccatagtcatggttacagccacgaatctctataccaccggggtcatgggcacgatcacgaacattcacacggcggatatggcgaaagtggtgctcccggtattaaacaggacctggacgctgtgactctctgggcctatgccctgggagcaaccgttctgataagcgcagccccattctttgtcctgttcttgatccccgtggagtcaaactcacctcggcaccgtagcctcttacagatcttgctgagcttcgcctcgggtggcctgctcggagacgctttcttacaccttataccccatgctctcgagcctcactcccaccacacactggagcagcccggacacggccactcccatagcggccagggccctatcctttctgtcggtctatgggtgttaagtggtatcgtggctttcctcgtcgtggaaaagttcgtccgacacgtcaaaggtggccatggacatagccatgggcatggccatgcgcactctcacactagaggttcccatggacacggacgccaggagcgcagtactaaggagaagcaaagctccgaggaagaagaaaaggagactcggggtgtgcaaaaacggcgaggcggatctacagtccccaaggatggcccagttaggcctcagaacgctgaggaagagaagaggggcttggatttgcgcgtgtctgggtacctgaatctcgcagcagatttggcacacaatttcaccgacgggcttgcaatcggagcgagtttccgcggagggagggggcttggcatcctgaccacaatgaccgtattactgcacgaagtgccccacgaagttggagattttgctatcctggtccagtctgggtgtagcaagaagcaggccatgcgacttcagctgctgaccgctgtcggcgctcttgctggtacagcgtgtgctctcctcactgagggaggagctgtcggcagcgaaatcgccggaggcgcaggaccagggtgggtgctaccatttaccgctgggggattcatttatgtggcaacggtgtctgtactgccagagctgctgcgagaggctagcccactccagtctttgctggaggtgctgggcttattaggcggtgtaattatgatggtgctgatcgctcaccttgaatag

SEQ ID NO: 35218 - DNA, 1410 bp, Artificial Sequence
  derived and/or modified sequence
atggcgcgtggcttgggggcaccacattgggttgctgtcggactgctgacctgggctacgctgggtctgctggttgccggtctgggaggacacgacgaccttcatgacgatctccaagaagacttccatggacactctcaccgccactcccatgaagacttccaccatggccactcgcacgcgcatggccatggacacacgcatgagagtatctggcatgggcatacccacgatcacgaccatggacacagtcatgaagacctccaccacgggcacagccacggatactctcatgagagcctgtatcatcggggtcacgggcatgatcacgaacattctcacggaggatacggagaaagcggtgcccctggcattaagcaggacttagacgctgtgactctgtgggcctatgcgttgggagccacagtactcatctcagcagctcccttttttgtgctctttcttatacctgttgagtctaatagtcctcgacatcgcagcttgctacagatcctgctgtcatttgctagcggcggactcttaggcgatgccttcctgcaccttattccccacgccctcgagccccactctcaccacactctggagcagcctggtcacggccactcacatagcggtcaggggccaattctgagcgttgggctgtgggtcctcagcggaattgtggccttcctggtggtcgagaagttcgttagacacgtaaaaggcggacatggacacagccacggacacgggcatgcccactcacacaccaggggatctcacggtcacggcaggcaggagagatctaccaaagagaagcaaagttccgaggaggaagagaaggagacgcggggagtccagaaacgtaggggcggaagcaccgtgccaaaggatggcccagttagaccgcagaatgccgaagaggaaaagcgcggtctcgacctgcgagtgtctgggtatcttaatctggccgcagatctcgctcacaactttactgatggattggctatcggtgcatcctttcgcggaggtcggggactcggcatcctgacgaccatgacagtgctccttcacgaagtgccacacgaagtcggagactttgccatcctggtgcaatccggatgcagtaaaaagcaggccatgcgtctgcagctactaactgccgtcggcgcacttgccggtacggcttgcgctctactgaccgagggaggggctgtgggttccgagatagctggaggagcaggccctggttgggtgctaccatttaccgccggaggcttcatttatgttgcgactgtttcagtactgcctgagctcctgagagaagcaagtccgttgcagagcctattggaagtcctagggctgttgggcggtgtcataatgatggtgttgatagctcacttggagtag

SEQ ID NO: 35219 - DNA, 663 bp, Artificial Sequence
  derived and/or modified sequence
atggactccagccttccagagtgtcgccatatcggcaagggaatccgcgcaaaggtcgaaaggaactttctgttttcccgagatctgaaggctggcctgccaagacctagcaagcccggaaaggagcggatccccgagcctgctttaggcgctaccgtcctgatctctgctgccccattcttcgtcctgttccttatccccgtcgagtctaattcccccaggcacaggtccctgctccaaatcttgttgtcatttgccagcggaggcctcctcggagacgcatttctgcacctgatcccccacgcactagagccacatagtcaccacacattggaacagccaggacatggacattcacacagcgggcaggggccaatactgagtgtgggattatgggtgttgtccggaatagtggcgttcctggttgtcgagaagtttgttcgtcacgtgaaggggggacatgggcacagccacggccatggccacgcccactctcatacccggggatcacatggacatggcagacaagagcgtagcacaaaggaaaagcagagtagcgaagaagaagaaaaggaaacgcgcggagtgcagaaaagacggggaggaagtacagtaccaaaggatggccctgtgagacctcagaacgctgaagaggaaaaatag

SEQ ID NO: 35220 - DNA, 663 bp, Artificial Sequence
  derived and/or modified sequence
atggattcctcattgccagagtgccggcatattgggaaaggcattcgagcaaaagttgagcgtaatttcctgttctcgagggacctgaaagctggtctcccacgcccaagtaaacctggtaaggagagaattcctgagccagccctaggcgcaactgtcctgatcagtgcagcccctttcttcgttctctttctaattcccgttgagagtaactctcccaggcacaggtctctccttcagatcctgctcagttttgcttccggaggtctgttgggggacgctttcttacatttgataccccatgcgctggaaccccactctcaccataccctggagcaacctggtcacggccattctcattctggccagggtcctatcctgagcgtaggactgtgggtgctgagcggcatcgtggccttcctggttgtggaaaagttcgtccggcatgtgaagggcggtcatggtcactcacacggtcacgggcacgcccactcccatactaggggatcccatggtcacggacgccaggagcggagcacaaaagaaaagcagagcagcgaagaggaggagaaggaaaccagaggcgtgcagaaaagacgcggagggtccaccgtacctaaggatggacctgtaagaccccaaaacgccgaggaggagaaatag

SEQ ID NO: 35221 - DNA, 1410 bp, Artificial Sequence
  derived and/or modified sequence
atggctcgagggctgggtgcgccacactgggtggcagttggtttgctcacgtgggcgactctgggcctgctcgttgccggattaggcggtcacgacgacctacacgacgacttacaagaagatttccacggccacagccatcggcattcccacgaagattttcaccatggtcacagtcatgcgcatggccacgggcatacccatgaatccatttggcacggccacacccatgatcacgatcacggacacagtcacgaagatctccaccacggtcattcccatggatactctcatgagtcactgtatcacaggggacatgggcacgatcacgagcatagccatggcggatacggcgaatctggagctcctggcatcaaacaagacctcgatgctgtcactttgtgggcttacgcgctgggagccaccgtgcttattagcgccgcaccctttttcgttctgttccttatccccgtggagtccaatagcccaaggcataggtcactgctccagatactgctgtctttcgcctctggaggactcctgggcgacgcattcttacacctaattccccatgcactggaaccccactctcatcacacgctcgagcagcctggccacggccactcccacagcgggcagggtcctatcttgtccgtgggactgtgggtgcttagtggcatcgttgctttcctcgtggtcgagaagttcgtgagacatgtaaagggcggtcatgggcatagtcatgggcacggacacgcacactcccatacaagaggatcgcatggacacggtcgacaagagagatccaccaaggagaagcagtcgtccgaggaggaggagaaggaaacccgtggggtccagaagcgcagggggggatcaaccgtacccaaagatgggcctgtgcggcctcagaatgccgaggaagaaaaaagaggactagacctgcgggtcagcgggtacctgaatctggccgctgatttggcacacaatttcacagacgggctcgccattggcgcaagtttccggggtgggagaggactgggcattctcacaactatgacagtgttgctacatgaagtgcctcacgaggtcggagacttcgctatcctcgttcaaagcggatgttctaaaaaacaggccatgaggctacagttactgaccgccgtcggggctctggcgggaaccgcatgtgctctcctgaccgagggaggtgctgtgggttccgagattgcaggaggtgctgggcctgggtgggtgctgccattcaccgcaggtgggttcatatacgttgcaacagtaagcgttttgcctgagctcctccgggaggccagtccgctgcagtctctgctggaggtgcttgggctactgggcggagtcatcatgatggtcctgattgctcacctcgagtag

SEQ ID NO: 35222 - DNA, 1410 bp, Artificial Sequence
  derived and/or modified sequence
atggcacgcggtctgggcgcaccccattgggtggccgtaggactacttacctgggcaactcttggcctcctggtggcgggtctcggcggacacgacgatctccatgatgacctccaggaagattttcatgggcactcacatcggcactcccacgaagactttcatcacggtcactcccacgcccacgggcacggccacacacacgagtcaatctggcacggccatactcacgaccacgaccatgggcacagtcacgaggacttgcatcacgggcactcccacggctatagtcatgagagcctgtatcatcgtggccacggccatgaccatgagcattcccatggaggctacggggagtctggcgcacctggcataaagcaagacctggatgctgtgacactttgggcgtacgccctgggtgcaacagtcctgatttctgctgcgcctttctttgtattgttcctgataccagtcgaatctaacagccccagacacaggtccctcttacagattcttctgtcctttgcatccggtggcctgctaggcgacgcctttttacacttgatcccccacgcgctggagccacacagccatcatacgttggagcagcccggacacggtcacagtcactctggacagggccctatactttcagttggactgtgggtgctgtccggtatcgtggccttccttgttgtggagaagttcgtccgccacgtcaagggaggccacggccacagccatggccacggacacgcccatagccacacccgtggctctcatggccacgggcgacaagagaggtctactaaggagaagcagtccagtgaggaggaagaaaaggagactaggggggtgcaaaagagaagaggagggagcaccgtgcccaaagacggccctgtgcggccacaaaacgctgaagaggagaagcgtggtcttgatctgagggtgtccggctatttaaacctcgcagccgacttagctcataactttacggatggactggccataggcgcttcatttcgaggcggacggggtctgggaatactgacaacaatgaccgtcctcctgcatgaggtgccccacgaggtaggagattttgcaattctggtccaatctgggtgttctaagaaacaggccatgcggctgcagttgctcaccgctgtgggtgccctggcaggcactgcttgcgcactgctgaccgagggtggggctgtcgggagcgagatagctggtggggctggacccggatgggtgctaccatttaccgctggtggctttatatacgttgccaccgtgtccgtacttccagagctgctgagagaagcatccccactgcagagtctattagaagtcctgggacttcttggcggtgtaattatgatggtacttatcgcacaccttgaatag

SEQ ID NO: 35223 - DNA, 1410 bp, Artificial Sequence
  derived and/or modified sequence
atggcgagaggtctgggcgcacctcattgggtggctgtaggcctgttgacttgggccacactggggcttttggtggcagggctgggcggtcacgacgacctgcacgacgaccttcaggaggacttccacggccactcccacagacactcacacgaagatttccatcatggccactctcacgcccacggccatggacacacccacgaatccatctggcatgggcacactcacgatcacgaccatgggcacagccacgaggacctgcaccatggacactcccacggttactctcacgagtcactttaccatcgcggacacggccacgatcatgagcacagtcacgggggatacggcgaaagcggggctcctggaatcaagcaggacctagacgcagtcaccctttgggcctacgccttaggagctactgtcctgatatcggccgcacctttctttgtgctgtttttaattcccgttgaatccaattccccaaggcataggtcattgctccagatcttattaagttttgccagcggtggattgctgggagatgcctttctgcatctcatccctcacgcgcttgaaccccatagtcaccatacactcgagcagcctggccatggccattctcacagtgggcaaggtcctatactgtctgtaggcttgtgggtactctccggtatcgttgccttcctcgttgtggagaaatttgtcaggcatgtgaaaggcggacatggacactcacatgggcacgggcacgcccactcccacactcggggttctcacggacatggcagacaggagcgctctaccaaggaaaaacagtcctccgaagaagaagaaaaagaaaccaggggcgtacagaagcgtcgaggcggatcgaccgttcccaaagacgggccagtgcggcctcagaatgcagaggaggagaagaggggactcgacctgcgggtgagtggttacttaaacttggctgcagaccttgcccataacttcacagacgggctcgctattggggctagcttcagagggggacggggtctgggtatcctgacaacgatgaccgtgctgcttcacgaggtgccccacgaggtcggtgacttcgcaatcctcgtgcagtccggatgtagcaaaaaacaagcgatgcgccttcagctgctcaccgccgtgggggctttggccggaacagcttgcgcactgctcaccgagggcggtgcagtgggatctgagatcgccggtggggctggccctggatgggtgctgccctttactgcaggaggattcatctatgtcgcgactgtttctgttctcccagagttgctgagggaggccagccccttacaatctctgctagaagtacttggattgctgggcggtgtgatcatgatggtactcatagctcacttggaatag

SEQ ID NO: 35224 - DNA, 1410 bp, Artificial Sequence
  derived and/or modified sequence
atggcacgcggattgggcgctcctcattgggttgctgtcggtctgctaacgtgggcaactctgggattattggttgccggattggggggacatgacgacctgcatgacgaccttcaggaagattttcacggccacagccatcggcacagtcacgaagattttcaccacgggcactctcacgcccacggccatggtcacacacatgaaagcatctggcatgggcatactcatgatcacgaccatgggcactcccacgaagacctgcatcacggccattcacatgggtattcccacgaatctctataccacagaggacatggacatgatcatgagcactcccatgggggatatggggagagcggggcacctgggattaaacaggacctggatgctgtgacactttgggcctatgccctgggggcaaccgtgctgatcagcgcagccccattcttcgtcctctttctaatccctgttgagagcaatagtccacgccatcgttctctgttgcagatcctcctgtctttcgcatcaggcggtctgcttggcgatgcgtttctgcacctaattccccatgccctcgagcctcacagccatcatacactggagcagcctggccacggacactctcattccggccagggaccgatcctgtcagtagggctgtgggtgttgtccggtatcgtcgccttcttggtagttgagaagttcgtgcgccatgtgaagggtggccatggccattctcatgggcatggccatgcacacagccacaccagggggagccatggccatgggagacaggaacggagtacaaaggagaaacagtccagcgaggaggaagagaaagagactcgcggagttcagaagagacggggaggatcaacagttcctaaggatggcccagtgcgtccccagaacgccgaagaggaaaagcgcggtctggacctgagggtcagcggataccttaaccttgcagctgacctggcccacaatttcactgatggtctggccattggagcgtcttttagagggggaagagggctggggatcctgacaactatgaccgtcctgctgcacgaggtcccacacgaggtcggggactttgccattcttgtgcaaagcgggtgctccaagaagcaggctatgcgtctgcagctcctgaccgccgttggagcactggctggtacagcctgcgcactccttactgagggaggagcagtcgggagcgaaatcgccggtggggctggacccggatgggtgctgccctttactgccggaggatttatctacgtggctaccgtaagtgtattaccagagctactccgtgaggcttccccattgcagtccctcttagaggtgctgggtctccttgggggagtaattatgatggtcctgatcgcacacttggaatag

SEQ ID NO: 35225 - DNA, 663 bp, Artificial Sequence
  derived and/or modified sequence
atggatagctctttaccggagtgtcggcatatcgggaagggcataagggccaaggtagagcgaaattttcttttcagtcgtgatctcaaagcaggcctgccacgaccttctaagccaggcaaggaacggatccccgagccagccctgggagccaccgtcttgataagcgccgctccttttttcgttctctttctcattccagtagaatcgaatagtcccaggcaccgctctctgctgcaaatcttgcttagctttgcaagtggcggtctgctcggcgatgccttcctgcatctgatcccacatgcacttgagccacatagccaccacaccctggaacagccgggacatgggcattcccacagtggtcaggggcctatcctttcagtgggcctctgggttctgtctggtattgtggcctttctagttgttgaaaagttcgtcagacatgtgaagggtggccacggacactctcatggccacggacacgctcactctcacactaggggttctcatggccacggaaggcaagaacgcagtaccaaagagaaacaaagcagcgaagaagaggagaaggagactcgcggagtgcaaaagcggagaggcggttcaactgtaccaaaggatggtccagtgcggcctcagaacgctgaggaggagaagtag

SEQ ID NO: 35226 - DNA, 1353 bp, Artificial Sequence
  derived and/or modified sequence
atggcacggggacttggtgcaccccattgggtggctgtgggtctcctcacgtgggctactctgggcttgctagtggcgggactcggcggacacgacgatctccatgacgatctgcaagaggactttcacggccacggacatacccatgaaagcatatggcatgggcacacacacgaccatgaccacggtcatagccacgaagatctgcaccacggacattcccacggctactcccatgagtctttgtatcacagaggccatggtcacgatcacgagcattcacatggcggttatggcgaaagcggggctccgggaatcaagcaagacctagacgccgtcaccctctgggcatatgccttgggggctaccgtactgatcagcgcagccccattcttcgttctgttcctaattccagtagagagtaacagtccaaggcataggagcttgctgcagattttactgtccttcgcgtccggaggtctccttggtgatgcattcttgcatttaatcccacacgctctcgaaccacacagccatcacacactcgaacagcctggacacggacactctcattcagggcagggcccaatactgagcgtgggactgtgggtgctatcaggcattgtcgccttcctcgttgtcgagaagtttgttcggcacgtaaagggcggtcacggtcatagtcatgggcatggacatgcccactcacacacaagaggatcgcacggacatggcagacaggaaagatcaactaaggagaagcagagcagcgaggaggaagagaaggaaacacgaggggtgcaaaaaaggaggggtggctccactgtacctaaagatggcccagtaagaccccagaatgccgaggaggagaaaagaggccttgatctgcgggtgtccggctatctcaatttggccgcagacttggcacacaacttcaccgatggacttgcgataggagccagcttccggggaggtaggggcttggggatattgaccaccatgactgtgctgctccacgaggttccccatgaggtgggtgacttcgctatcctggtgcagtctggttgcagtaagaagcaagcgatgcgcttgcaactgcttacagcagtaggtgccctggctgggaccgcctgcgcgctcctgaccgaaggcggagctgtcggatccgagatcgcaggcggtgcgggtcctgggtgggtattgcccttcactgccggtggatttatttatgtagctaccgtatccgtgctgcccgagctgctgagagaggccagtccactgcagtcattactcgaggtgctgggcttgctgggtggcgtcatcatgatggtgctgattgcccacttagaatag

SEQ ID NO: 35227 - DNA, 663 bp, Artificial Sequence
  derived and/or modified sequence
atggacagctcactccccgagtgtcggcacatcggcaagggcatacgggctaaggtggagcgcaattttcttttctctcgggatctcaaggcaggcctcccaaggccatccaagcctggcaaggagagaattccagagcctgcgctgggggctacagtacttattagtgccgctccttttttcgtgttgttcctaatcccagtcgaaagtaactctccacgccaccgaagcttgctccagattttgctaagcttcgcctccgggggtctgctgggagatgcattcctgcatttgataccacacgcactggagccacactctcaccacactctggagcagcccggtcatggtcatagtcattcgggacaggggccaatcttatcagtgggcttgtgggtactgtccggcattgtagcttttctagttgttgagaaatttgttaggcatgtcaaaggcggtcatgggcacagccatggccatgggcacgctcattctcatactagagggagtcatggacacggtcggcaggaacgaagcactaaagaaaagcagtcaagcgaagaggaggagaaggaaaccaggggggtccagaagcgacgaggcggaagtactgtgcccaaagacggccctgtgcgccctcagaatgcagaggaggaaaaatag

SEQ ID NO: 35228 - DNA, 1410 bp, Artificial Sequence
  derived and/or modified sequence
atggcacgcggactgggcgcacctcactgggtggccgtcggcttgttgacttgggccactctgggtctgctggtcgccggactggggggtcacgacgaccttcacgacgacctgcaagaagactttcacggacatagtcataggcactctcatgaggatttccaccatggtcattcccatgctcatggccacggtcatacccatgaaagcatctggcacgggcacacccacgaccacgaccacggacacagtcacgaagatttgcaccatggtcacagtcacggatatagtcacgagtccctgtatcacaggggccatgggcacgatcacgagcactcccatggtgggtacggggagagcggggctcctggaattaaacaggatctggacgccgtgactctctgggcctatgcactaggcgctaccgtcctgatctcagcagccccttttttcgttctctttctgatcccggtcgagtccaactcacccaggcatcggtccttgctgcagattttactgtcctttgcctccgggggactgctgggcgatgcttttctacatttgatccctcacgccctggaacctcactcacatcacactctggaacagccagggcacggacactcacacagcggccagggaccgatacttagcgtggggctctgggtcctgtcggggatcgtagcctttctggtagttgaaaaattcgtccgtcatgtcaagggcggacacggccatagccacgggcacggacatgctcactcacacacgaggggaagtcacggtcacggtaggcaagagcggtccacaaaagaaaaacagagttccgaggaggaagagaaagagactagaggtgttcagaaacggagaggcggttcaactgtgccaaaagatggtcctgttcgaccacagaacgccgaggaagagaaacgcggtctggacttaagagtcagtgggtatctcaacctcgccgctgatttggcccataatttcacagatggtctcgcaattggcgctagtttcagaggcggtagaggattggggatccttaccacaatgacggtcctcttgcatgaggtgccacacgaggtaggcgacttcgctatcttggtacagtctgggtgtagcaaaaaacaggccatgcgcctgcagctcctcacagccgtcggtgcgctcgcagggaccgcctgcgccctattaacggaaggcggtgcagtgggctcagagattgccggaggcgcagggccaggatgggtgttgccatttacggctggagggtttatctatgtagccactgtgtcggtgctgccggagctgctgcgtgaagcttcgcctctacagtctctgctggaagttctgggcctgttggggggtgtaataatgatggttctaatcgcccaccttgaatag

SEQ ID NO: 35229 - DNA, 1353 bp, Artificial Sequence
  derived and/or modified sequence
atggcaaggggacttggcgctccacactgggtggctgttgggctgctcacatgggccaccctgggactgctcgtggcgggactgggcggacacgacgacctgcatgatgacttgcaggaagatttccatggacatgggcatacccatgagtccatctggcacggtcatacccacgaccatgatcatggccattcccatgaggatctccatcacggccatagtcacggctacagtcatgagagcctgtaccacaggggccacgggcacgatcacgaacattcccacggaggatacggcgagtcaggggctcctggaatcaagcaggacctagacgcagtgacattatgggcctatgcactcggggcaactgttctgatctcagccgctcctttcttcgtcctcttcctgatcccagtggaaagcaactctcctcgacacagaagcttgctgcaaattctgctttccttcgcttccggcggattattaggggatgcctttcttcacctcatccctcacgcattggagcctcactcccatcatacactggagcaacccggtcatggccattctcattctgggcaggggccaattttgagcgtcggcctgtgggtgctcagcgggattgtggcatttctggtggttgagaagtttgtcaggcacgtgaaggggggacatggccattcacacggtcacggacacgctcacagccatacccgagggtcgcacggccatgggagacaggaaagatcaactaaagaaaagcagtcctccgaggaagaagagaaagagacgagaggtgtgcagaagcgcaggggaggttcgaccgtacccaaggacggacctgtcagacctcagaacgccgaggaagagaagcggggactcgatctcagagtcagcggttatctcaacctggctgccgacctcgctcacaatttcactgatggcctggctatcggggcttccttcagagggggtaggggactgggcatcctcactactatgaccgtgctgctacatgaggtgccacatgaggtgggagactttgctatcctcgtgcagagcgggtgctccaagaagcaagctatgaggctgcagctactgactgctgttggtgctctcgcaggaaccgcttgcgcgttactgaccgaggggggagccgtaggcagtgagattgcaggcggtgcgggaccaggctgggttcttccttttactgctggcggttttatctacgttgccaccgtgtccgtgctccccgagttactgcgcgaagcctccccactacagagtcttctagaggttttgggtttgctgggaggcgtgatcatgatggttctaattgcacacctggagtag

SEQ ID NO: 35230 - DNA, 1353 bp, Artificial Sequence
  derived and/or modified sequence
atggcgaggggacttggcgctccccactgggtagctgtggggcttttaacttgggctactttgggtcttcttgtggccggactggggggacacgatgatctacacgatgatcttcaggaagactttcacgggcacgggcacacacatgagtctatatggcatggtcacacccatgaccacgatcatggacatagccatgaggaccttcaccatggccacagccatggctactcccatgaatctctgtatcataggggccatggacatgatcacgagcactctcatgggggttatggcgaaagcggggctcccggtattaagcaggacctggacgctgttactctgtgggcctatgccctgggcgctaccgtattgatatctgctgccccattctttgtgctgtttctgattcccgttgagtccaacagtccacgccatcgatccctgctgcagatcctcttgtcctttgctagtggcggactccttggagacgcctttttgcacttgattccacacgcgttggaacctcacagccaccacactcttgaacagcccggtcacggccactctcactctggccaggggccaatcctcagtgtgggtctgtgggtcctaagcgggatcgttgcttttctagtcgttgagaaattcgtccgacacgtcaaaggagggcacggtcatagtcatgggcacgggcatgctcactcccacactaggggaagccacggccatgggcgacaagagcggtccacaaaggaaaaacagagctcggaagaggaggagaaggagacgcgcggagttcaaaaacgcagagggggttccaccgtgccaaaagacggtcccgtcaggccgcaaaacgccgaggaagagaagaggggactggacttgagggtgtctgggtatttaaacctggctgctgacctcgcacataactttactgatggcttagccatcggcgcttcctttcgaggtggtaggggtctcgggattcttacaacgatgaccgtcctcctgcatgaggtgccccacgaggtgggagatttcgccatcctggtgcaatcaggatgctctaagaaacaagcgatgcgacttcaacttctcacggccgtcggtgccctggcgggtacggcgtgtgctctgctcaccgagggcggtgccgtcgggtcagagattgccggaggcgctggcccaggttgggtcctcccttttacagcaggtggattcatttacgtcgccaccgtcagtgtattgccagagttactgcgcgaagcttctcccttacagtcactgctggaggtgttgggtctcttgggcggagtgatcatgatggtactgatcgcccatctggagtag

SEQ ID NO: 35231 - DNA, 1353 bp, Artificial Sequence
  derived and/or modified sequence
atggctcgtggtctcggggctccacactgggtggccgtcggtctcttgacatgggccacattgggcctgcttgtggccggtcttgggggtcacgatgacctgcatgatgatctccaggaagactttcatggccatggtcatactcacgagtccatctggcacggccacacacacgaccatgaccacgggcacagccacgaagacctccaccacggccactctcatggatactcccacgaatcactgtatcatcggggtcatggtcatgaccacgaacacagtcacgggggttacggggagtccggggctcctggcattaagcaagatctcgatgccgtgactctttgggcatacgcgctgggtgctacagtactcatttcagccgctcccttctttgtcctgtttttaattcctgtggaaagcaacagtcctaggcataggagcctcctgcaaatcctgctgtctttcgccagcggagggctcctgggcgatgccttcctccatctgatccctcacgccctcgagccccactcgcatcatacactcgaacagccgggacacggccattcccattctggtcaggggccaatcctgtctgtgggcttgtgggtactgtccggcatcgttgctttcttagttgtagaaaagtttgtgcggcacgtgaagggtgggcatggacatagccatggccacggccatgcccacagccatacaagaggcagtcacggccacgggagacaagaacggtccaccaaggagaagcagtcttcggaagaggaagagaaggaaactagaggcgtgcagaaaagaagaggcggatccactgtgcctaaagacggaccagttcggccacagaacgctgaagaagaaaagcgtgggctggatctgcgggtcagtgggtatctgaaccttgccgcagacctggcgcacaacttcaccgacgggcttgcaatcggcgcttcatttcggggagggagggggctagggattctgaccacgatgaccgtgttgttacatgaagtgccacacgaagtgggcgattttgcaattctggtacagtctgggtgctctaagaagcaggcaatgcgtctgcagctcttgactgcagtcggtgccctcgccggaaccgcctgcgctcttctgactgaaggaggagccgttggctcggagatcgcgggaggcgcaggtccagggtgggttttaccattcacagccggaggctttatctatgtggcaacggtgtcagtcctcccagaacttctacgggaagctagccctctgcagtctctgcttgaagtcttaggcctgttgggcggagttataatgatggtgctgatagcccacctagagtag

SEQ ID NO: 35232 - DNA, 1353 bp, Artificial Sequence
  derived and/or modified sequence
atggcccgaggtctaggggctcctcactgggtggccgtgggactgttgacctgggccacacttggactgctggtcgccggactgggcggacacgatgacctacacgacgacctccaagaggacttccatggacacgggcatactcacgagagcatttggcatggacacacccacgaccatgaccacggtcatagtcacgaggacctgcaccacggacactctcatggctactctcacgaatccctgtaccatcggggtcatggccatgatcacgagcattctcatgggggatatggcgagtccggagcacctggtattaagcaggatttagacgccgtgactttatgggcctatgctttaggcgctaccgtgttgatcagtgctgctccgttctttgtgctgttcctcattcccgtggagtctaactctcccagacataggtccctgctgcagatactactgagctttgcatcaggaggactgcttggcgatgccttcctccatctgatcccccatgctctcgaaccacattctcatcacactctggagcagccaggacatggccactcacactccggccaaggcccaatactgtcagtgggtctgtgggtgctctctggcatcgttgccttcctggtcgttgagaaatttgtgagacacgttaagggtgggcacggtcatagccatggtcacggtcacgctcacagccacactaggggatcacacggtcatggacgtcaagagagaagcaccaaggagaaacaaagctctgaggaagaggagaaggagactagaggagtccaaaagaggcggggagggagcacagttcctaaggatgggccagtgaggcctcagaatgcagaggaggaaaagcgtggcctggacctgagggttagcggctacctgaatctcgccgctgacctcgcgcacaactttacagacggactggcaatcggcgcttcttttcgcggtggccgtgggttggggatactgaccaccatgaccgtgttgctacacgaggtgccacatgaggtcggggacttcgcaattctagtccaatctgggtgttccaagaaacaggctatgcgactgcagcttttgacagccgtgggagcgttggctgggaccgcctgcgccctcctgacggaaggcggtgccgtcggttcagagattgcaggtggtgcaggcccagggtgggtcctcccctttaccgctggcggattcatctacgtggccactgtgtcagtgctccccgagctgctgcgagaggctagtccactgcaatcgcttctggaggtgctgggtttgctgggcggagtgatcatgatggtcttgatcgcacacctggagtag

SEQ ID NO: 35233 - DNA, 1353 bp, Artificial Sequence
  derived and/or modified sequence
atggctcgcggactaggtgctcctcattgggtggccgtgggtctccttacttgggctactcttggcctgctggtcgccggtctggggggacacgacgatctccacgatgacctgcaagaggacttccatgggcatgggcatactcatgaaagcatctggcatgggcatacccacgaccacgaccacggacactctcacgaagatctgcatcatggccatagtcatgggtattctcatgaatctttgtaccatcggggtcacggccatgaccatgagcactcccacgggggatacggcgaaagcggtgccccaggcattaaacaggatctggatgccgtcacgctgtgggcatacgccctcggcgctaccgtgcttatttctgctgctccgtttttcgttctgtttctcattccggtcgaaagcaattctcctaggcatcggtctcttcttcaaatcctgttgtccttcgctagcggcggtttgctgggagatgccttcctccaccttataccacatgctctggagccccactcccatcataccctcgagcagcccggtcacggacacagccattcaggtcagggacccatactgtccgtgggcctgtgggtgctctcaggcatagtggcatttctggttgtcgaaaaatttgtcagacatgttaagggtgggcacggtcactcacacggccatggccacgcgcacagtcacactcgcggaagtcatggccacgggaggcaggaaagatccacgaaagagaagcagtcgtctgaggaagaggagaaagaaacaagaggagtccagaaacggagaggcggttctaccgtgcctaaagatggcccagtccggcctcagaatgccgaagaggaaaaaagaggcctggatttgagagtgtctggatacctgaacctggcagcggatctggcccacaatttcactgacgggctggctataggcgctagctttaggggaggacggggactgggcattctgacaactatgacagttttgcttcacgaagtcccccacgaagtgggcgactttgcaattctcgttcagagcgggtgcagcaagaaacaggccatgagactgcagcttctgacggctgtgggagccctggcaggcacagcatgtgcccttctcaccgaggggggagctgtgggatctgagattgccggaggagctggcccaggctgggtgctccccttcaccgcaggtggattcatttacgttgccaccgtctctgtcctccccgaactgctgcgcgaggcgagtcccctgcagtcattactggaggtccttgggttattggggggagtgattatgatggtgctcattgcacacctggagtag

SEQ ID NO: 35234 - DNA, 2153 bp, Artificial Sequence
  derived and/or modified sequence
atattggtaaaggcattagggcgaaggtggaacggaacttcctgttctcgcgggatctaaaggcgggactgccacgtccaagcaaaccgggaaaggagaggatcccggagccgcgtgatggccagaggcctgggggccccccactgggtggccgtgggactgctgacctgggcgaccttggggcttctggtggctggactcgggggtcatgacgacctgcacgacgatctgcaagaggacttccatggccacagccacaggcactcacatgaagatttccaccatggccacagccatgcccatggccatggccacactcacgagagcatctggcatggacatacccacgatcacgaccatggacattcacatgaggatttacaccatggccatagccatggctactcccatgagagcctctaccacagaggacatggacatgaccatgagcatagccatggaggctatggggagtctggggctccaggcatcaagcaggacctggatgctgtcactctctgggcttatgcactgggggccacagtgctgatctcagcagctccattttttgtcctcttccttatccccgtggagtcgaactctccccggcatcgctctctacttcagatcttgctcagttttgcttccggtgggctcctgggagatgctttcctgcacctcattcctcatgctcttgaacctcattctcaccacactctggagcaacccggacatggacactcccacagtggccagggccccattctgtctgtgggactgtgggttctcagtggaattgttgcctttcttgtcgtggagaaatttgtgagacatgtgaaaggaggacatggtcacagtcatggacatggacacgctcacagtcatacacgtggaagtcatggacatggaagacaagagcgttctaccaaggagaagcagagctcagaggaagaagaaaaggaaacaagaggggttcagaagaggcgaggagggagcacagtacccaaagatgggccagtgagacctcagaacgctgaagaagaaaaaagaggcttagacctgcgtgtgtcggggtacctgaatctggctgctgacttggcacacaacttcactgatggtctggccattggggcttcctttcgagggggccggggactagggatcctgaccacaatgactgtcctgctacatgaagtgccccacgaggtcggagactttgccatcttggtccagtctggctgcagcaaaaagcaggcgatgcgtctgcaactactgacagcagtaggggcactggcaggcacagcctgtgcccttctcactgaaggaggagcagtgggcagtgaaattgcaggtggtgcaggtcctggctgggtcctgccatttactgcaggtggctttatctacgtagcaacagtgtctgtgttgcccgagctgctgagggaggcatcaccattgcaatcacttctggaggtgctggggctgctggggggagttatcatgatggtgctgattgcccaccttgagtgaggggtggataaactacccctgccccaaacctctacccctaactccaggtcaggggtgcgtagaggttgggggccctggccagggacatctgccaaaggaaggaactgtagcctgggagaatggttactttggcattagggccttcaagggctggcagtcttacagaggctggagcggtgagaatgagaggccagagggaccatagtgttgggcactgtctgaccatgttgcatttggaaggctaaatggggccatgaagaaggctggaagggacagggggtgatggcagcctacctggtgtcccctaccccacctgttctcggagaaccaagttgctacacaggaagttctccaaggtccagtttcctttctcccaccagttggtggaggcttcagggaagaccagagtcctggacagagagggtaacaggaggagtcggggataaacatcaaacatcaatcgtgtgtcctgatttgggagtgattggggggatggggtgggagagggttagttggtattctcatggcctgattttttttgtttctattccttttatatcactgtgtttgaatcgagggggaggggtggtaaccggaaataaagacctccgatcttccgccccaca

SEQ ID NO: 35235 - DNA, 2409 bp, Artificial Sequence
  derived and/or modified sequence
tcgcgggatctaaaggcgggactgccacgtccaagcaaaccgggaaaggagaggatcccggagccggtgagaattctctgttttttctctaccatcctttccaggccttttcctcacctaatgagtcgtagagacgagggcccagagagtctgtaaagtggctggtgaaagattagtgtcccagggccctacatccgggaggtggttcgggataaagagaactagtcttgggaacaatgtaggtgggaacttaagggaatgggagagcggcccatagaggtggacggagggcgcgattggagtaaagcggaccctgtgtaggtatagagttgagtcaagtggagtcactgcctctgtccctctggtcagcgtgatggccagaggcctgggggccccccactgggtggccgtgggactgctgacctgggcgaccttggggcttctggtggctggactcgggggtcatgacgacctgcacgacgatctgcaagaggacttccatggccacagccacaggcactcacatgaagatttccaccatggccacagccatgcccatggccatggccacactcacgagagcatctggcatggacatacccacgatcacgaccatggacattcacatgaggatttacaccatggccatagccatggctactcccatgagagcctctaccacagaggacatggacatgaccatgagcatagccatggaggctatggggagtctggggctccaggcatcaagcaggacctggatgctgtcactctctgggcttatgcactgggggccacagtgctgatctcagcagctccattttttgtcctcttccttatccccgtggagtcgaactctccccggcatcgctctctacttcagatcttgctcagttttgcttccggtgggctcctgggagatgctttcctgcacctcattcctcatgctcttgaacctcattctcaccacactctggagcaacccggacatggacactcccacagtggccagggccccattctgtctgtgggactgtgggttctcagtggaattgttgcctttcttgtcgtggagaaatttgtgagacatgtgaaaggaggacatggtcacagtcatggacatggacacgctcacagtcatacacgtggaagtcatggacatggaagacaagagcgttctaccaaggagaagcagagctcagaggaagaagaaaaggaaacaagaggggttcagaagaggcgaggagggagcacagtacccaaagatgggccagtgagacctcagaacgctgaagaagaaaaaagaggcttagacctgcgtgtgtcggggtacctgaatctggctgctgacttggcacacaacttcactgatggtctggccattggggcttcctttcgagggggccggggactagggatcctgaccacaatgactgtcctgctacatgaagtgccccacgaggtcggagactttgccatcttggtccagtctggctgcagcaaaaagcaggcgatgcgtctgcaactactgacagcagtaggggcactggcaggcacagcctgtgcccttctcactgaaggaggagcagtgggcagtgaaattgcaggtggtgcaggtcctggctgggtcctgccatttactgcaggtggctttatctacgtagcaacagtgtctgtgttgcccgagctgctgagggaggcatcaccattgcaatcacttctggaggtgctggggctgctggggggagttatcatgatggtgctgattgcccaccttgagtgaggggtggataaactacccctgccccaaacctctacccctaactccaggtcaggggtgcgtagaggttgggggccctggccagggacatctgccaaaggaaggaactgtagcctgggagaatggttactttggcattagggccttcaagggctggcagtcttacagaggctggagcggtgagaatgagaggccagagggaccatagtgttgggcactgtctgaccatgttgcatttggaaggctaaatggggccatgaagaaggctggaagggacagggggtgatggcagcctacctggtgtcccctaccccacctgttctcggagaaccaagttgctacacaggaagttctccaaggtccagtttcctttctcccaccagttggtggaggcttcagggaagaccagagtcctggacagagagggtaacaggaggagtcggggataaacatcaaacatcaatcgtgtgtcctgatttgggagtgattggggggatggggtgggagagggttagttggtattctcatggcctgattttttttgtttctattccttttatatcactgtgtttgaatcgagggggaggggtggtaaccggaaataaagacctccgatcttccgccccaca

SEQ ID NO: 35236 - DNA, 1015 bp, Artificial Sequence
  derived and/or modified sequence
gggaggaagggcgggcgagcggcccaagacatgatccctggctgagagtagggataccgaagaggtcccagggattcccaaggattgatcggaggattagctgagcacgaggaagcccctgagagaaagactctggcctggattgggtcgaattaagcccgtcgctctgctcagtaccaaaatgacagcgccaatgtggcagccatctttgtacagacgggaagtctcggcgcgagttcccgccccctcgtctagttggaaaccgaggaggcggtctcctccggcctgttagcccgcctcgcccaccctcccctcaaatcacctccacactcgcgcatgcgtgtcagtgcaggatggattcgtcgctaccggagtgccgccatattggtaaaggcattagggcgaaggtggaacggaacttcctgttctcgcgggatctaaaggcgggactgccacgtccaagcaaaccgggaaaggagaggatcccggagccggcactgggggccacagtgctgatctcagcagctccattttttgtcctcttccttatccccgtggagtcgaactctccccggcatcgctctctacttcagatcttgctcagttttgcttccggtgggctcctgggagatgctttcctgcacctcattcctcatgctcttgaacctcattctcaccacactctggagcaacccggacatggacactcccacagtggccagggccccattctgtctgtgggactgtgggttctcagtggaattgttgcctttcttgtcgtggagaaatttgtgagacatgtgaaaggaggacatggtcacagtcatggacatggacacgctcacagtcatacacgtggaagtcatggacatggaagacaagagcgttctaccaaggagaagcagagctcagaggaagaagaaaaggaaacaagaggggttcagaagaggcgaggagggagcacagtacccaaagatgggccagtgagacctcagaacgctgaagaagaaaaaag

SEQ ID NO: 35237 - DNA, 1842 bp, Artificial Sequence
  derived and/or modified sequence
ctgttctcgcgggatctaaaggcgggactgccacgtccaagcaaaccgggaaaggagaggatcccggagccgcgtgatggccagaggcctgggggccccccactgggtggccgtgggactgctgacctgggcgaccttggggcttctggtggctggactcgggggtcatgacgacctgcacgacgatctgcaagaggacttccatggccatggccacactcacgagagcatctggcatggacatacccacgatcacgaccatggacattcacatgaggatttacaccatggccatagccatggctactcccatgagagcctctaccacagaggacatggacatgaccatgagcatagccatggaggctatggggagtctggggctccaggcatcaagcaggacctggatgctgtcactctctgggcttatgcactgggggccacagtgctgatctcagcagctccattttttgtcctcttccttatccccgtggagtcgaactctccccggcatcgctctctacttcagatcttgctcagttttgcttccggtgggctcctgggagatgctttcctgcacctcattcctcatgctcttgaacctcattctcaccacactctggagcaacccggacatggacactcccacagtggccagggccccattctgtctgtgggactgtgggttctcagtggaattgttgcctttcttgtcgtggagaaatttgtgagacatgtgaaaggaggacatggtcacagtcatggacatggacacgctcacagtcatacacgtggaagtcatggacatggaagacaagagcgttctaccaaggagaagcagagctcagaggaagaagaaaaggaaacaagaggggttcagaagaggcgaggagggagcacagtacccaaagatgggccagtgagacctcagaacgctgaagaagaaaaaagaggcttagacctgcgtgtgtcggggtacctgaatctggctgctgacttggcacacaacttcactgatggtctggccattggggcttcctttcgagggggccggggactagggatcctgaccacaatgactgtcctgctacatgaagtgccccacgaggtcggagactttgccatcttggtccagtctggctgcagcaaaaagcaggcgatgcgtctgcaactactgacagcagtaggggcactggcaggcacagcctgtgcccttctcactgaaggaggagcagtgggcagtgaaattgcaggtggtgcaggtcctggctgggtcctgccatttactgcaggtggctttatctacgtagcaacagtgtctgtgttgcccgagctgctgagggaggcatcaccattgcaatcacttctggaggtgctggggctgctggggggagttatcatgatggtgctgattgcccaccttgagtgaggggtggataaactacccctgccccaaacctctacccctaactccaggtcaggggtgcgtagaggttgggggccctggccagggacatctgccaaaggaaggaactgtagcctgggagaatggttactttggcattagggccttcaagggctggcagtcttacagaggctggagcggtgagaatgagaggccagagggaccatagtgttgggcactgtctgaccatgttgcatttggaaggctaaatggggccatgaagaaggctggaagggacagggggtgatggcagcctacctggtgtcccctaccccacctgttctcggagaaccaagttgctacacaggaagttctccaaggtccagtttcctttctcccaccagttggtggaggcttcagggaagaccagagtcctg

SEQ ID NO: 35238 - DNA, 1410 bp, Artificial Sequence
  derived and/or modified sequence
atggccagaggcctgggcgccccccactgggtggccgtgggcctgctgacctgggccaccctgggcctgctggtggccggcctgggcggccacgacgacctgcacgacgacctgcaggaggacttccacggccacagccacagacacagccacgaggacttccaccacggccacagccacgcccacggccacggccacacccacgagagcatctggcacggccacacccacgaccacgaccacggccacagccacgaggacctgcaccacggccacagccacggctacagccacgagagcctgtaccacagaggccacggccacgaccacgagcacagccacggcggctacggcgagagcggcgcccccggcatcaagcaggacctggacgccgtgaccctgtgggcctacgccctgggcgccaccgtgctgatcagcgccgcccccttcttcgtgctgttcctgatccccgtggagagcaacagccccagacacagaagcctgctgcagatcctgctgagcttcgccagcggcggcctgctgggcgacgccttcctgcacctgatcccccacgccctggagccccacagccaccacaccctggagcagcccggccacggccacagccacagcggccagggccccatcctgagcgtgggcctgtgggtgctgagcggcatcgtggccttcctggtggtggagaagttcgtgagacacgtgaagggcggccacggccacagccacggccacggccacgcccacagccacaccagaggcagccacggccacggcagacaggagagaagcaccaaggagaagcagagcagcgaggaggaggagaaggagaccagaggcgtgcagaagagaagaggcggcagcaccgtgcccaaggacggccccgtgagaccccagaacgccgaggaggagaagagaggcctggacctgagagtgagcggctacctgaacctggccgccgacctggcccacaacttcaccgacggcctggccatcggcgccagcttcagaggcggcagaggcctgggcatcctgaccaccatgaccgtgctgctgcacgaggtgccccacgaggtgggcgacttcgccatcctggtgcagagcggctgcagcaagaagcaggccatgagactgcagctgctgaccgccgtgggcgccctggccggcaccgcctgcgccctgctgaccgagggcggcgccgtgggcagcgagatcgccggcggcgccggccccggctgggtgctgcccttcaccgccggcggcttcatctacgtggccaccgtgagcgtgctgcccgagctgctgagagaggccagccccctgcagagcctgctggaggtgctgggcctgctgggcggcgtgatcatgatggtgctgatcgcccacctggagtag

SEQ ID NO: 35239 - DNA, 663 bp, Artificial Sequence
  derived and/or modified sequence
atggacagcagcctgcccgagtgcagacacatcggcaagggcatcagagccaaggtggagagaaacttcctgttcagcagagacctgaaggccggcctgcccagacccagcaagcccggcaaggagagaatccccgagcccgccctgggcgccaccgtgctgatcagcgccgcccccttcttcgtgctgttcctgatccccgtggagagcaacagccccagacacagaagcctgctgcagatcctgctgagcttcgccagcggcggcctgctgggcgacgccttcctgcacctgatcccccacgccctggagccccacagccaccacaccctggagcagcccggccacggccacagccacagcggccagggccccatcctgagcgtgggcctgtgggtgctgagcggcatcgtggccttcctggtggtggagaagttcgtgagacacgtgaagggcggccacggccacagccacggccacggccacgcccacagccacaccagaggcagccacggccacggcagacaggagagaagcaccaaggagaagcagagcagcgaggaggaggagaaggagaccagaggcgtgcagaagagaagaggcggcagcaccgtgcccaaggacggccccgtgagaccccagaacgccgaggaggagaagtag

SEQ ID NO: 35240 - DNA, 1353 bp, Artificial Sequence
  derived and/or modified sequence
atggccagaggcctgggcgccccccactgggtggccgtgggcctgctgacctgggccaccctgggcctgctggtggccggcctgggcggccacgacgacctgcacgacgacctgcaggaggacttccacggccacggccacacccacgagagcatctggcacggccacacccacgaccacgaccacggccacagccacgaggacctgcaccacggccacagccacggctacagccacgagagcctgtaccacagaggccacggccacgaccacgagcacagccacggcggctacggcgagagcggcgcccccggcatcaagcaggacctggacgccgtgaccctgtgggcctacgccctgggcgccaccgtgctgatcagcgccgcccccttcttcgtgctgttcctgatccccgtggagagcaacagccccagacacagaagcctgctgcagatcctgctgagcttcgccagcggcggcctgctgggcgacgccttcctgcacctgatcccccacgccctggagccccacagccaccacaccctggagcagcccggccacggccacagccacagcggccagggccccatcctgagcgtgggcctgtgggtgctgagcggcatcgtggccttcctggtggtggagaagttcgtgagacacgtgaagggcggccacggccacagccacggccacggccacgcccacagccacaccagaggcagccacggccacggcagacaggagagaagcaccaaggagaagcagagcagcgaggaggaggagaaggagaccagaggcgtgcagaagagaagaggcggcagcaccgtgcccaaggacggccccgtgagaccccagaacgccgaggaggagaagagaggcctggacctgagagtgagcggctacctgaacctggccgccgacctggcccacaacttcaccgacggcctggccatcggcgccagcttcagaggcggcagaggcctgggcatcctgaccaccatgaccgtgctgctgcacgaggtgccccacgaggtgggcgacttcgccatcctggtgcagagcggctgcagcaagaagcaggccatgagactgcagctgctgaccgccgtgggcgccctggccggcaccgcctgcgccctgctgaccgagggcggcgccgtgggcagcgagatcgccggcggcgccggccccggctgggtgctgcccttcaccgccggcggcttcatctacgtggccaccgtgagcgtgctgcccgagctgctgagagaggccagccccctgcagagcctgctggaggtgctgggcctgctgggcggcgtgatcatgatggtgctgatcgcccacctggagtag

SEQ ID NO: 35241 - protein, 650 aa, Artificial Sequence
  derived and/or modified sequence
MAGARAAAAAASAGSSASSGNQPPQELGLGELLEEFSRTQYRAKDGSGTGGSKVERIEKRCLELFGRDYCFSVIPNTNGDICGHYPRHIVFLEYESSEKEKDTFESTVQVSKLQDLIHRSKMARCRGRFVCPVILFKGKHICRSATLAGWGELYGRSGYNYFFSGGADDAWADVEDVTEEDCALRSGDTHLFDKVRGYDIKLLRYLSVKYICDLMVENKKVKFGMNVTSSEKVDKAQRYADFTLLSIPYPGCEFFKEYKDRDYMAEGLIFNWKQDYVDAPLSIPDFLTHSLNIDWSQYQCWDLVQQTQNYLKLLLSLVNSDDDSGLLVHCISGWDRTPLFISLLRLSLWADGLIHTSLKPTEILYLTVAYDWFLFGHMLVDRLSKGEEIFFFCFNFLKHITSEEFSALKTQRRKSLPARDGGFTLEDICMLRRKDRGSTTSLGSDFSLVMESSPGATGSFTYEAVELVPAGAPTQAAWRKSHSSSPQSVLWNRPQPSEDRLPSQQGLAEARSSSSSSSNHSDNFFRMGSSPLEVPKPRSVDHPLPGSSLSTDYGSWQMVTGCGSIQERAVLHTDSSLPFSFPDELPNSCLLAALSDRETRLQEVRSAFLAAYSSTVGLRAVAPSPSGAIGGLLEQFARGVGLRSISSNAL

SEQ ID NO: 35242 - DNA, 1953 bp, Artificial Sequence
  derived and/or modified sequence
atggccggagcgagagccgcagccgcagcagctagcgcaggatctagtgcatcgtctgggaaccagcccccgcaggagctagggctgggagagctgctggaagaattttctcgaacgcaatatcgtgctaaggacggctctggtaccgggggctcaaaggtggagcgcatcgagaagagatgccttgagctgttcggtcgcgattattgtttttcagttatccctaacacaaacggtgacatctgcggacactatccacggcatattgtcttcctggaatacgaaagctccgagaaagaaaaggatacctttgagtccaccgttcaggtcagtaagcttcaggatctgatccataggagcaaaatggctcgatgtcggggaaggttcgtatgccccgtcatcctgttcaagggcaagcacatctgtcgctcagcgactctggcagggtggggagaactgtacggtagatccggttacaattattttttcagcggcggggctgacgacgcctgggctgacgttgaggatgtgacggaggaagactgcgctctgcgctctggtgacactcacctattcgacaaggtgcgtgggtacgatattaagctcctgcgctacctgtcagttaaatacatttgtgacctgatggtggaaaacaaaaaagttaagtttgggatgaatgtcaccagttcggaaaaagtcgataaggcacagagatacgccgacttcacgctgctgtccattccctaccccggatgtgagttcttcaaggagtacaaagacagggactacatggctgagggccttatttttaattggaagcaagactatgtcgacgcacctctaagcattcctgattttcttacacatagccttaacattgactggagtcagtaccagtgctgggacctagtgcagcagacccagaattatctcaagctgttactgtcccttgttaactctgatgatgactcaggcctgctggtgcattgtatcagcgggtgggaccggacgccacttttcatatcgctgctgaggctgtcactctgggctgacggcctgatccatacgagtcttaagccaacagagatcctttatttgaccgtggcatatgactggtttttgtttggccacatgctagttgatcgcctgagtaaaggggaggaaatcttctttttttgcttcaattttcttaaacatatcacttctgaggagttcagcgccctgaaaacgcaaagaaggaagagtctacctgctcgcgatggtggctttactctggaggatatctgtatgctgagaagaaaggatagggggagcacgacatctctaggaagtgacttttcactggtcatggagtcttctcccggggctacaggctcatttacatacgaggccgtggaacttgtaccagcaggggcccccacccaggcagcatggagaaaatcccacagctcttccccccaatcagtcctgtggaaccgaccacagccatccgaagatcggctgccttcccagcaaggcctcgccgaggctcgttcgagcagttcgagcagctctaaccactcagacaattttttccgtatggggtcttcccccctcgaggtgcctaaaccacggagcgtggatcaccctctgcccggctccagtctgtcaaccgactatggttcgtggcagatggtgacggggtgtggatcaatacaggagagggccgtgttgcatacggacagttctctgccatttagttttccagatgagctgcccaacagctgtctcctggcagccctgtccgatagggaaacgaggctgcaagaagtgagaagcgcctttctcgcggcttactctagtacagttggtctgcgcgcggttgctccttcacctagcggcgccattggcggacttctagagcagtttgctcgaggggtgggcctgcgctccattagcagcaatgccttgtag

SEQ ID NO: 35243 - DNA, 1953 bp, Artificial Sequence
  derived and/or modified sequence
atggccggggcccgggctgctgctgctgctgccagcgctggcagcagcgccagcagcggcaaccagcccccccaggagctgggcctgggggagctgctggaggagttcagcaggacccagtaccgggccaaggatggcagcggcactggaggcagcaaggtggagagaattgagaagcgctgcctggagctgtttggccgggactactgcttcagcgtcatccccaacaccaacggggacatctgtggccactaccccaggcacatcgtgttcctggagtatgagagcagcgagaaggagaaggacacctttgagagcacagtgcaggtgtccaagctgcaggacctgatccacaggagcaagatggcccgctgccggggccgctttgtgtgccctgtgatcctcttcaagggcaagcacatctgccgcagcgccaccctggccggctggggcgagctgtatggccgcagcggctacaactacttcttcagcggcggcgcagatgatgcctgggcagatgtggaggatgtgacagaggaggactgtgccctgcggagcggggacacccacctgtttgacaaggtgcggggctatgacatcaagctgctgcgctacctgtctgtgaagtacatctgtgacctgatggtggagaacaagaaggtgaagtttggcatgaatgtgaccagcagcgagaaggtggacaaggcccagagatatgctgacttcaccctgctgagcatcccctacccaggctgtgagttcttcaaggagtacaaggaccgggactacatggccgagggcctcatcttcaactggaagcaggactatgtggatgcccccctgagcatcccagacttcctgacccacagcctgaacatcgactggagccagtaccagtgctgggacctggtgcagcagacccagaactacctgaagctgctgctgagcctggtgaacagtgatgatgacagcggcctgctggtgcactgcatcagcggctgggacaggacccccctcttcatcagcctgctgcggctgagcctgtgggcagatggcctcatccacaccagcctgaagcccacagagatcctgtacctgactgtggcctatgactggttcctgtttggccacatgctggtggaccggctgagcaaaggagaggagatcttcttcttctgcttcaacttcctgaagcacatcaccagcgaggagttcagcgccctgaagacccagaggaggaagagcctgcctgccagagatggcggcttcaccctggaggacatctgcatgctgcggaggaaggaccggggcagcaccaccagcctgggcagtgacttcagcctggtgatggagagcagccctggggccaccggcagcttcacctatgaggccgtggagctggtgcctgctggggcccccacccaggccgcctggaggaagagccacagcagcagcccccagagcgtgctgtggaaccggccccagcccagcgaggaccggctgcccagccagcagggcctggccgaggcccggagcagcagcagcagcagcagcaaccacagcgacaacttcttcaggatgggcagcagccccctggaggtgcccaagcccaggtctgtggaccaccccctgcccggcagcagcctgagcacagattatggctcctggcagatggtgacaggctgcggcagcatccaggagagagctgtgctgcacacagacagcagcctgcccttctccttcccagatgagctgcccaacagctgcctgctggccgccctgagtgaccgggagacccggctgcaggaggtgcgcagcgccttcctggccgcctacagcagcacagtgggcctgcgggctgtggcccccagccccagcggggccatcggcggcctgctggagcagtttgcccggggcgtgggcctgcggagcatcagcagcaatgccctgtag

SEQ ID NO: 35244 - DNA, 2494 bp, Artificial Sequence
  derived and/or modified sequence
aagtggaagtggaagtagaaggcggtggctgaggcggttccggaggttctagtgtcggagttgggtgcaggcaggtgccatgggcccgcttgaggcacactgaggggacgcggggctgggccatggccggcgctcgggccgccgccgccgctgcctcggcggggtcctcggcctcttcaggcaaccagccgcctcaggagctggggcttggggagctgctggaggagttctcccggactcagtaccgggccaaggatggcagcgggaccggcggctctaaggttgagcgcattgagaagagatgtctggagctgtttggccgagactactgtttcagcgtgattccaaacacgaatggggatatctgtggccactatccccggcacatcgtgttcctggagtatgagagttctgagaaggagaaagacacgtttgagagtaccgtacaggtgagcaagttgcaagacctcatccaccgcagcaagatggcccggtgcagaggacggtttgtctgcccagtaatcctgttcaagggcaagcacatttgcaggtcggccacactggctggatggggagagctgtatggacgctcaggctacaactattttttctcagggggtgcagatgatgcctgggcagatgtggaggacgtcacggaggaggactgtgctcttcgaagtggtgacacgcatctttttgataaggtcagaggctatgacatcaagctgcttcgatacctgtcagtcaaatacatctgtgacctgatggtggagaacaagaaggtgaagtttggcatgaatgtaacctcctctgagaaggtggacaaagcccagcgctatgccgacttcactctcctctccatcccgtatccaggctgtgaatttttcaaggaatataaagatcgggattacatggcagaagggctcatatttaactggaagcaggactacgttgatgccccattgagcatccccgacttcctgactcactctctgaacattgactggagccagtatcagtgttgggatctggtgcaacaaacacaaaactacctgaagctgctgctttccttagttaacagtgatgatgacagcgggctgctggtacactgtatctcaggctgggatcggacccccctcttcatctccctcctgcgcctttccttgtgggctgatgggctcatccacacgtccctgaagcccactgagatcctctacctcactgtggcctatgactggttcctcttcgggcacatgttggtagatcggctcagcaaaggggaggagattttcttcttctgcttcaattttttgaagcatattacctccgaggagttctctgctctgaagacccagaggaggaagagtttgccagcccgggatggaggcttcaccctggaagacatctgcatgctgagacgaaaggaccgtggcagcaccaccagccttggcagcgacttctccctggtcatggagagttccccaggagccactgggagcttcacctatgaggccgtggagctggtcccagcaggagcgccaactcaggcagcttggaggaagagccactcatcctctccacagagtgtcctctggaaccggccacaaccctcagaggaccgcttgccttcccagcaggggctggcggaagccaggtcttccagctcctcttcctcaaaccattctgataactttttcaggatgggtagcagtcccctggaggtccccaaacccagatcagtggaccatcccctgcccggatcctctctctccacagactatggcagctggcagatggtaacgggctgtggcagtattcaggagcgggctgtcctgcacacagactcctctctccctttcagcttcccggatgagctccctaacagttgtctgcttgcagccctgagtgatcgagagactcggctgcaggaggtgcgctcagccttcttggctgcgtacagcagcacagtggggcttcgggcagtagcccccagtccttccggtgccatcgggggcctgctggagcaatttgcccgtggtgttggactccggagcatcagcagcaatgccttgtgaagaagccagcccatgacattttcctgctcctctctcagctgagcccttagcagagaatcaaagccatgcctggccgaaggggtacttccaggtcaggggaaatttcagtcccccatctccatcatgaacatggcagccccaaagctgagcaaggccaaagacagggttttccaacccccagcctcttgactggtgaccaccaccccttcttgtcactgtctcccacccaccccatctttgctgggattcccatcaactctcagaactgtgtggggtttccctggggccttgtggaagccatgacttcacaaagaccctacctgtcagttcttgtttctggggaggagggatcacctgcactgagaatgaggcagtttgacacagatcacaaaataaaatcaaagtctttttgaatagcc

SEQ ID NO: 35245 - DNA, 2433 bp, Artificial Sequence
  derived and/or modified sequence
gttgggtgcaggcaggtgccatgggcccgcttgaggcacactgaggggacgcggggctgggccatggccggcgctcgggccgccgccgccgctgcctcggcggggtcctcggcctcttcaggcaaccagccgcctcaggagctggggcttggggagctgctggaggagttctcccggactcagtaccgggccaaggatggcagcgggaccggcggctctaaggttgagcgcattgagaagagatgtctggagctgtttggccgagactactgtttcagcgtgattccaaacacgaatggggatatctgtggccactatccccggcacatcgtgttcctggagtatgagagttctgagaaggagaaagacacgtttgagagtaccgtacaggtgagcaagttgcaagacctcatccaccgcagcaagatggcccggtgcagaggacggtttgtctgcccagtaatcctgttcaagggcaagcacatttgcaggtcggccacactggctggatggggagagctgtatggacgctcaggctacaactattttttctcagggggtgcagatgatgcctgggcagatgtggaggacgtcacggaggaggactgtgctcttcgaagtggtgacacgcatctttttgataaggtcagaggctatgacatcaagctgcttcgatacctgtcagtcaaatacatctgtgacctgatggtggagaacaagaaggtgaagtttggcatgaatgtaacctcctctgagaaggtggacaaagcccagcgctatgccgacttcactctcctctccatcccgtatccaggctgtgaatttttcaaggaatataaagatcgggattacatggcagaagggctcatatttaactggaagcaggactacgttgatgccccattgagcatccccgacttcctgactcactctctgaacattgactggagccagtatcagtgttgggatctggtgcaacaaacacaaaactacctgaagctgctgctttccttagttaacagtgatgatgacagcgggctgctggtacactgtatctcaggctgggatcggacccccctcttcatctccctcctgcgcctttccttgtgggctgatgggctcatccacacgtccctgaagcccactgagatcctctacctcactgtggcctatgactggttcctcttcgggcacatgttggtagatcggctcagcaaaggggaggagattttcttcttctgcttcaattttttgaagcatattacctccgaggagttctctgctctgaagacccagaggaggaagagtttgccagcccgggatggaggcttcaccctggaagacatctgcatgctgagacgaaaggaccgtggcagcaccaccagccttggcagcgacttctccctggtcatggagagttccccaggagccactgggagcttcacctatgagcgtggagctggtcccagcaggagcgccaactcaggcagcttggaggaagagccactcatcctctccacagagtgtcctctggaaccggccacaaccctcagaggaccgcttgccttcccagcaggggctggcggaagccaggtcttccagctcctcttcctcaaaccattctgataactttttcaggatgggtagcagtcccctggaggtccccaaacccagatcagtggaccatcccctgcccggatcctctctctccacagactatggcagctggcagatggtaacgggctgtggcagtattcaggagcgggctgtcctgcacacagactcctctctccctttcagcttcccggatgagctccctaacagttgtctgcttgcagccctgagtgatcgagagactcggctgcaggaggtgcgctcagccttcttggctgcgtacagcagcacagtggggcttcgggcagtagcccccagtccttccggtgccatcgggggcctgctggagcaatttgcccgtggtgttggactccggagcatcagcagcaatgccttgtgaagaagccagcccatgacattttcctgctcctctctcagctgagcccttagcagagaatcaaagccatgcctggccgaaggggtacttccaggtcaggggaaatttcagtcccccatctccatcatgaacatggcagccccaaagctgagcaaggccaaagacagggttttccaacccccagcctcttgactggtgaccaccaccccttcttgtcactgtctcccacccaccccatctttgctgggattcccatcaactctcagaactgtgtggggtttccctggggccttgtggaagccatgacttcacaaagaccctacctgtcagttcttgtttctggggaggagggatcacctgcactgagaatgaggcagtttgacacagatcacaaaataaaatcaaagtctttttgaatagcc

SEQ ID NO: 35246 - DNA, 1953 bp, Artificial Sequence
  derived and/or modified sequence
atggccggcgcccgggccgccgccgccgccgccagcgccggcagctcggcctcgtctggcaatcaaccgccccaggaactgggtctcggcgagctgctagaggaattttctcggacccagtaccgtgccaaggatggtagcggaaccggaggaagcaaagtggagaggatagagaaaagatgcctggagctgtttgggagggactactgcttttcagtaatccccaacaccaatggagatatctgcggccactacccccgccacatagttttcttggagtatgaaagtagcgagaaggagaaggacacctttgagagcaccgtgcaggttagtaaacttcaagatttgatacacaggagcaaaatggcaaggtgcagaggtcgatttgtctgtcctgtcattctcttcaagggtaagcatatttgtcgcagcgcgacgctcgccggatggggcgaactgtatggcagatctggatataactactttttctccggcggcgctgatgacgcgtgggccgatgttgaggacgtgacggaagaggactgtgcactccgctcaggtgacacacacttgttcgataaagttcgaggatacgacatcaaattacttcgctaccttagcgtgaaatacatctgtgatctaatggtggagaacaagaaagttaagtttgggatgaacgtgacatcatccgaaaaagtggacaaagctcagaggtacgccgactttacactgttgtccattccctatccaggctgcgagttcttcaaagagtacaaagatcgcgactatatggccgagggccttatcttcaactggaagcaggactacgtggacgcgccgctcagcatccccgattttttaactcatagcctgaacatcgattggtcacagtaccagtgttgggatttagtacagcagacacagaactacctcaagttgctgctttccttggtaaacagcgacgacgatagcggcctgctggtacactgcataagcgggtgggaccgtacacctctcttcatttccttactgagactctccttgtgggccgatggactgattcacacgtctttgaaaccaacagagatcctgtaccttactgtggcctacgattggtttctgttcggccatatgctcgtggacaggttgtcaaaaggtgaggaaatctttttcttctgtttcaatttccttaagcacattacatctgaagagtttagcgcacttaagacacagcggcggaaaagccttcctgctcgcgatggtggattcactctggaggatatctgcatgctcagaaggaaggatcgaggctctacaacatccctgggcagtgatttctccttggtgatggagagctcacccggggcaaccgggtctttcacctacgaggccgtggagctagtccccgctggtgctcctacgcaagctgcgtggcgaaagagccacagctcttctcctcaatccgtactgtggaacaggcctcagcccagcgaggataggctccccagccagcagggcttagcggaggcaagaagcagttcctcctctagctcaaaccactccgacaatttttttcgtatgggctcctctcctctagaggtgccaaagcctagaagcgtagatcatcctcttcccgggagctccctctccaccgactatggttcctggcaaatggtcacaggatgtgggagcatccaggagagagcggttctgcataccgactccagcctgccatttagctttccggacgaattaccgaactcttgtcttctggccgcgctgagcgaccgggaaacgagactccaggaggtccgcagcgcttttctggccgcttattcttcaaccgtcggcctccgggccgttgcacctagcccatccggagccatcggggggctccttgaacagtttgcacgaggagtcgggttgaggtccatttctagcaacgccctgtag

SEQ ID NO: 35247 - DNA, 1953 bp, Artificial Sequence
  derived and/or modified sequence
atggcaggcgctcgcgctgcagccgctgctgcttctgccggatcctcagcatcgagcgggaatcagccaccacaggaactgggtttgggcgagttgctggaagagttctcccgcacacaataccgagccaaggatggctcaggtaccgggggtagtaaagtggaaaggattgagaagaggtgcctggagttgttcggccgagattattgtttttcggtaatacctaacaccaacggcgacatctgtggccactatccacggcatattgtgttcttagagtacgaatcctcagagaaggagaaggacacctttgagtcaaccgttcaagtaagcaaattacaggacctgattcatcggtcgaagatggccaggtgccggggaaggttcgtttgccctgtcattctgttcaagggcaagcatatttgtagatctgcgaccttagccggatggggggagctgtatggcaggagtggatataactatttcttttctggtggggcagacgacgcttgggcagacgttgaggatgtgaccgaggaagactgcgccctccgctcaggagacacacacctatttgacaaggtccgtggctatgacattaaacttctgcgttacctcagcgtcaagtatatttgcgacctgatggtggagaataaaaaggtgaagttcgggatgaatgtgacctcatcagaaaaggtggacaaggctcaaaggtacgctgactttactttactcagcatcccttatccaggatgtgagttcttcaaagagtataaagaccgggattacatggcggaaggacttattttcaattggaaacaggactatgtcgacgcccctctctcaattccggatttcctgacccactcactgaacattgattggtcacaataccaatgctgggatcttgtccagcagacacaaaactatctgaagcttcttttgagcctagtcaactcagacgacgattccggcctattagtacattgtattagcgggtgggacagaacacccctgtttattagcctccttagacttagcttatgggccgacggattgatccacacgtcacttaaaccgaccgagatattatacctgacggtggcctatgactggtttttattcggacacatgctagtggaccgtttgtctaagggcgaagaaatttttttcttttgtttcaacttcttgaaacacattacgtcagaggagttcagcgctctgaaaactcaaaggcgaaagagtctaccagcaagagacgggggattcacactggaggacatctgcatgctgaggaggaaggaccggggtagtacgacctcactcggatccgatttcagcctggttatggagtcgagccctggagcgaccggcagttttacctacgaggccgtggaactggtgcccgcaggggcacctacccaggcagcgtggagaaagagccactcttcatcgcctcagagtgtcctttggaacaggccccagccgtctgaggacagactgccatctcagcagggcctggcagaagctcgaagctcctctagctcatccagtaaccactccgataacttctttagaatgggctcaagtccgctggaagttcccaagcctcgatctgtagatcatccgcttccgggtagcagcctttctactgattatggctcatggcagatggtcaccggctgtgggtcgatccaggagcgggcagtgcttcatacggattcttctctcccatttagcttccccgacgagctgcctaatagttgcctgttggcagcactgagtgatcgtgagacccgactgcaggaggtgagatcagcttttttagctgcatactccagcaccgtcgggttgcgggctgtggctccttctcctagcggagccatcggaggacttctggaacagttcgccaggggagttgggctcaggagtatctctagtaacgccctttag

SEQ ID NO: 35248 - DNA, 1953 bp, Artificial Sequence
  derived and/or modified sequence
atggccggcgccagagccgccgccgccgccgccagcgccggcagcagcgccagcagcggcaaccagcccccccaggagctgggcctgggcgagctgctggaggagttcagcagaacccagtacagagccaaggacggcagcggcaccggcggcagcaaggtggagagaatcgagaagagatgcctggagctgttcggcagagactactgcttcagcgtgatccccaacaccaacggcgacatctgcggccactaccccagacacatcgtgttcctggagtacgagagcagcgagaaggagaaggacaccttcgagagcaccgtgcaggtgagcaagctgcaggacctgatccacagaagcaagatggccagatgcagaggcagattcgtgtgccccgtgatcctgttcaagggcaagcacatctgcagaagcgccaccctggccggctggggcgagctgtacggcagaagcggctacaactacttcttcagcggcggcgccgacgacgcctgggccgacgtggaggacgtgaccgaggaggactgcgccctgagaagcggcgacacccacctgttcgacaaggtgagaggctacgacatcaagctgctgagatacctgagcgtgaagtacatctgcgacctgatggtggagaacaagaaggtgaagttcggcatgaacgtgaccagcagcgagaaggtggacaaggcccagagatacgccgacttcaccctgctgagcatcccctaccccggctgcgagttcttcaaggagtacaaggacagagactacatggccgagggcctgatcttcaactggaagcaggactacgtggacgcccccctgagcatccccgacttcctgacccacagcctgaacatcgactggagccagtaccagtgctgggacctggtgcagcagacccagaactacctgaagctgctgctgagcctggtgaacagcgacgacgacagcggcctgctggtgcactgcatcagcggctgggacagaacccccctgttcatcagcctgctgagactgagcctgtgggccgacggcctgatccacaccagcctgaagcccaccgagatcctgtacctgaccgtggcctacgactggttcctgttcggccacatgctggtggacagactgagcaagggcgaggagatcttcttcttctgcttcaacttcctgaagcacatcaccagcgaggagttcagcgccctgaagacccagagaagaaagagcctgcccgccagagacggcggcttcaccctggaggacatctgcatgctgagaagaaaggacagaggcagcaccaccagcctgggcagcgacttcagcctggtgatggagagcagccccggcgccaccggcagcttcacctacgaggccgtggagctggtgcccgccggcgcccccacccaggccgcctggagaaagagccacagcagcagcccccagagcgtgctgtggaacagaccccagcccagcgaggacagactgcccagccagcagggcctggccgaggccagaagcagcagcagcagcagcagcaaccacagcgacaacttcttcagaatgggcagcagccccctggaggtgcccaagcccagaagcgtggaccaccccctgcccggcagcagcctgagcaccgactacggcagctggcagatggtgaccggctgcggcagcatccaggagagagccgtgctgcacaccgacagcagcctgcccttcagcttccccgacgagctgcccaacagctgcctgctggccgccctgagcgacagagagaccagactgcaggaggtgagaagcgccttcctggccgcctacagcagcaccgtgggcctgagagccgtggcccccagccccagcggcgccatcggcggcctgctggagcagttcgccagaggcgtgggcctgagaagcatcagcagcaacgccctgtag

SEQ ID NO: 35249 - protein, 598 aa, Artificial Sequence
  derived and/or modified sequence
MAGARAAAAAASAGSSASSGNQPPQELGLGELLEEFSRTQYRAKDGSGTGGSKVERIEKRCLELFGRDYCFSVIPNTNGDICGHYPRHIVFLEYESSEKEKDTFESTVQVSKLQDLIHRSKMARCRGRFVCPVILFKGKHICRSATLAGWGELYGRSGYNYFFSGGADDAWADVEDVTEEDCALRSGDTHLFDKVRGYDIKLLRYLSVKYICDLMVENKKVKFGMNVTSSEKVDKAQRYADFTLLSIPYPGCEFFKEYKDRDYMAEGLIFNWKQDYVDAPLSIPDFLTHSLNIDWSQYQCWDLVQQTQNYLKLLLSLVNSDDDSGLLVHCISGWDRTPLFISLLRLSLWADGLIHTSLKPTEILYLTVAYDWFLFGHMLVDRLSKGEEIFFFCFNFLKHITSEEFSALKTQRRKSLPARDGGFTLEDICMLRRKDRGSTTSLGSDFSLVMESSPGATGSFTYEAVELVPAGAPTQAAWRKSHSSSPQSVLWNRPQPSEDRLPSQQGLAEARSSSSSSSNHSDNFFRMGSSPLEVPKPRLAALSDRETRLQEVRSAFLAAYSSTVGLRAVAPSPSGAIGGLLEQFARGVGLRSISSNAL

SEQ ID NO: 35250 - protein, 520 aa, Artificial Sequence
  derived and/or modified sequence
MAGARAAAAAASAGSSASSGNQPPQELGLGELLEEFSRTQYRAKDGSGTGGSKVERIEKRCLELFGRDYCFSVIPNTNGDICGHYPRHIVFLEYESSEKEKDTFESTVQVSKLQDLIHRSKMARCRGRFVCPVILFKGKHICRSATLAGWGELYGRSGYNYFFSGGADDAWADVEDVTEEDCALRSGDTHLFDKVRGYDIKLLRYLSVKYICDLMVENKKVKFGMNVTSSEKVDKAQRYADFTLLSIPYPGCEFFKEYKDRDYMAEGLIFNWKQDYVDAPLSIPDFLTHSLNIDWSQYQCWDLVQQTQNYLKLLLSLVNSDDDSGLLVHCISGWDRTPLFISLLRLSLWADGLIHTSLKPTEILYLTVAYDWFLFGHMLVDRLSKGEEIFFFCFNFLKHITSEEFSALKTQRRKSLPARDGGFTLEDICMLRRKDRGSTTSLGSDFSLVMESSPGATGSFTYERGAGPSRSANSGSLEEEPLILSTECPLEPATTLRGPLAFPAGAGGSQVFQLLFLKPF

SEQ ID NO: 35251 - DNA, 1797 bp, Artificial Sequence
  derived and/or modified sequence
atggctggtgcccgggccgccgcggccgccgcttccgcaggatccagtgcctctagtgggaatcagcccccgcaagaactcggtctcggcgaactcctggaagaattctctcggacccaataccgcgcgaaggacggatctggtacaggcgggagtaaagtggaaagaattgagaaacggtgtctggagcttttcggcagggattattgcttttcagtcattccaaacacaaatggagatatctgtggccattatcctagacacatagtatttctcgaatacgagtcatctgagaaggaaaaggacacgtttgagagcacagtgcaggtgtccaagctacaggacttgatccaccgcagcaagatggcccggtgccgagggcgctttgtctgccctgtgattctgtttaaggggaagcacatctgtcgttcagccaccttggcggggtggggcgagctgtacgggagaagtgggtacaattatttcttttccggcggtgccgatgatgcttgggctgacgtggaggatgtgacggaggaggattgtgcattaaggtctggcgacactcatcttttcgataaggtgagaggatacgatataaaactcttgcgctacctttctgtaaaatacatctgtgatctgatggtggagaacaaaaaggttaaattcggaatgaacgtgacctcatctgaaaaggtggacaaagcgcagcgttacgctgacttcacattgctgtctattccctaccccggctgcgagttcttcaaggagtataaggatcgagattatatggcggagggcctaattttcaattggaaacaggattatgtcgatgccccactgtccattcctgactttctgacccactcactgaatatcgactggagtcagtatcagtgctgggacttagtgcagcagacacagaactatctgaagctactgctgtcgctagtcaactccgacgatgatagcggactgctggttcattgtattagcgggtgggaccgaaccccattgtttattagtctactgaggctctctctctgggctgacggacttatccacaccagcctaaaacccaccgaaattttgtatcttaccgtcgcctacgactggttcctcttcgggcatatgctggtagatagactgtctaagggagaagagatttttttcttttgcttcaacttcctgaaacacatcacatctgaggaattctcagcactcaaaacacagcgtaggaagagtctccccgctcgcgatggcggattcacactggaagacatttgtatgctccgccggaaggatagggggtcaactacttcgctaggctcagatttctccctggtgatggagagcagtcctggagccaccgggtcctttacctacgaagcagttgaactggtgccagcaggagccccaacacaggccgcttggaggaaatcccacagctcttcaccccaatccgtgctgtggaacaggccacagcccagcgaagaccggttaccaagtcagcaaggcctggcggaagccaggagttcctcctcttcctcctcgaatcattctgataactttttccggatgggatcctcacccttggaagtaccaaagccccggcttgccgccctgagcgacagagagacaagactgcaagaggtgagatcggcctttctggcggcttactcttctacagtcggacttagagccgtggccccttcaccatccggtgccataggcggcctcctcgagcaatttgctcgcggcgtcggactccgcagcatatctagtaacgcactgtag

SEQ ID NO: 35252 - DNA, 1797 bp, Artificial Sequence
  derived and/or modified sequence
atggccggggcccgggctgctgctgctgctgccagcgctggcagcagcgccagcagcggcaaccagcccccccaggagctgggcctgggggagctgctggaggagttcagcaggacccagtaccgggccaaggatggcagcggcactggaggcagcaaggtggagagaattgagaagcgctgcctggagctgtttggccgggactactgcttcagcgtcatccccaacaccaacggggacatctgtggccactaccccaggcacatcgtgttcctggagtatgagagcagcgagaaggagaaggacacctttgagagcacagtgcaggtgtccaagctgcaggacctgatccacaggagcaagatggcccgctgccggggccgctttgtgtgccctgtgatcctcttcaagggcaagcacatctgccgcagcgccaccctggccggctggggcgagctgtatggccgcagcggctacaactacttcttcagcggcggcgcagatgatgcctgggcagatgtggaggatgtgacagaggaggactgtgccctgcggagcggggacacccacctgtttgacaaggtgcggggctatgacatcaagctgctgcgctacctgtctgtgaagtacatctgtgacctgatggtggagaacaagaaggtgaagtttggcatgaatgtgaccagcagcgagaaggtggacaaggcccagagatatgctgacttcaccctgctgagcatcccctacccaggctgtgagttcttcaaggagtacaaggaccgggactacatggccgagggcctcatcttcaactggaagcaggactatgtggatgcccccctgagcatcccagacttcctgacccacagcctgaacatcgactggagccagtaccagtgctgggacctggtgcagcagacccagaactacctgaagctgctgctgagcctggtgaacagtgatgatgacagcggcctgctggtgcactgcatcagcggctgggacaggacccccctcttcatcagcctgctgcggctgagcctgtgggcagatggcctcatccacaccagcctgaagcccacagagatcctgtacctgactgtggcctatgactggttcctgtttggccacatgctggtggaccggctgagcaaaggagaggagatcttcttcttctgcttcaacttcctgaagcacatcaccagcgaggagttcagcgccctgaagacccagaggaggaagagcctgcctgccagagatggcggcttcaccctggaggacatctgcatgctgcggaggaaggaccggggcagcaccaccagcctgggcagtgacttcagcctggtgatggagagcagccctggggccaccggcagcttcacctatgaggccgtggagctggtgcctgctggggcccccacccaggccgcctggaggaagagccacagcagcagcccccagagcgtgctgtggaaccggccccagcccagcgaggaccggctgcccagccagcagggcctggccgaggcccggagcagcagcagcagcagcagcaaccacagcgacaacttcttcaggatgggcagcagccccctggaggtgcccaagccccggctggccgccctgagtgaccgggagacccggctgcaggaggtgcgcagcgccttcctggccgcctacagcagcacagtgggcctgcgggctgtggcccccagccccagcggggccatcggcggcctgctggagcagtttgcccggggcgtgggcctgcggagcatcagcagcaatgccctgtag

SEQ ID NO: 35253 - DNA, 2368 bp, Artificial Sequence
  derived and/or modified sequence
aaacatccggcgggacggggcggggccggaagtggaagtggaagtagaaggcggtggctgaggcggttccggaggttctagtgtcggagttgggtgcaggcaggtgccatgggcccgcttgaggcacactgaggggacgcggggctgggccatggccggcgctcgggccgccgccgccgctgcctcggcggggtcctcggcctcttcaggcaaccagccgcctcaggagctggggcttggggagctgctggaggagttctcccggactcagtaccgggccaaggatggcagcgggaccggcggctctaaggttgagcgcattgagaagagatgtctggagctgtttggccgagactactgtttcagcgtgattccaaacacgaatggggatatctgtggccactatccccggcacatcgtgttcctggagtatgagagttctgagaaggagaaagacacgtttgagagtaccgtacaggtgagcaagttgcaagacctcatccaccgcagcaagatggcccggtgcagaggacggtttgtctgcccagtaatcctgttcaagggcaagcacatttgcaggtcggccacactggctggatggggagagctgtatggacgctcaggctacaactattttttctcagggggtgcagatgatgcctgggcagatgtggaggacgtcacggaggaggactgtgctcttcgaagtggtgacacgcatctttttgataaggtcagaggctatgacatcaagctgcttcgatacctgtcagtcaaatacatctgtgacctgatggtggagaacaagaaggtgaagtttggcatgaatgtaacctcctctgagaaggtggacaaagcccagcgctatgccgacttcactctcctctccatcccgtatccaggctgtgaatttttcaaggaatataaagatcgggattacatggcagaagggctcatatttaactggaagcaggactacgttgatgccccattgagcatccccgacttcctgactcactctctgaacattgactggagccagtatcagtgttgggatctggtgcaacaaacacaaaactacctgaagctgctgctttccttagttaacagtgatgatgacagcgggctgctggtacactgtatctcaggctgggatcggacccccctcttcatctccctcctgcgcctttccttgtgggctgatgggctcatccacacgtccctgaagcccactgagatcctctacctcactgtggcctatgactggttcctcttcgggcacatgttggtagatcggctcagcaaaggggaggagattttcttcttctgcttcaattttttgaagcatattacctccgaggagttctctgctctgaagacccagaggaggaagagtttgccagcccgggatggaggcttcaccctggaagacatctgcatgctgagacgaaaggaccgtggcagcaccaccagccttggcagcgacttctccctggtcatggagagttccccaggagccactgggagcttcacctatgaggccgtggagctggtcccagcaggagcgccaactcaggcagcttggaggaagagccactcatcctctccacagagtgtcctctggaaccggccacaaccctcagaggaccgcttgccttcccagcaggggctggcggaagccaggtcttccagctcctcttcctcaaaccattctgataactttttcaggatgggtagcagtcccctggaggtccccaaacccaggcttgcagccctgagtgatcgagagactcggctgcaggaggtgcgctcagccttcttggctgcgtacagcagcacagtggggcttcgggcagtagcccccagtccttccggtgccatcgggggcctgctggagcaatttgcccgtggtgttggactccggagcatcagcagcaatgccttgtgaagaagccagcccatgacattttcctgctcctctctcagctgagcccttagcagagaatcaaagccatgcctggccgaaggggtacttccaggtcaggggaaatttcagtcccccatctccatcatgaacatggcagccccaaagctgagcaaggccaaagacagggttttccaacccccagcctcttgactggtgaccaccaccccttcttgtcactgtctcccacccaccccatctttgctgggattcccatcaactctcagaactgtgtggggtttccctggggccttgtggaagccatgacttcacaaagaccctacctgtcagttcttgtttctggggaggagggatcacctgcactgagaatgaggcagtttgacacagatcacaaaataaaatcaaagtctttttgaatagcca

SEQ ID NO: 35254 - DNA, 1797 bp, Artificial Sequence
  derived and/or modified sequence
atggccggcgcccgggccgccgccgccgccgccagcgccggcagctccgcgtcctcaggaaatcagcccccacaggaattagggctcggagagcttctagaagaattctctagaactcaatatcgcgccaaggacggcagcgggaccggcgggagcaaggttgagcgaatcgagaagagatgcttagagcttttcggccgggactactgttttagcgtgattccaaatactaatggtgacatttgcggccattacccgcggcacatcgtattccttgagtacgaatcttcggaaaaagagaaggatacctttgagtcaactgtacaagtaagcaagcttcaggatctgatccacagatccaaaatggctcgctgccggggtaggtttgtttgcccggttattctgtttaaggggaagcacatttgccgctccgcaacgcttgctggctggggcgagctgtacggacgctccggttataactactttttttctggaggagccgatgatgcatgggctgacgttgaggacgtcacggaagaagattgtgctctgaggagcggtgatacccatctttttgacaaagtccgcggctacgatattaagttacttcgatatttatccgtgaaatatatatgcgatctgatggtggaaaacaaaaaagtcaagttcggtatgaacgtgacctcaagcgaaaaggtggataaagcccaacgttacgccgatttcactctgctttctattccataccccggctgtgaattcttcaaggagtacaaggatagagactacatggccgaggggctcatattcaactggaaacaggattacgtagatgcacccctttcgatcccagacttcctgactcacagtctgaatatcgactggagtcagtaccagtgctgggacttagttcagcagacccagaattatttaaagctactcctctccctagtgaacagcgacgatgacagcggcttgttagtgcactgcatttcgggatgggaccgtacccccctgttcatttctttactgcgccttagcctatgggccgatggcttaatccacacctccctgaagcccaccgagatcctgtatctcacggtcgcttacgattggttcctgtttggccacatgctggtagataggctttccaagggtgaggaaatcttttttttctgttttaacttcttaaaacatatcacctccgaagagtttagcgctctcaaaactcagcgccgtaagagcctgccagccagagatggaggattcacactggaagatatttgtatgctgaggcggaaggaccgcggttccacgacatctctgggcagtgatttctctctagtgatggaatcttcaccaggggccaccggatccttcacctacgaagcagtcgagcttgtgccggcaggagccccaacccaggctgcatggaggaaatctcacagctcgtcacctcagtccgtcctgtggaatcgcccccagccttcggaggacagactcccttcccagcaaggccttgccgaggcccggtccagcagcagttcgagctccaatcactctgataacttttttagaatgggtagctccccactggaagtgcccaaacccaggctggccgcgctcagcgaccgcgagacgagactgcaagaggtccgttctgctttcttggcagcttactcttccaccgtaggcctgagggccgttgcaccctctccaagtggcgccatcggaggattactggagcaattcgctcgcggggttggattaagatccatctccagtaacgccctgtag

SEQ ID NO: 35255 - DNA, 1797 bp, Artificial Sequence
  derived and/or modified sequence
atggctggtgccagagcagcggcagctgccgcatccgccggatccagtgcctcctccgggaaccaaccaccacaggagcttggactgggcgaactgttggaggagttttccagaactcagtaccgcgctaaagacgggtccggtactgggggatccaaggtcgaacgaatcgagaaacgatgcctggagctgtttggtcgggattattgtttcagtgtaataccgaacactaacggggacatttgcggccactatccacgtcacatagtgttcttagagtatgaaagctcagagaaagaaaaggatactttcgagagcacagtccaggtaagtaagctccaggatctgatccataggagtaaaatggctaggtgtagaggccgttttgtttgcccagtaatcctgttcaaggggaaacatatctgccggtctgcaacgctggcaggctggggcgagctatatggcagatctggatataactatttcttcagcggcggagctgatgacgcctgggcagacgtcgaggatgtgacagaagaagattgcgccttgcggagtggagatacacatttattcgacaaagtgcgtggctacgatatcaaattgctgcgatacttgtccgttaagtatatttgcgatctaatggtcgagaacaaaaaagtgaaatttggcatgaatgtcacttcctcagagaaggtagacaaggcgcaaagatatgctgacttcaccctgctcagtatcccctatcctggctgcgaatttttcaaggaatataaggaccgggactacatggctgagggccttatctttaactggaaacaggactacgtggacgcccctctcagcattcctgactttctgacgcattccctgaatattgattggtcccaataccagtgttgggatttggttcagcaaacccagaattacctgaaactgctactttccctggtgaactctgacgacgatagtggactactcgtccactgcatttccggatgggacagaaccccactttttattagcctgctgcgcctgagcctgtgggccgatggactgattcacacgtccctgaagccaaccgaaatactgtatctgactgtggcctatgactggttcctgttcggccacatgctcgtggaccgattaagcaaaggcgaggagatttttttcttttgtttcaacttcctgaagcacataacctccgaagagttcagcgccctgaaaacccagcgcaggaagtcactgccagcacgcgacggaggttttacactggaagatatttgcatgctaaggcgaaaggaccgcggaagcaccaccagcctgggcagcgacttcagcctcgtgatggagagcagcccgggtgcaacgggcagtttcacgtatgaagccgttgaactcgtgcctgccggagccccaacccaagctgcatggcgcaagagtcactcttctagcccccagagtgtgttatggaacagaccgcagccatcagaagataggttaccatctcagcaaggcctcgccgaagctcggtcctcttccagcagcagcagtaaccacagtgataacttctttcggatgggctccagcccactggaagtacccaagcccaggctggcagcgctgtctgaccgagagacccgcctgcaggaggtaaggtccgcctttctggctgcatattcttcaactgtgggattgagagcagttgccccatccccaagtggtgctattggaggtctgttggagcagtttgcccgaggagtggggctaagatctatcagctctaacgccctctag

SEQ ID NO: 35256 - DNA, 1797 bp, Artificial Sequence
  derived and/or modified sequence
atggccggcgccagagccgccgccgccgccgccagcgccggcagcagcgccagcagcggcaaccagcccccccaggagctgggcctgggcgagctgctggaggagttcagcagaacccagtacagagccaaggacggcagcggcaccggcggcagcaaggtggagagaatcgagaagagatgcctggagctgttcggcagagactactgcttcagcgtgatccccaacaccaacggcgacatctgcggccactaccccagacacatcgtgttcctggagtacgagagcagcgagaaggagaaggacaccttcgagagcaccgtgcaggtgagcaagctgcaggacctgatccacagaagcaagatggccagatgcagaggcagattcgtgtgccccgtgatcctgttcaagggcaagcacatctgcagaagcgccaccctggccggctggggcgagctgtacggcagaagcggctacaactacttcttcagcggcggcgccgacgacgcctgggccgacgtggaggacgtgaccgaggaggactgcgccctgagaagcggcgacacccacctgttcgacaaggtgagaggctacgacatcaagctgctgagatacctgagcgtgaagtacatctgcgacctgatggtggagaacaagaaggtgaagttcggcatgaacgtgaccagcagcgagaaggtggacaaggcccagagatacgccgacttcaccctgctgagcatcccctaccccggctgcgagttcttcaaggagtacaaggacagagactacatggccgagggcctgatcttcaactggaagcaggactacgtggacgcccccctgagcatccccgacttcctgacccacagcctgaacatcgactggagccagtaccagtgctgggacctggtgcagcagacccagaactacctgaagctgctgctgagcctggtgaacagcgacgacgacagcggcctgctggtgcactgcatcagcggctgggacagaacccccctgttcatcagcctgctgagactgagcctgtgggccgacggcctgatccacaccagcctgaagcccaccgagatcctgtacctgaccgtggcctacgactggttcctgttcggccacatgctggtggacagactgagcaagggcgaggagatcttcttcttctgcttcaacttcctgaagcacatcaccagcgaggagttcagcgccctgaagacccagagaagaaagagcctgcccgccagagacggcggcttcaccctggaggacatctgcatgctgagaagaaaggacagaggcagcaccaccagcctgggcagcgacttcagcctggtgatggagagcagccccggcgccaccggcagcttcacctacgaggccgtggagctggtgcccgccggcgcccccacccaggccgcctggagaaagagccacagcagcagcccccagagcgtgctgtggaacagaccccagcccagcgaggacagactgcccagccagcagggcctggccgaggccagaagcagcagcagcagcagcagcaaccacagcgacaacttcttcagaatgggcagcagccccctggaggtgcccaagcccagactggccgccctgagcgacagagagaccagactgcaggaggtgagaagcgccttcctggccgcctacagcagcaccgtgggcctgagagccgtggcccccagccccagcggcgccatcggcggcctgctggagcagttcgccagaggcgtgggcctgagaagcatcagcagcaacgccctgtag

SEQ ID NO: 35257 - protein, 556 aa, Artificial Sequence
  derived and/or modified sequence
MASKPAAGKSRGEKRKRVVLTLKEKIDICTRLEKGESRKALMQEYNVGMSTLYDIRAHKAQLLRFFASSDSNKALEQRRTLHTPKLEHLDRVLYEWFLGKRSEGVPVSGPMLIEKAKDFYEQMQLTEPCVFSGGWLWRFKARHGIKKLDASSEKQSADHQAAEQFCAFFRSLAAEHGLSAEQVYNADETGLFWRCLPNPTPEGGAVPGPKQGKDRLTVLMCANATGSHRLKPLAIGKCSGPRAFKGIQHLPVAYKAQGNAWVDKEIFSDWFHHIFVPSVREHFRTIGLPEDSKAVLLLDSSRAHPQEAELVSSNVFTIFLPASVASLVQPMEQGIRRDFMRNFINPPVPLQGPHARYNMNDAIFSVACAWNAVPSHVFRRAWRKLWPSVAFAEGSSSEEELEAECFPVKPHNKSFAHILELVKEGSSCPGQLRQRQAASWGVAGREAEGGRPPAATSPAEVVWSSEKTPKADQDGRGDPGEGEEVAWEQAAVAFDAVLRFAERQPCFSAQEVGQLRALRAVFRSQQQETVGLEDVVVTSPEELAIPKCCLEASTET

SEQ ID NO: 35258 - DNA, 1671 bp, Artificial Sequence
  derived and/or modified sequence
atggccagcaagcccgccgccggcaagagcagaggcgagaagagaaagagagtggtgctgaccctgaaggagaagatcgacatctgcaccagactggagaagggcgagagcagaaaggccctgatgcaggagtacaacgtgggcatgagcaccctgtacgacatcagagcccacaaggcccagctgctgagattcttcgccagcagcgacagcaacaaggccctggagcagagaagaaccctgcacacccccaagctggagcacctggacagagtgctgtacgagtggttcctgggcaagagaagcgagggcgtgcccgtgagcggccccatgctgatcgagaaggccaaggacttctacgagcagatgcagctgaccgagccctgcgtgttcagcggcggctggctgtggagattcaaggccagacacggcatcaagaagctggacgccagcagcgagaagcagagcgccgaccaccaggccgccgagcagttctgcgccttcttcagaagcctggccgccgagcacggcctgagcgccgagcaggtgtacaacgccgacgagaccggcctgttctggagatgcctgcccaaccccacccccgagggcggcgccgtgcccggccccaagcagggcaaggacagactgaccgtgctgatgtgcgccaacgccaccggcagccacagactgaagcccctggccatcggcaagtgcagcggccccagagccttcaagggcatccagcacctgcccgtggcctacaaggcccagggcaacgcctgggtggacaaggagatcttcagcgactggttccaccacatcttcgtgcccagcgtgagagagcacttcagaaccatcggcctgcccgaggacagcaaggccgtgctgctgctggacagcagcagagcccacccccaggaggccgagctggtgagcagcaacgtgttcaccatcttcctgcccgccagcgtggccagcctggtgcagcccatggagcagggcatcagaagagacttcatgagaaacttcatcaacccccccgtgcccctgcagggcccccacgccagatacaacatgaacgacgccatcttcagcgtggcctgcgcctggaacgccgtgcccagccacgtgttcagaagagcctggagaaagctgtggcccagcgtggccttcgccgagggcagcagcagcgaggaggagctggaggccgagtgcttccccgtgaagccccacaacaagagcttcgcccacatcctggagctggtgaaggagggcagcagctgccccggccagctgagacagagacaggccgccagctggggcgtggccggcagagaggccgagggcggcagaccccccgccgccaccagccccgccgaggtggtgtggagcagcgagaagacccccaaggccgaccaggacggcagaggcgaccccggcgagggcgaggaggtggcctgggagcaggccgccgtggccttcgacgccgtgctgagattcgccgagagacagccctgcttcagcgcccaggaggtgggccagctgagagccctgagagccgtgttcagaagccagcagcaggagaccgtgggcctggaggacgtggtggtgaccagccccgaggagctggccatccccaagtgctgcctggaggccagcaccgagacctag

SEQ ID NO: 35259 - DNA, 1671 bp, Artificial Sequence
  derived and/or modified sequence
atggctagcaaacctgctgccgggaagtctaggggcgaaaagcgcaagagggttgtgttgactctcaaagagaagatcgacatttgtacgcggcttgagaagggagagtctaggaaagccttgatgcaggagtacaacgttggtatgtcgaccctctatgacattcgagctcacaaggcccagctccttcgtttcttcgcctcctccgatagcaacaaagccttggaacaaaggcgcactctccacacgccaaagctggagcacttggaccgagtcttgtacgagtggttcttgggaaagcgcagcgagggcgttcccgtgtccggtccaatgttgattgaaaaagccaaagacttttacgaacaaatgcagctgacggagccctgtgtgttctccggaggttggctctggagattcaaggctcggcacggcattaagaaactggatgccagctcagaaaagcaatcagctgaccatcaagctgcggagcagttttgtgccttctttcggagcctagcagcagagcatgggctgtctgctgagcaggtttacaatgctgacgagacaggcctgttttggcggtgccttcctaatcctactccagagggcggagcagtgccaggtcccaagcaaggcaaggacaggttgacagtactgatgtgcgctaacgccacaggttctcacagactgaagcctctggcaattggcaaatgctctggaccacgagcttttaaggggatccagcatctgccagttgcgtataaggcccagggaaatgcgtgggtggataaagagatattcagcgattggttccatcatatttttgttccatcagtgagagaacacttccgcaccataggattgcccgaggattccaaagccgtcctattactggattcctcccgggctcacccacaggaagccgagctggttagtagcaatgtgttcaccatctttcttccggcatcagtcgccagtcttgtccaaccgatggaacagggcatacggagagatttcatgcggaacttcattaatccgccggttccactgcagggccctcacgcacgttacaacatgaatgacgcaatctttagtgtggcctgcgcctggaacgcagtgccttctcacgtatttaggcgtgcctggcgtaagctctggccgagtgtggcattcgcagaaggatcctctagcgaagaggagttggaggcagagtgttttcccgttaagcctcacaacaaaagcttcgcccacattctcgagctggtcaaagagggcagttcttgcccaggacaactgagacaaagacaggcagcctcatggggtgtggctggcagggaggccgagggcggcaggccacccgctgctactagtccagccgaggtcgtgtggtcctctgaaaaaaccccaaaagcggatcaagacggacgtggcgatccaggcgaaggtgaagaagtggcctgggaacaggccgctgttgcttttgacgccgtactgcggtttgctgaaaggcaaccgtgtttttccgctcaggaagtggggcaactgcgggccctgagggcggtgtttcgctctcagcaacaggaaactgtggggttggaggatgtggtcgtaacctccccagaagagctcgccatccctaaatgttgtctcgaggcctcaacggaaacctag

SEQ ID NO: 35260 - DNA, 1671 bp, Artificial Sequence
  derived and/or modified sequence
atggccagcaagccagctgctgggaagagcagaggagagaagaggaagagggtggtgctgaccctgaaggagaagattgacatctgcacccggctggagaagggggagagcaggaaggccctgatgcaggagtacaacgtgggcatgagcaccctgtatgacatccgggcccacaaggcccagctgctgcgcttctttgccagcagtgacagcaacaaggccctggagcagaggaggaccctgcacacccccaagctggagcacctggacagagtgctgtatgagtggttcctgggcaagaggtctgagggcgtgcctgtgtctggccccatgctgattgagaaggccaaggacttctatgagcagatgcagctgacagagccctgtgtgttcagcggcggctggctgtggaggttcaaggcccggcacggcatcaagaagctggatgccagcagcgagaagcagagcgctgaccaccaggccgctgagcagttctgtgccttcttccgcagcctggccgctgagcacggcctgtctgctgagcaggtgtacaatgctgatgaaacaggcctcttctggcgctgcctgcccaaccccaccccagagggcggcgctgtgcccggccccaagcagggcaaggaccggctgactgtgctgatgtgtgccaatgccaccggcagccaccggctgaagcccctggccatcggcaaatgttctggcccccgggccttcaagggcatccagcacctgcctgtggcctacaaggcccagggcaatgcctgggtggacaaggagatcttcagtgactggttccaccacatctttgtgcccagcgtgcgggagcacttccgcaccatcggcctgcctgaggacagcaaggctgtgctgctgctggacagcagccgggcccacccccaggaggccgagctggtgagcagcaatgtgttcaccatcttcctgcctgcctctgtggccagcctggtgcagcccatggagcagggcatccggcgggacttcatgaggaacttcatcaacccccctgtgcccctgcagggcccccacgcccgctacaacatgaatgatgccatcttctctgtggcctgtgcctggaatgctgtgcccagccacgtgttcagaagagcctggaggaagctgtggcccagcgtggcctttgctgagggcagcagcagcgaggaggagctggaggccgagtgcttccctgtgaagccccacaacaagagctttgcccacatcctggagctggtgaaggagggcagcagctgccccggccagctgcggcagaggcaggccgcctcctggggcgtggccggccgggaggccgagggcggccggcccccagctgccaccagccctgctgaggtggtgtggagcagcgagaagacccccaaggctgaccaggacggccgcggggaccctggagagggggaggaggtggcctgggagcaggccgctgtggcctttgatgctgtgctgcgctttgctgagcggcagccctgcttcagcgcccaggaggtgggccagctgcgggccctgcgggctgtgttccgcagccagcagcaggagaccgtgggcctggaggatgtggtggtgaccagccctgaggagctggccatccccaagtgctgcctggaggccagcacagagacctag

SEQ ID NO: 35261 - DNA, 2686 bp, Artificial Sequence
  derived and/or modified sequence
ggactggaggagaaccgagtggccggcacttccggccggcggcggctgctccgggtgagcaggcccctgaagtgctgtgcctggagataccattgtggaccctggagaggcacctgctgcttatgcggtaaaacctctaccaccccaaacctggtcagtttgaggggagccgctgccatagtatccacagagaaggccggagttccagccgtgtggagcagcagaggggagtctgacagggtcacctcctccacagagagaattggcagctgactgcactgccaggagccaaggcctaggtgtgtggagcctggaagaccagggatacctgaggcaggaggtgcagcgtgtggagtgagaaacccgagagggactggggcctgtgctcaggatcagcagagcaggcaggcagagtggagagggagagacggagccccagaaggggagcaggaggagagggaagtagtggcagcagcccaggccaggcgtgtgtcctgcaagtgctaggaccagccacccctccccatggcctccaagccggctgccgggaagagcagaggggagaagcggaagagggtggtgctgacactgaaggagaagattgacatctgcacgcgcctggagaagggcgagagccggaaggcactgatgcaggagtacaatgtgggcatgtccaccctctacgacatcagggcccacaaggcgcagctgctccggttcttcgccagctccgactccaacaaggcgctggagcagcggcgcacgctgcacacgcccaagctggagcacctggaccgcgtcctgtacgagtggttcctggggaagcgctccgagggcgtccccgtgtcaggccccatgctcatcgagaaggccaaggacttctacgagcagatgcagctcactgagccctgcgtgttctccggagggtggctttggcgctttaaggccagacacggcattaaaaagctagatgcatccagtgaaaagcagtcagccgaccaccaggccgcggagcagttctgtgcgtttttcaggagcttggctgctgagcacgggctgtccgccgagcaggtttacaacgctgatgagaccggccttttctggcggtgcctgccaaatcccactccggaaggcggggctgtgcctggccccaagcagggcaaggaccggctgaccgtgctgatgtgtgccaacgccacgggctcccacaggctcaagcccttggccatcgggaagtgcagcggtcccagggctttcaaaggcatccagcacctgcccgtcgcctataaggcccaggggaacgcctgggtggacaaggagattttttccgattggttccatcatatctttgtgccctcggtgagagagcacttcagaaccataggtttgccggaagacagcaaagccgttctcttgctggacagctcccgggctcacccgcaggaggccgagctggtgtccagtaacgttttcaccatcttcctgcctgccagcgtggcctcattggtgcagcccatggagcagggcattcggagagatttcatgaggaacttcattaaccctccggtccccctgcagggcccccacgcccgctacaacatgaacgatgccatattcagcgtggcctgtgcctggaacgcagtccctagccacgtcttcaggcgggcctggaggaagctgtggccgtcggttgcgtttgccgaaggctcctcctctgaggaggagttggaggcagagtgcttcccagtgaagccccacaacaagtcctttgcacacatcctggagcttgtgaaggaaggctcctcctgcccgggccagcttcgccagcgccaggccgccagctggggggtagcgggaagggaggcagaagggggacggccccctgctgccacgtcgccagcagaggttgtgtggagttcagaaaagactccgaaagctgaccaggacggcagaggagatcctggtgagggcgaggaggtggcctgggagcaggcggccgtggcctttgacgcagtcctgcgctttgcggagcggcagccatgcttcagtgcgcaggaagtggggcagctgcgggcgctgcgtgccgtgttccggagccagcagcaggagactgtgggccttgaggatgtggtagtgacctcaccagaggagttggcaattcctaagtgctgcctggaggcctctacagagacataatgttggagaacttctgccacatggcagtgctgggtaagacccctctgtccccaccagtgcccttgaggttatgggtgttggtaggtctgtggcctccatctccatgacgatggtgttaaggactgcatgtttgtgtccccccccaaagtttatatgttgaaaccctgacccccaggagggtggtattaggaggtggggcctttgggaggtgactaggcttaggtgagatcgtgagggtggggctcgccgatgagatcgagtccttataagaaaaggaaggaactagagcgaggtcactttgtgctgtgtgagcatacaagaaaactgccatcttcaagctgggtgcagtggctcacgcctgtaatcccagcactggaaggccaaggcattaggattgcatgagtccaggagttcgagaccagcctaggcatgataagaccttattgctaaaaaaaaaaaaaaaggaaataaaatagaaaattgccatctg

SEQ ID NO: 35262 - DNA, 1671 bp, Artificial Sequence
  derived and/or modified sequence
atggccagcaagcccgccgccggcaagagccggggcgagaagcggaagcgggtggttttaaccttgaaagaaaaaattgatatttgcaccagactggagaagggagaatccaggaaagccttgatgcaagagtataacgtcggtatgtccacattgtacgacattcgtgcgcacaaagcccagttactgagattttttgcttccagcgattcaaacaaagccctggagcaacggcgcacattacacacacccaagctcgagcatctggatagagtgctgtacgaatggtttctgggtaaacgatctgagggagtacccgtttcaggtcctatgttaatcgagaaggcaaaggacttctacgagcagatgcagttaaccgaaccttgcgtgttttctgggggatggctttggcgattcaaggcgcggcatggaatcaaaaagctagatgctagctcagagaagcaatctgcagaccatcaggccgctgaacaattctgcgcattctttaggagcctcgccgccgagcacggcctttctgcagaacaggtttacaatgccgatgagaccgggctgttctggaggtgtttaccaaaccctacccccgaggggggagccgtgccaggtcctaagcaggggaaggacagactgacagtgcttatgtgcgcgaacgcaactgggagtcacagattgaagcccttggccatcggcaaatgcagtggccccagggccttcaagggtattcagcacttgccggtggcatacaaagcacagggcaatgcttgggtagataaagagatattttctgattggtttcatcatatctttgtcccgagcgtcagggagcacttccgcaccatcggcctgcctgaggatagcaaagccgtgctgttgctggactcctcccgggcccatccacaggaggccgagctggtgtccagcaatgtgtttaccattttcctgcccgcctctgttgcgagccttgtgcagcccatggagcaagggataaggcgggacttcatgaggaatttcatcaatcctcctgtgcctttgcaggggcctcacgcaaggtataatatgaacgatgctattttttctgtagcctgcgcctggaatgcagtaccctctcacgttttccgtagggcatggaggaagctctggccctcagtcgcgttcgcagagggctctagtagtgaagaagagcttgaagccgaatgttttcccgtgaagccacataataagtcgttcgcgcatattctggagcttgtcaaagaagggtcaagctgtcccggccagctgaggcagcgccaggcagcgtcttggggtgtggctggacgagaggcagaaggtgggcgaccgccagccgctactagtcccgcagaggtggtctggtcatccgagaaaactccaaaggcggatcaagatggacgaggcgacccaggagaaggagaagaagtggcctgggagcaagccgccgtggcattcgatgccgtgttaagattcgccgaacgccagccctgctttagcgcgcaggaagtcggccagctgcgcgcactgagggccgtttttaggagccaacaacaggaaactgttggactagaggatgtggtggtgacaagccccgaggaactcgcgattcccaaatgctgtcttgaggccagcaccgagacatag

SEQ ID NO: 35263 - DNA, 1671 bp, Artificial Sequence
  derived and/or modified sequence
atggcctcaaaacctgccgcaggaaagagcagaggtgagaaaaggaagagggtggtgcttacccttaaagagaagatcgatatttgcaccaggcttgaaaagggtgaaagtcggaaagcgctaatgcaggagtacaacgtgggcatgtcaaccttgtacgacatcagagcacacaaggcgcagttactgcggtttttcgcctcatcagactctaacaaggcgttggagcaacgtcgaactctgcacactcccaaattagagcacctggacagggtcctgtatgagtggtttctgggcaaaagatccgagggggtgcctgtgtccggccctatgctaatcgaaaaagcgaaagatttctatgagcagatgcaacttaccgagccctgtgtgttctcaggcggttggctctggcgtttcaaagctcggcacggtattaagaagttggacgcatccagtgaaaagcagagcgcagaccaccaagcggctgaacagttctgtgccttctttcgttcactcgctgctgagcacggtctcagcgcggagcaggtctataacgccgatgaaacagggttgttttggcgctgcttaccgaatccaacccccgaaggaggcgctgtacccggtcctaagcagggaaaggaccgtttgaccgtgcttatgtgcgctaatgcaactgggtcacatcggttgaagcctttggccatcggaaaatgtagtggcccaagggcattcaagggtatccagcatctgccagttgcatataaagcgcagggaaatgcgtgggtagacaaggagatcttctctgactggtttcaccacatcttcgttccgagcgtgagagaacacttcaggacgatcggtcttcccgaagactctaaggccgtgctcttgcttgacagcagccgggcacaccctcaggaggccgagctcgtgtcctcaaatgtgttcaccattttcctcccagcgtccgttgcaagcctagtacagcctatggaacaaggaattcggcgtgatttcatgcggaattttatcaacccccctgtgcccttgcagggtccccatgcaaggtacaacatgaatgatgcaattttcagtgttgcttgcgcgtggaatgcagtaccaagccatgtgtttcgaagagcctggcgaaaactgtggcccagtgtggctttcgccgaggggtctagcagcgaggaggaactcgaagctgaatgtttccccgtcaagccgcataataaatcctttgcccacatactggagctagttaaggagggaagtagttgtcctgggcagttaaggcaacgccaggcggcatcctggggcgtcgccggaagggaagcagagggtggcaggccccctgctgcaacctcacccgcagaggttgtttggtcatctgagaaaactcccaaggcggatcaggatggcaggggtgaccccggagagggtgaggaggtggcctgggaacaagccgctgtggcgttcgacgctgtgttacgctttgccgaaaggcaaccatgcttctccgctcaggaggtgggccagcttcgcgcacttcgtgccgttttccggtcacagcagcaagagactgtgggcctggaggacgtggtggtgacttcaccagaagagttagccatccccaaatgctgcctggaagcctcgaccgaaacatag

SEQ ID NO: 35264 - protein, 619 aa, Artificial Sequence
  derived and/or modified sequence
MPDPAAHLPFFYGSISRAEAEEHLKLAGMADGLFLLRQCLRSLGGYVLSLVHDVRFHHFPIERQLNGTYAIAGGKAHCGPAELCEFYSRDPDGLPCNLRKPCNRPSGLEPQPGVFDCLRDAMVRDYVRQTWKLEGEALEQAIISQAPQVEKLIATTAHERMPWYHSSLTREEAERKLYSGAQTDGKFLLRPRKEQGTYALSLIYGKTVYHYLISQDKAGKYCIPEGTKFDTLWQLVEYLKLKADGLIYCLKEACPNSSASNASGAAAPTLPAHPSTLTHPQRRIDTLNSDGYTPEPARITSPDKPRPMPMDTSVYESPYSDPEELKDKKLFLKRDNLLIADIELGCGNFGSVRQGVYRMRKKQIDVAIKVLKQGTEKADTEEMMREAQIMHQLDNPYIVRLIGVCQAEALMLVMEMAGGGPLHKFLVGKREEIPVSNVAELLHQVSMGMKYLEEKNFVHRDLAARNVLLVNRHYAKISDFGLSKALGADDSYYTARSAGKWPLKWYAPECINFRKFSSRSDVWSYGVTMWEALSYGQKPYKKMKGPEVMAFIEQGKRMECPPECPPELYALMSDCWIYKWEDRPDFLTVEQRMRACYYSLASKVEGPPGSTQKAEAACA

SEQ ID NO: 35265 - protein, 493 aa, Artificial Sequence
  derived and/or modified sequence
MRLGPRWKGEALEQAIISQAPQVEKLIATTAHERMPWYHSSLTREEAERKLYSGAQTDGKFLLRPRKEQGTYALSLIYGKTVYHYLISQDKAGKYCIPEGTKFDTLWQLVEYLKLKADGLIYCLKEACPNSSASNASGAAAPTLPAHPSTLTHPQRRIDTLNSDGYTPEPARITSPDKPRPMPMDTSVYESPYSDPEELKDKKLFLKRDNLLIADIELGCGNFGSVRQGVYRMRKKQIDVAIKVLKQGTEKADTEEMMREAQIMHQLDNPYIVRLIGVCQAEALMLVMEMAGGGPLHKFLVGKREEIPVSNVAELLHQVSMGMKYLEEKNFVHRDLAARNVLLVNRHYAKISDFGLSKALGADDSYYTARSAGKWPLKWYAPECINFRKFSSRSDVWSYGVTMWEALSYGQKPYKKMKGPEVMAFIEQGKRMECPPECPPELYALMSDCWIYKWEDRPDFLTVEQRMRACYYSLASKVEGPPGSTQKAEAACA

SEQ ID NO: 35266 - protein, 312 aa, Artificial Sequence
  derived and/or modified sequence
MPMDTSVYESPYSDPEELKDKKLFLKRDNLLIADIELGCGNFGSVRQGVYRMRKKQIDVAIKVLKQGTEKADTEEMMREAQIMHQLDNPYIVRLIGVCQAEALMLVMEMAGGGPLHKFLVGKREEIPVSNVAELLHQVSMGMKYLEEKNFVHRDLAARNVLLVNRHYAKISDFGLSKALGADDSYYTARSAGKWPLKWYAPECINFRKFSSRSDVWSYGVTMWEALSYGQKPYKKMKGPEVMAFIEQGKRMECPPECPPELYALMSDCWIYKWEDRPDFLTVEQRMRACYYSLASKVEGPPGSTQKAEAACA

SEQ ID NO: 35267 - protein, 331 aa, Artificial Sequence
  derived and/or modified sequence
MAEGGGPEPGEQERRSSGPRPPSARDLQLALAELYEDEVKCKSSKSNRPKATVFKSPRTPPQRFYSSEHEYSGLNIVRPSTGKIVNELFKEAREHGAVPLNEATRASGDDKSKSFTGGGYRLGSSFCKRSEYIYGENQLQDVQILLKLWSNGFSLDDGELRPYNEPTNAQFLESVKRGEIPLELQRLVHGGQVNLDMEDHQDQEYIKPRLRFKAFSGEGQKLGSLTPEIVSTPSSPEEEDKSILNAVVLIDDSVPTTKIQIRLADGSRLIQRFNSTHRILDVRNFIVQSRPEFAALDFILVTSFPNKELTDESLTLLEADILNTVLLQQLK

SEQ ID NO: 35268 - DNA, 996 bp, Artificial Sequence
  derived and/or modified sequence
atggccgagggcggcggccccgagcccggcgagcaggagagaagaagcagcggccccagaccccccagcgccagagacctgcagctggccctggccgagctgtacgaggacgaggtgaagtgcaagagcagcaagagcaacagacccaaggccaccgtgttcaagagccccagaacccccccccagagattctacagcagcgagcacgagtacagcggcctgaacatcgtgagacccagcaccggcaagatcgtgaacgagctgttcaaggaggccagagagcacggcgccgtgcccctgaacgaggccaccagagccagcggcgacgacaagagcaagagcttcaccggcggcggctacagactgggcagcagcttctgcaagagaagcgagtacatctacggcgagaaccagctgcaggacgtgcagatcctgctgaagctgtggagcaacggcttcagcctggacgacggcgagctgagaccctacaacgagcccaccaacgcccagttcctggagagcgtgaagagaggcgagatccccctggagctgcagagactggtgcacggcggccaggtgaacctggacatggaggaccaccaggaccaggagtacatcaagcccagactgagattcaaggccttcagcggcgagggccagaagctgggcagcctgacccccgagatcgtgagcacccccagcagccccgaggaggaggacaagagcatcctgaacgccgtggtgctgatcgacgacagcgtgcccaccaccaagatccagatcagactggccgacggcagcagactgatccagagattcaacagcacccacagaatcctggacgtgagaaacttcatcgtgcagagcagacccgagttcgccgccctggacttcatcctggtgaccagcttccccaacaaggagctgaccgacgagagcctgaccctgctggaggccgacatcctgaacaccgtgctgctgcagcagctgaagtag

SEQ ID NO: 35269 - DNA, 996 bp, Artificial Sequence
  derived and/or modified sequence
atggccgagggcggaggaccagaaccaggggaacaggagcggagatcaagcggccccaggcctccatccgccagagatctgcaactcgccctggccgaactgtacgaagacgaggtaaaatgtaagtctagcaagagtaaccgcccgaaagcaacagtcttcaaaagcccacgcactccaccacaacggttttactcttccgaacatgaatatagcgggttgaacatcgtcagaccgtctactggaaagattgtaaacgaactgtttaaggaggcgagggagcacggcgccgttcctcttaatgaggcaactcgagctagcggggacgataagtctaagtcctttactggtgggggttaccgcctcggatcctccttctgtaagcgttcggaatacatttatggggagaaccagttgcaggacgtgcagattctattgaaactctggtccaatggcttctctttagacgatggcgaactccgtccctataatgaaccaaccaacgcccagttcctggagtcggtgaagcgcggcgaaattccacttgagctgcagagactggtgcacggcggccaggtaaacctggatatggaggaccatcaagaccaggagtacatcaagccgaggttacggtttaaggcctttagcggagagggccagaaactggggtcacttacccccgaaatcgtttcaacaccttcaagcccagaagaggaggataagagcatcctgaacgcggtagtgctgattgacgactctgttccaacaactaagatccagatccgtcttgccgatggcagccggttgattcaacgatttaatagcacccatagaatcctggacgtgagaaacttcatcgtccaaagccgcccagaattcgcagcactagacttcatcctcgtgacctccttccccaacaaggagctgactgacgaatccttaaccttgctggaggctgacatcctgaatactgtgctgctgcagcagctgaagtag

SEQ ID NO: 35270 - DNA, 996 bp, Artificial Sequence
  derived and/or modified sequence
atggccgagggcggcggccctgagcctggagagcaggagcggcgcagcagcggccccaggcctccttctgcccgggacctgcagctggccctggccgagctgtatgaagatgaggtgaagtgcaagagcagcaagagcaaccggcccaaggccaccgtcttcaagagccccaggaccccaccccagcgcttctacagcagcgagcacgagtacagcggcctgaacatcgtgcggcccagcacaggcaagatcgtgaatgagctgttcaaggaggcccgggagcacggggctgtgcccctgaatgaggccacccgggccagcggagatgacaagagcaagagcttcaccggcggcggctaccgcctgggcagcagcttctgcaagaggtctgagtacatctacggggagaaccagctgcaggatgtgcagatcctgctgaagctgtggagcaatggcttcagcctggatgatggagagctgcggccctacaatgagcccaccaatgcccagttcctggagagcgtgaagagaggagagatccccctggagctgcagaggctggtgcatggaggccaggtgaacctggacatggaggaccaccaggaccaggagtacatcaagccccggctgcgcttcaaggccttcagcggggagggccagaagctgggcagcctgaccccagaaattgtgtccacccccagcagccctgaggaggaggacaagagcatcctgaatgctgtggtgctgattgatgattctgtgcccaccaccaagatccagatccggctggctgatggcagccgcctcatccagcgcttcaacagcacccaccgcatcctggatgtgaggaacttcatcgtgcagagcaggcctgagtttgctgccctggacttcatcctggtgaccagcttccccaacaaggagctgacagatgagagcctgaccctgctggaggccgacatcctgaacacagtgctgctgcagcagctgaagtag

SEQ ID NO: 35271 - DNA, 996 bp, Artificial Sequence
  derived and/or modified sequence
atggccgagggcggcggccccgagcccggcgagcaggagcggcggtcaagcggtccccgacccccgtccgccagagacttacagttagccttggctgagttgtatgaagatgaagtcaagtgcaaatcatctaagagtaacaggcctaaagctacagtatttaaatctccaaggacacctccccagaggttctattctagtgagcacgaatactccgggctcaatatcgtgagaccaagtacagggaaaatagttaacgagttgttcaaagaggctcgcgagcacggggccgtgccacttaacgaggctactagagcgtcgggcgatgacaagagcaaaagttttacaggtggcgggtatcggctaggttcatccttctgtaagcggtctgagtacatttacggcgagaaccaactacaagacgtgcagattctccttaagctgtggagtaatggtttttcactggacgatggggaacttaggccttacaatgagcccacgaatgcacagtttttagagtccgtgaaaagaggtgaaatccctttggagttacaaaggttggtccacggtggccaggtgaacctggacatggaagaccaccaggaccaggaatatataaagccacgattaagatttaaagccttcagtggtgagggccaaaaactgggatcactcactcccgagatcgtgtcaaccccaagcagtcctgaggaagaggacaagagcatcctgaatgctgtggtgttgatcgacgactctgtccccaccactaaaatccagatccgattggctgacggctcaagactgatacagcgtttcaacagcacacacaggatcctggacgtgcgtaattttattgtccagagcagaccggagttcgccgctttggactttattctcgtcactagtttccctaacaaagagctgaccgatgaatcactcacactgctggaggccgacattttgaacactgtcctactccagcagctcaagtag

SEQ ID NO: 35272 - DNA, 5068 bp, Artificial Sequence
  derived and/or modified sequence
ggttcgggtagcggggacgcgcacgcaccttgcgcgtcttcgcccctcctgcggttgccaggcaaccggccccggaagttgcggcaggtgcgtccgcagcgggcgccgctagccagcggaagatggcggagggcggaggccctgagcccggcgagcaggagaggaggtcttccgggccgcggcctccgagcgcgcgggatttgcagttggccttggcagaattgtatgaagatgaagtgaagtgcaaatcttccaagtctaatagacctaaagccacagtcttcaagagcccacggacaccacctcaacggttttactcaagtgaacatgaatacagtggattaaatatagttcgaccttcaactgggaaaattgtgaatgaacttttcaaagaggcaagggaacatggggctgtccctctgaatgaagccacaagagcttcaggtgatgataaatctaagtcatttacaggtggaggatacagattgggtagttctttttgtaagcggtctgaatatatctatggagaaaatcagctgcaagatgttcagattttgcttaaactgtggagcaatggtttcagtttagatgatggagaattgagaccttacaatgaaccaacaaatgctcaatttctggagtctgttaagagaggagagattcccctggagcttcagcgccttgttcatggtggccaagtgaatttggatatggaggatcatcaggatcaagaatacataaaacctagattgaggttcaaggcttttagtggagaagggcaaaaacttggaagccttacacctgaaatagtcagtacaccttcctctccagaagaggaggataaatcaatacttaatgcagttgttcttattgatgattcagtgccaacaacaaaaattcaaatcaggttagcagatgggagtcgtttgatacaaagattcaatagtacacacaggatcctggatgtccggaactttattgtacagtctcgtcctgaatttgcggctcttgactttattcttgtgacttcatttccgaataaagagctaacagatgaaagcctgacactgctagaagcagatattcttaacactgtgttactccagcaactaaaataatattgttcctgtccatgcagtagcatgtgggaatagatgatgtgccgtattaataaggacaatacttcagcattaaaaacagccaaattatttttattatttttacagataaattttggttttattgttattctgtcttccaatctgaatatagacaaatttggattaggaatagaccttgagataagtatgtttgagtttttagttgaaggactggcttatgttgatagtttttggatttctaggcaaatgagttgttacatgcttagtgttaatgtaacaacatttgtttgcagagaaaaatgaacaaaacccctttttgataaatgcatttggtaaaatttgcactaaagtttcttgatgcagcattgaccaacagccattaagaaatcttttgatcaaataagttgaaaatttgtctataatatatactgaaacgtgtcttttgattttgaaattgtttgatcatacaataattatttctcctattaagattttacacatcctttttacttactgatttagatatattactagtatcagaaactacagttttgccttgtattttacagaattatgactgttgtgaacttaaacagaaacacataaaggtcagcaattctttttttttttttttttgatatggagttttgctcttgttgcccaggctggagtgcaatggcataatttctgctcaccgcaacctccgcctcccaggttcaaaagattctcctgccttagcctcccaagtagctgggattacaggcatgcgccaccatgcctggctaatttttgtacttttgctagagacagcgtttctctgtgttgatcaggctggtctcgaactccgaacctcaggtgatccacccacctcagcctcccaaagtgctgggattacaggcatgagccaccacgcccagcctaaaggtcagcagttcttaagaagatatggtaaacagcaacaatattttaaaatcaagtaattacagttcctcccagagcttgcgttgatcacattcatttattcattcaacacatttttctaggaaactcactgtatacactaaacactattctgtgtgctcaacctagaatgtcttctccagaacaagactagtgtagaaatacaggaatgtaaattctgtcagacggactagatctaaagaattaccagcataaatgtttgcatttctgctgaagccagaagcttttccttcttcctagacaccatttcatccttaattattacttctggttagttttccattgccaccataacaagttacaaaatgtggcttaaaatagcacaaatttattatcttcacaattctgtaggttaggagtccaggttaagagtttcgcggtgccaagatcaatttgttggcagggttgcattctgttaggaggctctacaggagaatcatttccttgtcattccaccttctacaggacatcctcattccttggcttgtgacctccttcttccatcttaaaaaccagtgctgtttcatctctatgacccttctgttaccacatctctctgacaccagtgtggagaggttctctgcaggactcatgattaaatgaggcccaccggatatccaatctaggcttatctccttgtcttgaaatccatagtaaccttaattacatctgcaaaatctcttttaccatctaaggttacatacaggtttggagattaggacattaacattttacatggaacattattcttgcctactacagttcccacccaccccccgctccactcctgtgttaaagattcagattcatcacaaataaatttacatcactcataggtgctcaaaagtcacaatccattattacagcatcaactctaaatccaaaatcttatctgagtctcaccaactcaaaagtctcaaatctcacattgaagccatctaaattaagtttgggagaggatctgtgtgtgatttctgggacataattccaactgtgcacttgtgaacctagaaaacaagttatctgttcccaagtatgatggcatgacaggcagacaataatagttacacacgttcctgttcaaaaagcagaaacagatggaaaaaggagccatcagcaccaatcaatttacaaaaccagcgaggcacccttctttaagtttcaaggcctgggagtaatcttcagctcactgctgttctctgggcttgttgactgtctcagagtcatctttactttttcacaaaaggtagcacacgtttgcagctgagtatcaacttatcagtttgttcttcttttatattctctaaagctttctgttaaaaatggtggtgcttctgctgctataacgttgtcaagaaacttgtgggtcttttacatatgtcacagggatgcactcatttagataggaggctcctcacgtatctttcctggaaaatcctgtctctgtttttggctttttctgaaatagctgagaggatctatgattcacacccttaatatcttcaaagagtcttgtgtgtgacctgatattcagaccttttgatgtttctgaagtattagcaaaaggttatacagccatatcttcatcactttctctagagtaaaggctgtcctgacggtgaatcttagttttagtggcttttgccatttgaataggccgcgaatttcccaaatcatcaagtcctggtttctttatatttaacaggtcttccctcaatctacctctttccacattttactataatcagcaagaagacagcaggctgtaccttccacagcttgcttggaaatatcctcagctaaatattgaagtcatcacttaaaagttctgctttacacataacggcaggacacaactcagcttagcttttcgccactatgtaacaaggactcctttcctccacttctccagtaacatattcctcattttttaccaacagtctattcatgatgatttagatattctatggcaatcgaggtattctctattatgctcctttcttcaaggccgccctagcattaacattccatatttctactaacagtctgtttaaggcagtttagcttcttttctggcatgctcctcagaattcttccagcctccacctactgcccaattccagagccacttttctacttttaggtatttgttacagcagcacctcaagtacctagaaaactcttttatgcctgcttctctgccagatgacttgaatatggtactagatttggaattcacctttctccagggtcactgtttatttcaaagaggtgaatttacctgtgctagggttttcacactgggagtgctaccagaactaccacaggatgaaagtggtgagcccaccactgcagagaagttttctcagtgccgtaatatagaggaattctcaaaataagccctactccttttcacttactgaaaacaacttggataatgtgtaacagccagccccatttcaaaaagattaccaggggtaaaacaactttttcatgggtcaaaatcatcttccgaagaaaatgatttcttaaaagaattgaacattgtaaatcaaagggcattgtcctgttttggattaacaaaacaggaaaaataaccaatccttgtaaaattatttgaaattttcttgtttttatcagttgagtgcctatagatgcacatacaaaaacaactgccatttttgtatataatagtcttccaagatagagatttacattaggagagaattaaacatccaggagggatgaacagtatttcatgtgtgctatgtagtgttttgcttcattgagagtcattttcatgaattatttttactactgcagtcatcttaaatttataatcatctcaaaaaagatgtcacaatgaacagacaaccatctgtgaggtcagtcattttgcatgatgtatgtaatcaaaaagtttgaaatgtctgcttactaataaagaatgttttcactgaaactta

SEQ ID NO: 35273 - DNA, 996 bp, Artificial Sequence
  derived and/or modified sequence
atggcagagggaggtggtcccgagccaggtgagcaggagagacggtcgtctggacccaggcccccatcagccagggatctacagctcgcattggcagaattgtacgaggatgaggtcaagtgcaaatccagcaaatcgaataggccaaaagcaactgtgtttaagtcacccagaacacccccacagagattttacagttctgagcacgaatatagcggccttaatattgttcgaccttctaccggcaagattgttaacgagctgttcaaagaagccagagagcatggagccgtgcccctcaatgaggccacccgggcatccggagacgacaagagcaaaagtttcaccgggggaggctataggctgggatcatcattttgcaaaaggtccgaatatatctacggggaaaaccagctgcaggatgtgcagatcctcctgaagctctggagcaatggctttagcctggatgatggagaacttcgtccatataatgaacccaccaatgcccaattcctggagagtgtgaagcgcggagaaatccctctggagcttcaacgactggttcatggaggccaggtcaatctcgatatggaagaccaccaagaccaggaatatattaaaccgaggctgcggttcaaggctttttcaggggagggacaaaaactgggcagtctgacacctgagattgttagtactcccagctctcctgaggaagaagacaagtcgattctcaacgccgtcgtgttgatcgatgacagtgtgcctacaacgaaaatccagatccggctagcagatggctccaggctgatccagaggtttaattctactcaccgcatcctggatgtcaggaatttcatagtccagagtaggcccgagtttgcagctctggactttattctggtgacctcatttcccaataaggaactgaccgatgagagcctgactttgttggaggcagatattctgaacacagtgttgctgcagcagctgaaatag

SEQ ID NO: 35274 - protein, 54 aa, Artificial Sequence
  derived and/or modified sequence
MCTTLFLLSTLAMLWRRRFANRVQPEPSDVDGAARGSSLDADPQSSGREKEPLK

SEQ ID NO: 35275 - DNA, 165 bp, Artificial Sequence
  derived and/or modified sequence
atgtgtacaaccttgtttctcctcagtactctcgccatgttgtggcgaaggagatttgccaaccgagtgcagcctgagccttcggacgtcgatggagcagccaggggatcttcgctggatgctgatccccagtcctcgggcagggaaaaagaaccacttaagtag

SEQ ID NO: 35276 - DNA, 165 bp, Artificial Sequence
  derived and/or modified sequence
atgtgcaccaccctcttcctgctgagcaccctggccatgctgtggaggagaagatttgccaacagagtgcagcctgagcccagtgatgtggatggagctgcccggggcagcagcctggatgctgacccccagagcagcggccgggagaaggagcccctgaagtag

SEQ ID NO: 35277 - DNA, 165 bp, Artificial Sequence
  derived and/or modified sequence
atgtgcaccaccctgttcctgctgagcaccctggccatgctgtggcgtcgcaggtttgcaaatagggtccagcctgagccatccgatgtggatggggccgctaggggcagttcccttgacgctgatcctcagagcagcggccgcgaaaaagaacccctcaaatag

SEQ ID NO: 35278 - DNA, 165 bp, Artificial Sequence
  derived and/or modified sequence
atgtgtactaccctctttctgctctcaacactggcaatgctatggcggagaagatttgcaaacagggtgcagccagagcctagcgatgtagatggggcagcgagaggaagttccctggacgcagaccctcagagttccgggagagaaaaggaaccattgaagtag

SEQ ID NO: 35279 - DNA, 1177 bp, Artificial Sequence
  derived and/or modified sequence
ggtcccagtgcttgcggcgtcgcgagtgtgcgcgtgcggacccttcccgcggcggggaactgactcaaagtccaacactcccgagctttcgcggcgaggccgaccgccagcccgcccgtgggggcgaacaggagcccctccggcggccgccgtggacctagctgggctcccctcgcccgggcctctccccgcgcccccgagccagccgctgggggccgcggcgccactcccacggctctggacgcccaggctctggggggttagcacgggggtcgtccccctgcccgcccaccgccccggctgtcggaacttgagcgcacctccgacctcgggcgccagaggcctgcgccccctctccttccgcccagcacctccatgccctcggtgcacgaacgcggcggcggcggccagaagtcccccgtggcttatgaatgacacggacagagagcccagcgacgtggatggggcagctaggggcagcagcttggatgcggaccctcagtcctcaggcagctcaggtcctggttcgtcccctagcccaggaggatgctgtgggagctgcagcagcggcaagagggagaatggggggaagcagcactagagaagttcccagagctcatcctgtcactggctgctctgctgaaattatcaataagaaatgccagttggatctgtgacatgtctgcctgcagctggatgggagcaacggacagcttgtcctccgaatgtgttttctgtatgtgtgcaagcgcgtgtgttccaaacgggcagtagcgtgtgggaaggaaaaagcctgacacttgtttttatcaatttgctgatgctcagtcccggcggctgcctcctttgcccccagctgctctgccatttctctcttttcaatcctgcatgatcctgagcagagataaaagcagatttccgcttctgctcccagatccaggagcagaccctgcaggcagctgctcctgatgtctcacagctattagtcttcaaaaaccccccgtgcctctgtgcacacgcgtctctcctccccagccagcccccctcccagcccagcggcgatgtctctgcctggctggcccgtgcccttgacttccaggcagtagaagatggagttctctagacagcagcacttcagccgccactctgcctctgaagggaaggaagggaaagggtg

SEQ ID NO: 35280 - DNA, 165 bp, Artificial Sequence
  derived and/or modified sequence
atgtgcaccaccctgttcctgctgagcaccctggccatgctgtggagaagaagattcgccaacagagtgcagcccgagcccagcgacgtggacggcgccgccagaggcagcagcctggacgccgacccccagagcagcggcagagagaaggagcccctgaagtag

SEQ ID NO: 35281 - protein, 544 aa, Artificial Sequence
  derived and/or modified sequence
MKISMINYKSLLALLFILASWIIFTVFQNSTKVWSALNLSISLHYWNNSTKSLFPKTPLISLKPLTETELRIKEIIEKLDQQIPPRPFTHVNTTTSATHSTATILNPRDTYCRGDQLHILLEVRDHLGRRKQYGGDFLRARMSSPALMAGASGKVTDFNNGTYLVSFTLFWEGQVSLSLLLIHPSEGVSALWSARNQGYDRVIFTGQFVNGTSQVHSECGLILNTNAELCQYLDNRDQEGFYCVRPQHMPCAALTHMYSKNKKVSYLSKQEKSLFERSNVGVEIMEKFNTISVSKCNKETVAMKEKCKFGMTSTIPSGHVWRNTWNPVSCSLATVKMKECLRGKLIYLMGDSTIRQWMEYFKASINTLKSVDLHESGKLQHQLAVDLDRNINIQWQKYCYPLIGSMTYSVKEMEYLTRAIDRTGGEKNTVIVISLGQHFRPFPIDVFIRRALNVHKAIQHLLLRSPDTMVIIKTENIREMYNDAERFSDFHGYIQYLIIKDIFQDLSVSIIDAWDITIAYGTNNVHPPQHVVGNQINILLNYIC

SEQ ID NO: 35282 - protein, 260 aa, Artificial Sequence
  derived and/or modified sequence
MEKFNTISVSKCNKETVAMKEKCKFGMTSTIPSGHVWRNTWNPVSCSLATVKMKECLRGKLIYLMGDSTIRQWMEYFKASINTLKSVDLHESGKLQHQLAVDLDRNINIQWQKYCYPLIGSMTYSVKEMEYLTRAIDRTGGEKNTVIVISLGQHFRPFPIDVFIRRALNVHKAIQHLLLRSPDTMVIIKTENIREMYNDAERFSDFHGYIQYLIIKDIFQDLSVSIIDAWDITIAYGTNNVHPPQHVVGNQINILLNYIC

SEQ ID NO: 35283 - DNA, 1635 bp, Artificial Sequence
  derived and/or modified sequence
atgaaaatctccatgatcaattacaaatccctgctggcactactgtttattctggcatcctggatcattttcaccgtgtttcagaactctaccaaggtgtggtccgcccttaacctatcaatttcattgcactattggaacaactctacaaagtccttgtttccgaaaacccctcttattagtcttaaacccttaacagagacagagctgagaatcaaagagatcatagagaagttggaccagcagattccccctcggcctttcacccatgtcaataccactacatccgcaacacatagcaccgctacgattctcaatcctcgggatacatactgccggggagatcagcttcatatacttctcgaggtgcgggatcacctggggagacgtaagcagtatggtggcgattttctcagggcccgtatgtcctccccagcactgatggctggggctagcggcaaagtgaccgactttaataacgggacatacctcgtgtcgtttaccctgttttgggaggggcaggtgtcattatctctcctgctaatccatcccagcgagggagtaagcgcactgtggtccgctaggaaccagggttacgacagagttatcttcaccggacagtttgtgaacggaaccagccaagtccactccgagtgtggattgatattgaacactaacgctgaactctgccagtacctagataatcgagaccaggaggggttctactgcgtacgccctcagcacatgccctgcgcggcactgacacacatgtacagcaagaataagaaggtctcctacctgagtaagcaggagaagagtctgttcgagcgaagcaacgtgggagtggagatcatggaaaagttcaacaccatctcggtctctaagtgcaacaaggaaacagtcgccatgaaggaaaaatgcaagtttgggatgacttccaccatcccttcaggacacgtgtggcgcaacacatggaatcccgtgtcatgttctctagcaactgtcaaaatgaaggaatgcctgcgaggtaaactgatttacctcatgggtgattcaacaattagacagtggatggaatactttaaagcgagtataaacacgctgaagagtgtagacttacatgagtctgggaaactccagcaccagctggctgtcgatcttgaccggaacattaatatacagtggcagaaatactgttatcccctaattggaagcatgacctattctgttaaagagatggagtatctgacaagagccatcgacaggacgggtggcgagaagaacacagtcatagtcatcagtttaggacagcacttccgaccatttcccatcgacgtgtttatccggagagctcttaatgttcacaaggcaatacaacacctgctgctccggtcccctgatactatggttatcattaaaacagagaatatccgggaaatgtataatgacgcagaacgcttctccgacttccatggctatattcagtatctgattatcaaggacatatttcaagacttgtccgtgtctataatcgatgcttgggacataaccatagcttacggaaccaataacgtgcaccctccacagcacgtagtcggtaatcagatcaatatcctgttaaactacatctgttag

SEQ ID NO: 35284 - DNA, 1687 bp, Artificial Sequence
  derived and/or modified sequence
atccatgctaaaggtaaacaaactgcaacttatatctgcaatttattttggtatagacaagaggtatgccagtagcacactggtggcttcagaagaaattctcaacacctagctcgccagagagtctatgtatgggattgaacaatctgtaaactaaaggatcctaatcatgaaaataagtatgataaattataagtcactattggcactgttgtttatattagcctcctggatcatttttacagttttccagaactccacaaaggtttggtctgctctaaacttatccatctccctccattactggaacaactccacaaagtccttattccctaaaacaccactgatatcattaaagccactaacagagactgaactcagaataaaggaaatcatagagaaactagatcagcagatcccacccagacctttcacccacgtgaacaccaccaccagcgccacacatagcacagccaccatcctcaaccctcgagatacgtactgcaggggagaccagctgcacatcctgctggaggtcaaatgtgggtgtagagattatggaaaaattcaatacaattagtgtctccaaatgcaacaaagaaacagttgcaatgaaagagaaatgcaagtttggaatgacatccacaatccccagtgggcatgtctggagaaacacatggaatcctgtctcctgtagtttggctacagtcaaaatgaaggaatgcctgagaggaaaactcatatacctaatgggagattccacgatccgccagtggatggaatacttcaaagccagtatcaacacactgaagtcagtggatctgcatgaatctggaaaattgcaacaccagcttgctgtggatttggataggaacatcaacatccagtggcaaaaatattgttatcccttgataggatcaatgacctattcagtcaaagagatggagtacctcacccgggccattgacagaactggaggagaaaaaaatactgtcattgttatttccctgggccagcatttcagaccctttcccattgatgtttttatccgaagggccctcaatgtccacaaagccattcagcatcttcttctgagaagcccagacactatggttatcatcaaaacagaaaacatcagggagatgtacaatgatgcagaaagatttagtgactttcatggttacattcaatatctcatcataaaggacattttccaggatctcagtgtgagtatcattgatgcctgggatataacaattgcatatggcacaaataatgtacacccacctcaacatgtagtcggaaatcagattaatatattattaaactatatttgttaaataacacaaaagtctgaaattcattcacttaagtaaaaaaatttattgactgtctactagcaggccagatgctgtgtttggctctgaattcccaactagcaagagcagagaatctacattatggctgatccataagccaccaattcagctaaatgagatgtttctaatctgggcttccacttaaaaataaaactaaaaatactcatgaaaagagcctacccttcttgatcagagccatacccctcttcaccaatgggaagtcaagacacctatgggtaaaagttctctctgatgcatgaaaactcagagtgataaagtaattttaaaataaaaatttggagaaagca

SEQ ID NO: 35285 - DNA, 1635 bp, Artificial Sequence
  derived and/or modified sequence
atgaaaatttcaatgatcaattacaagtctctcctggctttgcttttcattttggcttcgtggataatattcaccgtattccaaaactcgaccaaagtatggagcgcactaaacctgagtatttccctccactactggaacaattcaaccaagtctcttttccccaaaacccccctgatcagtttgaaacccctcaccgagacggaactgaggattaaagaaataatcgagaaattagatcagcagataccaccaagacccttcactcatgtgaataccacaacaagcgctacccactctactgctactattttgaaccctagagacacctactgcaggggagatcagctacatatcttgttggaggttcgtgatcacctgggtcgtaggaaacagtatgggggcgacttcctccgcgcccgcatgtccagccctgcccttatggcaggggcaagcggtaaagtcacggactttaacaatgggacttacttggttagctttacccttttctgggaggggcaagtcagcctctctctactgctcatacatccctctgagggtgtgtcggccctgtggagcgcacgcaatcaaggttacgaccgtgtcatcttcactggtcaatttgtcaacggcacaagtcaggttcattcggaatgcggactcattttaaacactaacgctgaattgtgtcagtacctcgacaacagagatcaagagggtttctattgcgtgagacctcaacacatgccttgcgccgcactgactcacatgtatagcaagaataagaaggtgtcttatttaagcaagcaagagaaatcattgttcgaacggtcaaacgtgggcgtggaaataatggaaaagtttaatacaattagtgtgagcaagtgcaataaggaaaccgtcgctatgaaggaaaaatgtaagttcggcatgacaagcacaattccatcgggacacgtctggaggaatacctggaaccccgtgagctgtagcttggcaacagtgaaaatgaaggagtgcctgcgtggcaagttgatatatctcatgggtgactcaacaattagacagtggatggagtacttcaaggctagtataaataccctcaaatccgtagacttgcatgagagcggcaaacttcagcatcaattggcagtcgacctggaccgtaacatcaacattcagtggcagaagtattgctaccccttaatcgggtccatgacatactcagtgaaagagatggaataccttaccagagcaattgacagaaccggaggcgaaaagaataccgttatagtgatcagcctcgggcaacatttccgtccgtttccgattgatgtcttcatcagacgagcgcttaatgtccacaaggcaattcagcacctgctcttaagatctccagatacaatggtcataatcaaaactgaaaacataagagaaatgtacaatgatgctgaacggttcagcgactttcatggatacatacagtacctgattataaaagacatttttcaggatttatctgtttctataatagatgcgtgggatatcactatcgcgtacggaacaaataacgttcaccctccccagcatgtggtgggaaaccaaataaacattctgttgaattacatctgttag

SEQ ID NO: 35286 - DNA, 1635 bp, Artificial Sequence
  derived and/or modified sequence
atgaaaatcagtatgattaactataagtccctcctggccctcctcttcattctggcatcatggatcattttcaccgtgttccagaactcaactaaagtgtggtcggctctcaacctcagcatttccctccattactggaacaattcaacaaaatctttattccccaaaacacctctgatttctctgaaaccattaacagagactgaactcagaataaaggagattatcgaaaaactagaccaacagattccacctcgtccatttacccatgtcaacactacaacatcagctacccacagtactgctaccattctgaaccctagagacacctactgccggggcgatcaactccatatattgctagaagtgcgggatcatctcggtagaagaaagcaatatggtggcgattttcttcgcgctcggatgagttctcccgctctaatggcaggcgccagcggcaaagtcactgactttaataatgggacttatttggtttccttcacgcttttctgggaagggcaggtttccctgagcctgttgctcatacacccatccgaaggtgttagcgcgctttggagtgccagaaatcaaggctacgacagagtgatcttcactggacagttcgtcaacggtacgtctcaggtccacagcgaatgcgggcttatactgaatacgaatgcagaactgtgtcagtacttggacaaccgggaccaggaaggtttctactgcgtgcgacctcaacacatgccatgtgctgcccttacacacatgtacagcaaaaataaaaaagtttcgtaccttagtaagcaggaaaagtcattgttcgagcgatccaatgtgggcgtagaaattatggaaaagtttaacacgatctccgtctctaagtgcaataaggaaactgtggctatgaaagagaagtgtaaatttgggatgacatccactatcccatctggacatgtgtggcgaaacacctggaatcccgtctcctgctccctggcgaccgtcaaaatgaaagagtgtttgaggggcaaactgatatatcttatgggcgatagcacaatcagacagtggatggaatacttcaaagcctccatcaatacattaaaatcagtggatctgcatgaatctgggaaactccagcaccagctcgcagttgatttagatcggaatattaatatccaatggcaaaagtactgttaccctttaatcggatctatgacttattcagtgaaagaaatggagtaccttacccgggccatagatagaacaggcggggagaaaaataccgttatcgtgatttccctgggtcagcactttcgcccctttcccatcgacgtatttataagacgtgccctaaacgtgcataaggccatccagcacctcctgttgagaagtccagatacaatggtgatcattaagactgagaatatccgcgagatgtacaacgacgctgaacgcttttccgacttccatggctacatccagtacctgattataaaggacatttttcaggacttatcagtcagtattatcgacgcctgggatatcaccatcgcctacggtactaataacgttcaccccccccaacacgtcgtcggcaaccagatcaacatcctgctaaactatatttgttag

SEQ ID NO: 35287 - DNA, 1635 bp, Artificial Sequence
  derived and/or modified sequence
atgaagatcagcatgatcaactacaagagcctgctggccctgctgttcatcctggccagctggatcatcttcaccgtgttccagaacagcaccaaggtgtggagcgccctgaacctgagcatcagcctgcactactggaacaacagcaccaagagcctgttccccaagacccccctgatcagcctgaagcccctgaccgagaccgagctgagaatcaaggagatcatcgagaagctggaccagcagatcccccccagacccttcacccacgtgaacaccaccaccagcgccacccacagcaccgccaccatcctgaaccccagagacacctactgcagaggcgaccagctgcacatcctgctggaggtgagagaccacctgggcagaagaaagcagtacggcggcgacttcctgagagccagaatgagcagccccgccctgatggccggcgccagcggcaaggtgaccgacttcaacaacggcacctacctggtgagcttcaccctgttctgggagggccaggtgagcctgagcctgctgctgatccaccccagcgagggcgtgagcgccctgtggagcgccagaaaccagggctacgacagagtgatcttcaccggccagttcgtgaacggcaccagccaggtgcacagcgagtgcggcctgatcctgaacaccaacgccgagctgtgccagtacctggacaacagagaccaggagggcttctactgcgtgagaccccagcacatgccctgcgccgccctgacccacatgtacagcaagaacaagaaggtgagctacctgagcaagcaggagaagagcctgttcgagagaagcaacgtgggcgtggagatcatggagaagttcaacaccatcagcgtgagcaagtgcaacaaggagaccgtggccatgaaggagaagtgcaagttcggcatgaccagcaccatccccagcggccacgtgtggagaaacacctggaaccccgtgagctgcagcctggccaccgtgaagatgaaggagtgcctgagaggcaagctgatctacctgatgggcgacagcaccatcagacagtggatggagtacttcaaggccagcatcaacaccctgaagagcgtggacctgcacgagagcggcaagctgcagcaccagctggccgtggacctggacagaaacatcaacatccagtggcagaagtactgctaccccctgatcggcagcatgacctacagcgtgaaggagatggagtacctgaccagagccatcgacagaaccggcggcgagaagaacaccgtgatcgtgatcagcctgggccagcacttcagacccttccccatcgacgtgttcatcagaagagccctgaacgtgcacaaggccatccagcacctgctgctgagaagccccgacaccatggtgatcatcaagaccgagaacatcagagagatgtacaacgacgccgagagattcagcgacttccacggctacatccagtacctgatcatcaaggacatcttccaggacctgagcgtgagcatcatcgacgcctgggacatcaccatcgcctacggcaccaacaacgtgcaccccccccagcacgtggtgggcaaccagatcaacatcctgctgaactacatctgctag

SEQ ID NO: 35288 - DNA, 1635 bp, Artificial Sequence
  derived and/or modified sequence
atgaagatatctatgatcaactacaagagccttctggccttactgttcatcctcgccagctggatcatcttcaccgtcttccagaattcgacaaaggtttggtcagctctcaacttaagcatttctctccattactggaataactccacgaaatctctcttccctaaaacccctctgataagtctgaaaccactcaccgaaacagaactgagaattaaggagattatcgaaaaactagaccagcagatcccgccacggccgtttacgcatgtgaacaccacaacttccgctactcattctaccgcaacaatcctaaatccaagagacacgtattgtaggggggaccagctgcatatcctccttgaggtgagagatcacctcggtagaaggaagcagtatgggggcgacttcctgcgcgcccgcatgagctccccagcactgatggccggagcaagcgggaaggtgaccgacttcaataatggaacctatctggtgtctttcacactgttctgggaaggccaagtatccttgtctctgctgctcattcacccctcagaaggagttagcgccctgtggtcagcacggaaccagggctatgaccgagtgatcttcacgggtcaatttgtcaatgggacaagccaggttcacagcgagtgcggcctgatcctgaatactaatgctgagctatgccagtacctggacaaccgagaccaggagggattctactgtgtgcggcctcagcatatgccgtgcgcagccctcacacacatgtactcaaaaaacaagaaagtttcctacttatctaaacaggagaagtctctattcgaaagatccaatgtcggtgttgagataatggaaaaatttaacacaataagcgtgtctaagtgcaacaaggagaccgttgccatgaaagagaaatgtaagttcggcatgacctcgacgattccttctggtcatgtctggagaaacacatggaatccagtgtcttgctcactagcgacagtgaaaatgaaggagtgcctccggggcaagctgatttatcttatgggcgattcaaccatacggcaatggatggaatatttcaaagcttcaattaacacactgaagagtgttgatctccatgaatccgggaagctgcagcaccaacttgctgtcgatcttgaccgtaatataaatatacaatggcaaaaatattgctatcctctgatcggaagcatgacatactctgtgaaggaaatggaatatctgacccgggccatcgaccggactggtggggagaagaataccgtgatagttatatctctgggacagcacttccgcccattccccatcgatgttttcatcaggcgagcccttaacgtacacaaggctatccagcaccttctgctgcggtctcccgacaccatggtcattatcaaaaccgaaaacattcgggaaatgtataatgacgcggagcgattttctgattttcacggctacatacaatacctcatcatcaaagacatctttcaggatctttcggtctccatcattgacgcttgggatatcactattgcgtatggtactaacaatgttcaccctccccagcatgtggtaggtaaccaaattaacatcttgcttaattacatttgctag

SEQ ID NO: 35289 - DNA, 1635 bp, Artificial Sequence
  derived and/or modified sequence
atgaagatctccatgatcaactacaagagcctgctggccctgctcttcatcctggcctcctggatcatcttcaccgtcttccagaacagcaccaaggtgtggagcgccctgaacctgagcatcagcctgcactactggaacaacagcaccaagagcctcttccccaagacccccctcatcagcctgaagcccctgacagaaacagagctgcgcatcaaggagatcatcgagaagctggaccagcagatccccccccggcccttcacccacgtgaacaccaccaccagcgccacccacagcacagccaccatcctgaacccccgggacacctactgccgcggggaccagctgcacatcctgctggaggtgcgggaccacctgggccgcaggaagcagtatggaggagacttcctgcgggccaggatgagcagccctgccctgatggccggggccagcggcaaggtgacagacttcaacaacggcacctacctggtgtccttcaccctcttctgggagggccaggtgtccctgagcctgctgctgatccaccccagcgagggcgtgtctgccctgtggagcgccaggaaccagggctatgacagagtcatcttcaccggccagtttgtgaatggcaccagccaggtgcacagtgaatgtggcctcatcctgaacaccaatgctgagctgtgccagtacctggacaacagagaccaggagggcttctactgtgtgcggccccagcacatgccctgtgccgccctgacccacatgtacagcaagaacaagaaggtgtcctacctgagcaagcaggagaagagcctgtttgagaggagcaatgtgggcgtggagatcatggagaagttcaacaccatctctgtgtccaagtgcaacaaggagaccgtggccatgaaggagaagtgcaagtttggcatgaccagcaccatccccagcggccacgtgtggaggaacacctggaaccctgtgtcctgcagcctggccaccgtgaagatgaaggaatgtctgcggggcaagctgatctacctgatgggagacagcaccatccggcagtggatggagtacttcaaggccagcatcaacaccctgaagtctgtggacctgcacgagagcggcaagctgcagcaccagctggccgtggacctggacaggaacatcaacatccagtggcagaagtactgctaccccctgattggctccatgacctacagcgtgaaggagatggagtacctgacccgggccatcgacagaactggaggagagaagaacacagtgattgtcatcagcctgggccagcacttccggcccttccccattgatgtgttcatcagaagagccctgaatgtgcacaaggccatccagcacctgctgctgcggagcccagacaccatggtgatcatcaagacagagaacatccgggagatgtacaatgatgctgagcgcttcagtgacttccacggctacatccagtacctgatcatcaaggacatcttccaggacctgtctgtgtccatcattgatgcctgggacatcaccatcgcctacggcaccaacaacgtgcaccccccccagcacgtggtgggcaaccagatcaacatcctgctgaactacatctgctag

SEQ ID NO: 35290 - DNA, 1822 bp, Artificial Sequence
  derived and/or modified sequence
agaaggttgtgaatccatgctaaaggtaaacaaactgcaacttatatctgcaatttattttggtatagacaagaggtatgccagtagcacactggtggcttcagaagaaattctcaacacctagctcgccagagagtctatgtatgggattgaacaatctgtaaactaaaggatcctaatcatgaaaataagtatgataaattataagtcactattggcactgttgtttatattagcctcctggatcatttttacagttttccagaactccacaaaggtttggtctgctctaaacttatccatctccctccattactggaacaactccacaaagtccttattccctaaaacaccactgatatcattaaagccactaacagagactgaactcagaataaaggaaatcatagagaaactagatcagcagatcccacccagacctttcacccacgtgaacaccaccaccagcgccacacatagcacagccaccatcctcaaccctcgagatacgtactgcaggggagaccagctgcacatcctgctggaggtgagggaccacttgggacgcaggaagcaatatggcggggatttcctgagggccaggatgtcttccccagcgctgatggcaggtgcttcaggaaaggtgactgacttcaacaacggcacctacctggtcagcttcactctgttctgggagggccaggtctctctgtctctgctgctcatccaccccagtgaaggggtgtcagctctctggagtgcaaggaaccaaggctatgacagggtgatcttcactggccagtttgtcaatggcacttcccaagtccactctgaatgtggcctgatcctaaacacaaatgctgaattgtgccagtacctggacaacagagaccaagaaggcttctactgtgtgaggcctcaacacatgccctgtgctgcactcactcacatgtattctaagaacaagaaagtttcttatcttagcaaacaagaaaagagcctctttgaaaggtcaaatgtgggtgtagagattatggaaaaattcaatacaattagtgtctccaaatgcaacaaagaaacagttgcaatgaaagagaaatgcaagtttggaatgacatccacaatccccagtgggcatgtctggagaaacacatggaatcctgtctcctgtagtttggctacagtcaaaatgaaggaatgcctgagaggaaaactcatatacctaatgggagattccacgatccgccagtggatggaatacttcaaagccagtatcaacacactgaagtcagtggatctgcatgaatctggaaaattgcaacaccagcttgctgtggatttggataggaacatcaacatccagtggcaaaaatattgttatcccttgataggatcaatgacctattcagtcaaagagatggagtacctcacccgggccattgacagaactggaggagaaaaaaatactgtcattgttatttccctgggccagcatttcagaccctttcccattgatgtttttatccgaagggccctcaatgtccacaaagccattcagcatcttcttctgagaagcccagacactatggttatcatcaaaacagaaaacatcagggagatgtacaatgatgcagaaagatttagtgactttcatggttacattcaatatctcatcataaaggacattttccaggatctcagtgtgagtatcattgatgcctgggatataacaattgcatatggcacaaataatgtacacccacctcaacatgtagtcggaaatcagattaatatattattaaactatatttgttaaataaca

SEQ ID NO: 35291 - DNA, 1635 bp, Artificial Sequence
  derived and/or modified sequence
atgaagatcagcatgatcaactacaagagcctgctggccctgctgttcatcctggctagctggatcatcttcaccgttttccagaacagtacaaaggtgtggagtgccctgaacctttctatctccctccactactggaataattcaactaaaagcctgttccccaaaacccctctgattagcttaaagcccctgaccgaaactgagctgcgtataaaggaaattattgagaagctagaccagcagatccctccaaggcctttcacccacgtgaataccaccacaagtgctacacactcaaccgccaccatcctgaatccgagggatacgtattgtaggggggaccagttacatatcctactggaggtcagagaccatcttggaagacgaaagcagtatggcggtgattttttgcgggctaggatgtcttcccccgcacttatggccggcgcgtcaggcaaggtgacagacttcaacaacggtacttatctcgtctcctttactctcttttgggaagggcaggtgagcctgtcactactgttgatccacccgagcgaaggggtgagtgccctgtggtctgcgcggaatcaagggtatgatcgggttattttcactgggcagtttgtcaacggcacctctcaggtgcacagtgaatgcggtctgatcttaaataccaatgcggaactctgtcagtatctagataaccgcgaccaggagggtttctactgcgtgagaccccagcacatgccatgtgccgctctaacccatatgtactctaagaacaagaaggtctcgtatctttcaaagcaagaaaagagtctctttgagcggtcaaatgtcggcgtggagataatggaaaagttcaacaccatctccgttagcaaatgcaataaggagaccgtcgccatgaaggaaaagtgtaaattcggcatgacaagcacgattccaagtgggcatgtgtggaggaatacgtggaacccagtttcttgctcattagccacagttaaaatgaaggagtgtctccggggcaaacttatctatcttatgggcgactccaccattaggcagtggatggagtacttcaaagccagcattaatacactaaaatccgttgatctgcacgagagcgggaaactgcagcaccaactggccgtggatctcgaccggaacattaatatacagtggcagaagtattgttaccctctaatcgggtctatgacctactcagttaaggaaatggagtacctgactagagctatagacagaaccgggggcgaaaagaacacagttattgtgattagccttggtcaacattttcggcctttccctattgatgttttcatccggagggctctcaatgtgcacaaggcgattcagcatctgctcctgcgtagccccgacaccatggtcattataaaaaccgaaaatattcgtgagatgtataatgacgccgagcgcttctctgacttccatgggtacattcagtacctgatcattaaggatatatttcaggacctgtccgttagcatcattgacgcttgggacataactattgcgtatggaacgaataacgtgcacccaccccagcatgtggtgggtaaccagattaacattctcctcaactacatctgttag

SEQ ID NO: 35292 - RNA, 1635 nt, Artificial Sequence
  derived and/or modified sequence
augaaaauuucaaugaucaauuacaagucucuccuggcuuugcuuuucauuuuggcuucguggauaauauucaccguauuccaaaacucgaccaaaguauggagcgcacuaaaccugaguauuucccuccacuacuggaacaauucaaccaagucucuuuuccccaaaaccccccugaucaguuugaaaccccucaccgagacggaacugaggauuaaagaaauaaucgagaaauuagaucagcagauaccaccaagacccuucacucaugugaauaccacaacaagcgcuacccacucuacugcuacuauuuugaacccuagagacaccuacugcaggggagaucagcuacauaucuuguuggagguucgugaucaccugggucguaggaaacaguaugggggcgacuuccuccgcgcccgcauguccagcccugcccuuauggcaggggcaagcgguaaagucacggacuuuaacaaugggacuuacuugguuagcuuuacccuuuucugggaggggcaagucagccucucucuacugcucauacaucccucugagggugugucggcccuguggagcgcacgcaaucaagguuacgaccgugucaucuucacuggucaauuugucaacggcacaagucagguucauucggaaugcggacucauuuuaaacacuaacgcugaauugugucaguaccucgacaacagagaucaagaggguuucuauugcgugagaccucaacacaugccuugcgccgcacugacucacauguauagcaagaauaagaaggugucuuauuuaagcaagcaagagaaaucauuguucgaacggucaaacgugggcguggaaauaauggaaaaguuuaauacaauuagugugagcaagugcaauaaggaaaccgucgcuaugaaggaaaaauguaaguucggcaugacaagcacaauuccaucgggacacgucuggaggaauaccuggaaccccgugagcuguagcuuggcaacagugaaaaugaaggagugccugcguggcaaguugauauaucucaugggugacucaacaauuagacaguggauggaguacuucaaggcuaguauaaauacccucaaauccguagacuugcaugagagcggcaaacuucagcaucaauuggcagucgaccuggaccguaacaucaacauucaguggcagaaguauugcuaccccuuaaucggguccaugacauacucagugaaagagauggaauaccuuaccagagcaauugacagaaccggaggcgaaaagaauaccguuauagugaucagccucgggcaacauuuccguccguuuccgauugaugucuucaucagacgagcgcuuaauguccacaaggcaauucagcaccugcucuuaagaucuccagauacaauggucauaaucaaaacugaaaacauaagagaaauguacaaugaugcugaacgguucagcgacuuucauggauacauacaguaccugauuauaaaagacauuuuucaggauuuaucuguuucuauaauagaugcgugggauaucacuaucgcguacggaacaaauaacguucacccuccccagcauguggugggaaaccaaauaaacauucuguugaauuacaucuguuag

SEQ ID NO: 35293 - RNA, 1635 nt, Artificial Sequence
  derived and/or modified sequence
augaaaaucaguaugauuaacuauaagucccuccuggcccuccucuucauucuggcaucauggaucauuuucaccguguuccagaacucaacuaaaguguggucggcucucaaccucagcauuucccuccauuacuggaacaauucaacaaaaucuuuauuccccaaaacaccucugauuucucugaaaccauuaacagagacugaacucagaauaaaggagauuaucgaaaaacuagaccaacagauuccaccucguccauuuacccaugucaacacuacaacaucagcuacccacaguacugcuaccauucugaacccuagagacaccuacugccggggcgaucaacuccauauauugcuagaagugcgggaucaucucgguagaagaaagcaauaugguggcgauuuucuucgcgcucggaugaguucucccgcucuaauggcaggcgccagcggcaaagucacugacuuuaauaaugggacuuauuugguuuccuucacgcuuuucugggaagggcagguuucccugagccuguugcucauacacccauccgaagguguuagcgcgcuuuggagugccagaaaucaaggcuacgacagagugaucuucacuggacaguucgucaacgguacgucucagguccacagcgaaugcgggcuuauacugaauacgaaugcagaacugugucaguacuuggacaaccgggaccaggaagguuucuacugcgugcgaccucaacacaugccaugugcugcccuuacacacauguacagcaaaaauaaaaaaguuucguaccuuaguaagcaggaaaagucauuguucgagcgauccaaugugggcguagaaauuauggaaaaguuuaacacgaucuccgucucuaagugcaauaaggaaacuguggcuaugaaagagaaguguaaauuugggaugacauccacuaucccaucuggacauguguggcgaaacaccuggaaucccgucuccugcucccuggcgaccgucaaaaugaaagaguguuugaggggcaaacugauauaucuuaugggcgauagcacaaucagacaguggauggaauacuucaaagccuccaucaauacauuaaaaucaguggaucugcaugaaucugggaaacuccagcaccagcucgcaguugauuuagaucggaauauuaauauccaauggcaaaaguacuguuacccuuuaaucggaucuaugacuuauucagugaaagaaauggaguaccuuacccgggccauagauagaacaggcggggagaaaaauaccguuaucgugauuucccugggucagcacuuucgccccuuucccaucgacguauuuauaagacgugcccuaaacgugcauaaggccauccagcaccuccuguugagaaguccagauacaauggugaucauuaagacugagaauauccgcgagauguacaacgacgcugaacgcuuuuccgacuuccauggcuacauccaguaccugauuauaaaggacauuuuucaggacuuaucagucaguauuaucgacgccugggauaucaccaucgccuacgguacuaauaacguucaccccccccaacacgucgucggcaaccagaucaacauccugcuaaacuauauuuguuag

SEQ ID NO: 35294 - protein, 447 aa, Artificial Sequence
  derived and/or modified sequence
MEFTASPKPQLSSRANAFSIAALMSSGGSKEKEATENTIKPLEQFVEKSSCAQPLGELTSLDAHGEFGGGSGSSPSSSSLCTEPLIPTTPIIPSEEMAKIACSLETKELWDKFHELGTEMIITKSGRRMFPTIRVSFSGVDPEAKYIVLMDIVPVDNKRYRYAYHRSSWLVAGKADPPLPARLYVHPDSPFTGEQLLKQMVSFEKVKLTNNELDQHGHIILNSMHKYQPRVHIIKKKDHTASLLNLKSEEFRTFIFPETVFTAVTAYQNQLITKLKIDSNPFAKGFRDSSRLTDIERESVESLIQKHSYARSPIRTYGGEEDVLGDESQTTPNRGSAFTTSDNLSLSSWVSSSSSFPGFQHPQSLTALGTSTASIATPIPHPIQGSLPPYSRLGMPLTPSAIASSMQGSGPTFPSFHMPRYHHYFQQGPYAAIQGLRHSSAVMTPFV

SEQ ID NO: 35295 - DNA, 1344 bp, Artificial Sequence
  derived and/or modified sequence
atggagttcaccgccagccccaagccccagctgagcagcagagccaacgccttcagcatcgccgccctgatgagcagcggcggcagcaaggagaaggaggccaccgagaacaccatcaagcccctggagcagttcgtggagaagagcagctgcgcccagcccctgggcgagctgaccagcctggacgcccacggcgagttcggcggcggcagcggcagcagccccagcagcagcagcctgtgcaccgagcccctgatccccaccacccccatcatccccagcgaggagatggccaagatcgcctgcagcctggagaccaaggagctgtgggacaagttccacgagctgggcaccgagatgatcatcaccaagagcggcagaagaatgttccccaccatcagagtgagcttcagcggcgtggaccccgaggccaagtacatcgtgctgatggacatcgtgcccgtggacaacaagagatacagatacgcctaccacagaagcagctggctggtggccggcaaggccgacccccccctgcccgccagactgtacgtgcaccccgacagccccttcaccggcgagcagctgctgaagcagatggtgagcttcgagaaggtgaagctgaccaacaacgagctggaccagcacggccacatcatcctgaacagcatgcacaagtaccagcccagagtgcacatcatcaagaagaaggaccacaccgccagcctgctgaacctgaagagcgaggagttcagaaccttcatcttccccgagaccgtgttcaccgccgtgaccgcctaccagaaccagctgatcaccaagctgaagatcgacagcaaccccttcgccaagggcttcagagacagcagcagactgaccgacatcgagagagagagcgtggagagcctgatccagaagcacagctacgccagaagccccatcagaacctacggcggcgaggaggacgtgctgggcgacgagagccagaccacccccaacagaggcagcgccttcaccaccagcgacaacctgagcctgagcagctgggtgagcagcagcagcagcttccccggcttccagcacccccagagcctgaccgccctgggcaccagcaccgccagcatcgccacccccatcccccaccccatccagggcagcctgcccccctacagcagactgggcatgcccctgacccccagcgccatcgccagcagcatgcagggcagcggccccaccttccccagcttccacatgcccagataccaccactacttccagcagggcccctacgccgccatccagggcctgagacacagcagcgccgtgatgacccccttcgtgtag

SEQ ID NO: 35296 - DNA, 1344 bp, Artificial Sequence
  derived and/or modified sequence
atggagttcactgcaagccctaagccgcaactgtcatcccgggccaacgcattctctatagccgctctaatgagttcgggaggcagtaaagagaaagaagccaccgagaatactattaaaccgctggagcagtttgtcgaaaagtcctcttgtgcccagcctctcggcgagttaaccagcctggacgcccacggcgaattcggtggtggcagcggcagttctccaagctctagctcactttgtaccgagccccttatcccaaccaccccaatcattccttccgaggagatggccaaaatcgcatgctctttggagacaaaagagctttgggataaatttcacgagctgggcactgagatgatcattaccaagtctgggaggcggatgttccccaccatcagagtgtccttctcgggcgttgaccccgaagcaaagtatattgtgcttatggatatcgtccccgttgacaataagcgataccgttacgcgtatcatagatcctcatggctcgttgctggcaaagcagacccacctctccccgccaggttgtatgttcatcctgactcaccattcactggcgaacaactcttaaagcaaatggtgagctttgaaaaagttaagcttactaacaatgagttagatcagcatggccatatcatactcaactccatgcacaaataccaacctagggtacatatcattaagaaaaaggatcatacagcaagtctactcaatctcaaaagtgaggaatttcgaacgttcatttttcccgagacagtattcacggccgtgactgcctaccagaatcagctgatcaccaagttgaagatagatagtaatccattcgcaaagggattcagagatagttcccggcttactgatatcgaacgcgagagcgtggaatcccttatccaaaagcactcatatgcccgcagcccaatccggacctacggtggtgaagaagatgtgctgggagacgagtcccagaccaccccaaaccgaggttccgccttcactacatctgataacctgtctctgtcaagctgggtttcctcctcttcaagctttcccggtttccagcatccacagtctttaaccgcgctagggacaagcactgcgagtatcgctacccctataccacacccaattcagggctcattaccaccctacagcagactggggatgcccctgactccctctgcaatagcttcctcgatgcagggctctgggcctacattcccctcttttcacatgccacgttatcatcactactttcagcagggaccttacgctgcaatccaggggctgaggcacagttccgcggtgatgaccccctttgtttag

SEQ ID NO: 35297 - DNA, 1344 bp, Artificial Sequence
  derived and/or modified sequence
atggagttcaccgccagccccaagccccagctgagcagccgggccaatgccttcagcattgctgccctgatgagcagcggcggcagcaaggagaaggaggccacagagaacaccatcaagcccctggagcagtttgtggagaagagcagctgtgcccagcccctgggggagctgaccagcctggatgcccacggggagtttggaggcggcagcggcagcagccccagcagcagcagcctgtgcacagagcccctcatccccaccacccccatcatccccagcgaggagatggccaagatcgcctgcagcctggagaccaaggagctgtgggacaagttccacgagctgggcacagagatgatcatcaccaagtctggaagaaggatgttccccaccatccgggtgtccttcagcggcgtggaccctgaggccaagtacatcgtgctgatggacatcgtgcctgtggacaacaagcgctaccgctatgcctaccacaggagctcctggctggtggccggcaaggctgacccccccctgcctgcccggctgtatgtgcacccagacagccccttcaccggggagcagctgctgaagcagatggtgtcctttgagaaggtgaagctgaccaacaatgagctggaccagcacggccacatcatcctgaacagcatgcacaagtaccagccccgggtgcacatcatcaagaagaaggaccacacagccagcctgctgaacctgaagtctgaggagttccgcaccttcatcttccctgagaccgtcttcaccgctgtgacagcctaccagaaccagctgatcaccaagctgaagattgacagcaacccctttgccaagggcttccgggacagcagccggctgacagacatcgagcgggagagcgtggagagcctcatccagaagcacagctatgcccggagccccatccgcacctatggaggagaagaagatgtgctgggagatgagagccagaccacccccaacagaggcagcgccttcaccaccagtgacaacctgagcctgagctcctgggtgagcagcagcagcagcttccctggcttccagcacccccagagcctgacagccctgggcaccagcacagccagcatcgccacccccatcccccaccccatccagggcagcctgcccccctacagccggctgggcatgcccctgacccccagcgccatcgccagctccatgcagggcagcggccccaccttccccagcttccacatgccccgctaccaccactacttccagcagggcccctatgctgccatccagggcctgcggcacagcagcgctgtgatgaccccatttgtgtag

SEQ ID NO: 35298 - DNA, 1344 bp, Artificial Sequence
  derived and/or modified sequence
atggagttcaccgccagccccaagccccagctgagcagccgggccaacgccttctccattgccgccctcatgtcatctggaggctccaaagagaaagaggccaccgaaaacactattaagcctctggaacagttcgtagagaaatcctcttgtgcacagccccttggtgagttgacctccctagacgcacacggggagtttggaggtggttcaggtagttccccaagttcctctagcttgtgcactgagccactcattcctacaactcccattatcccaagcgaggagatggctaagatagcatgtagcctcgagaccaaagagctgtgggataaattccatgagctgggcactgagatgatcattaccaaaagcggcagaagaatgtttcctacgatcagggtgtcattctccggcgtggacccagaagcaaaatatatcgtactgatggatatcgtcccagtcgataacaagaggtaccgttatgcctaccatcgcagctcatggcttgtggctggcaaggccgacccgccgctgcctgccaggttatacgtccacccggatagtcccttcaccggagagcagttactcaaacagatggtttcatttgagaaggtcaagcttaccaataacgaactggaccagcacggtcacattatcctcaatagcatgcacaaataccagccccgggtccacataatcaaaaagaaggaccatactgccagcctgctaaacctcaagtctgaggagttccgaactttcatcttccctgagactgtgtttaccgccgtgacggcctatcagaaccagttgataaccaagttgaaaatcgattccaatccatttgctaagggattccgggattccagccgccttaccgacatcgaacgggagagcgttgaatcccttatccagaagcacagctatgccagatcccctataagaacttacggaggtgaggaagacgtccttggcgacgaatcccagactacaccgaacagaggtagtgcttttacaactagtgataacctttcactgagttcttgggtgagctccagcagtagcttccccggctttcagcacccacagagccttactgctctgggcaccagcactgcttccatcgcgacacctataccacatcccattcaggggtctttgcctccatattcccgcctaggaatgccactcactccttctgccatcgccagttcaatgcagggcagtggtcctacattcccctccttccatatgcctcgatatcaccattatttccagcaagggccttacgcggccattcaaggtctaagacattcgtctgcagtgatgacccccttcgtgtag

SEQ ID NO: 35299 - DNA, 1344 bp, Artificial Sequence
  derived and/or modified sequence
atggaattcacagcatcacctaagccccaactgtcctcgagggctaacgctttctctattgccgcactaatgtcaagtggcggatcaaaagagaaggaagcgaccgaaaacactataaagccacttgagcaattcgtggaaaagtcaagctgtgcccagccactcggcgagttgactagcctggatgcacacggagagttcggaggaggctccggcagtagtccctctagctctagcctatgtaccgagcctttgataccaactacccccatcatcccctctgaggaaatggcaaaaatagcttgttcattagaaacaaaggagctttgggacaagtttcatgagctcggaaccgagatgatcataaccaagagcggacgtcgcatgttccccacgattcgcgtgtctttctcaggggtcgacccagaagcgaaatacatcgtgctgatggacatcgtgcccgtggataataagcgctaccggtacgcctatcataggtctagttggctggtagccggaaaggcagacccaccgctcccggcacggttatatgttcacccagattcccccttcaccggagaacagctgcttaagcaaatggtgtcttttgaaaaggtcaagctgactaataatgaactggatcaacatggccatattattctgaacagcatgcataagtaccagcctagagtgcacatcataaaaaaaaaggatcacactgcttccctcctgaaccttaaatcagaagagttccggacattcatctttcccgaaaccgtgttcacagctgtcacagcatatcagaaccaactgataaccaagctgaaaatcgatagtaacccatttgcaaaaggcttccgggattcttcaagactgacagacattgagcgcgagagcgtggagtccctcattcagaagcatagctacgctcgcagcccaataaggacttacgggggagaggaggacgtgctcggagatgagtcccaaacgactcctaaccgcggttccgcttttaccacaagtgacaacctctctctctcctcatgggtgtcgtcgtcatccagttttccaggctttcagcatccacagtccctgacagctctgggcactagtacagcctccatcgcgactcccatcccgcaccctatccagggctccctgccaccatattccagactggggatgcccctgactccaagtgcaatcgccagcagcatgcagggcagcggaccaacgtttccctcttttcacatgcccagataccatcattactttcagcagggcccttatgctgccattcaggggctgcggcattcatccgcagtgatgacaccattcgtatag

SEQ ID NO: 35300 - DNA, 1871 bp, Artificial Sequence
  derived and/or modified sequence
ggatcgccgccgccagcaaattaaggcgcagggcagcgagcgccagggctcactgtccgtagttccgcgccgcgctccccacgccagcgtcctagcagccgcgctcggctggtggccacctcagcctgggacatcccggctgtccccagccccagagggaggaaggacgcggaggggatgctccaggaccccaggactttgtgcagttgatgctcgtttccgccttcgggctgtgcagactgtcgtcctgccgagcgccccggggcgtgcgcacccgccgtagtgctcggtgggccctctcctctccggctgccttcgaagtctctgcggctctggggctttgcggtggggaatagaggccagtgtgcagctctggagtcgttggagctgacacttctggagtccctggccccgctgtgactgctctcggaaactttgagctgtgtttcgggtctttgtctcccttggggaatctggacggcagttcggacgaccccgtccctggccaggaccgcgtgctggggaccatggagttcacggcgtcccccaagccccaactctcctctcgggccaacgccttctccattgccgcgctcatgtcgagcggcggctctaaggagaaggaggcgacggagaacacaatcaaacccctggagcaatttgtggagaagtcgtcctgtgcccagcccctgggtgagctgaccagcctggatgctcatggggagtttggtggaggcagtggcagcagcccgtcctcctcctctctgtgcactgagccactgatccccaccacccccatcatccccagtgaggaaatggccaaaattgcctgcagcctggagaccaaggagctttgggacaaattccatgagctgggcaccgagatgatcatcaccaagtcgggcaggaggatgtttccaaccatccgggtgtccttttcgggggtggatcctgaggccaagtacatagtcctgatggacatcgtccctgtggacaacaagaggtaccgctacgcctaccaccggtcctcctggctggtggctggcaaggccgacccgccgttgccagccaggctctatgtgcatccagattctccttttaccggtgagcaactactcaaacagatggtgtcttttgaaaaggtgaaactcaccaacaatgaactggatcaacatggccatataattttgaactcaatgcataagtaccagccaagggtgcacatcattaagaagaaagaccacacagcctcattgctcaacctgaagtctgaagaatttagaactttcatctttccagaaacagtttttacggcagtcactgcctaccagaatcaactgataacgaagctgaaaatagatagcaatccttttgccaaaggattccgggattcctccaggctcactgacattgagagggaaagtgtggagagcctgattcaaaagcattcctatgcacgctcacccatccgtacctacggaggagaagaagatgtcttgggggatgagagtcagacaaccccaaatcgagggtcagcctttacaacatctgataatttgtctctcagctcctgggtatcatcttcttccagttttcctgggtttcagcacccacagtccctgactgctcttggcaccagcacagcatccatagcaacacccattcctcaccccatccagggttctctgccaccatatagccgactgggaatgcctctgacaccatcggccattgccagctccatgcaagggagtggccccacattcccttcattccacatgccgcgataccatcactattttcagcaggggccctatgctgccattcaaggactacgccattcctctgctgtgatgacgccatttgtatga

SEQ ID NO: 35301 - protein, 188 aa, Artificial Sequence
  derived and/or modified sequence
MATDVFNSKNLAVQAQKKILGKMVSKSIATTLIDDTSSEVLDELYRVTREYTQNKKEAEKIIKNLIKTVIKLAILYRNNQFNQDELALMEKFKKKVHQLAMTVVSFHQVDYTFDRNVLSRLLNECREMLHQIIQRHLTAKSHGRVNNVFDHFSDCEFLAALYNPFGNFKPHLQKLCDGINKMLDEENI

SEQ ID NO: 35302 - DNA, 567 bp, Artificial Sequence
  derived and/or modified sequence
atggccaccgacgtgttcaacagcaagaacctggccgtgcaggcccagaagaagatcctgggcaagatggtgagcaagagcatcgccaccaccctgatcgacgacaccagcagcgaggtgctggacgagctgtacagagtgaccagagagtacacccagaacaagaaggaggccgagaagatcatcaagaacctgatcaagaccgtgatcaagctggccatcctgtacagaaacaaccagttcaaccaggacgagctggccctgatggagaagttcaagaagaaggtgcaccagctggccatgaccgtggtgagcttccaccaggtggactacaccttcgacagaaacgtgctgagcagactgctgaacgagtgcagagagatgctgcaccagatcatccagagacacctgaccgccaagagccacggcagagtgaacaacgtgttcgaccacttcagcgactgcgagttcctggccgccctgtacaaccccttcggcaacttcaagccccacctgcagaagctgtgcgacggcatcaacaagatgctggacgaggagaacatctag

SEQ ID NO: 35303 - DNA, 567 bp, Artificial Sequence
  derived and/or modified sequence
atggcaactgacgtttttaatagtaagaacttagcagtgcaggcacagaaaaaaattctcgggaagatggtgtcaaagtccatcgctaccacactgatcgatgataccagttcggaggtgctggatgagctataccgcgttacgagggaatacacccaaaacaaaaaggaagccgagaaaattattaaaaaccttattaaaacggtaattaagctggccatactttaccgtaacaaccagttcaatcaggacgagctggccttgatggagaagttcaaaaagaaggtgcatcagcttgctatgactgtcgtgtcctttcaccaggttgactatactttcgaccggaacgtattgtctaggctccttaatgagtgtagggagatgttacaccagatcatacagcggcatttaaccgcaaagtcacacggcagagtgaataacgtgtttgaccactttagcgattgcgagttcctggcagccctgtacaaccccttcggtaacttcaaaccccacctgcagaagctatgcgacggcattaataagatgttggacgaagagaacatctag

SEQ ID NO: 35304 - DNA, 567 bp, Artificial Sequence
  derived and/or modified sequence
atggccacagatgtgttcaacagcaagaacctggccgtgcaggcccagaagaagatcctgggcaagatggtgtccaagagcatcgccaccaccctgattgatgacaccagcagcgaggtgctggatgagctgtacagagtgacccgggagtacacccagaacaagaaggaggccgagaagatcatcaagaacctgatcaagacagtcatcaagctggccatcctgtacagaaacaaccagttcaaccaggatgagctggccctgatggagaagttcaagaagaaggtgcaccagctggccatgacagtggtgtccttccaccaggtggactacacctttgacagaaatgtgctgagccggctgctgaatgaatgtcgggagatgctgcaccagatcatccagaggcacctgacagccaagagccacggccgggtgaacaacgtgtttgaccacttcagtgactgtgagttcctggccgccctgtacaacccctttggaaacttcaagccccacctgcagaagctgtgtgatggcatcaacaagatgctggatgaggagaacatctag

SEQ ID NO: 35305 - DNA, 567 bp, Artificial Sequence
  derived and/or modified sequence
atggccaccgacgtgttcaacagcaagaacctggccgtgcaggcccagaagaaaatcctcggcaaaatggtatcaaaatctatcgccactacgctgatagatgacacctcttcagaggtgttagatgaactgtaccgggtgactcgtgagtacactcagaataaaaaggaggccgagaagattataaaaaatttaatcaagaccgtgattaagcttgcgatcctgtacagaaacaatcagtttaaccaagatgaattagccctgatggagaaattcaagaagaaagttcaccaactggcaatgaccgtcgtgagcttccaccaggtagactacacttttgatcgaaatgtactatcgagactcctcaacgagtgtcgtgaaatgctccatcagattattcagcgacatctgacagcgaaaagccacggaagagttaacaatgtttttgatcacttctctgattgcgaattcctggctgctctctataacccgttcggaaacttcaagccacatttgcagaagctgtgtgacgggatcaataagatgcttgatgaggagaatatttag

SEQ ID NO: 35306 - DNA, 567 bp, Artificial Sequence
  derived and/or modified sequence
atggcaacagatgtctttaatagcaaaaacttggctgtccaagctcagaagaagatccttggcaaaatggtgagcaaatcaatcgccacgactcttatcgatgacacttccagcgaagtgctcgacgaactctacagagtcacacgggaatacacccaaaacaagaaagaggcggagaaaatcatcaaaaatctcatcaagacagtcattaagctggcgattctttatcggaacaaccagttcaatcaggacgaacttgccctgatggagaagtttaagaagaaggtgcatcaactggctatgacggtggtttccttccaccaagtggattatactttcgatagaaacgtcctttcacggttgctgaatgagtgtagggagatgctacaccagatcattcaaagacatctaaccgcaaagagtcacggcagggtcaataacgtgttcgatcatttctccgattgcgagttccttgccgcactttacaacccttttggcaattttaaacctcacctgcagaaactttgtgatggaatcaacaaaatgctggatgaggaaaacatctag

SEQ ID NO: 35307 - DNA, 795 bp, Artificial Sequence
  derived and/or modified sequence
gacctcccggctcctccccggcctgcccgccacacccttggtccctcctgcaagttccgcccctggcctctgcctccttttctcccgccggctctaacccgcgcttggctaaggtccgcgggaacccgtgagccaccgagagagcagagaactcggcgccgccaaacagcccagctcgcgcttcagcgtcccggcgccgtcgcgccactcctccgatggccacagatgtctttaattccaaaaacctggccgttcaggcacaaaagaagatcttgggtaaaatggtgtccaaatccatcgccaccaccttaatagacgacacaagtagtgaggtgctggatgagctctacagagtgaccagggagtacacccaaaacaagaaggaggcagagaagatcatcaagaacctcatcaagacagtcatcaagctggccattctttataggaataatcagtttaatcaagatgagctagcattgatggagaaatttaagaagaaagttcatcagcttgctatgaccgtggtcagtttccatcaggtggattatacctttgaccggaatgtgttatccaggctgttaaatgaatgcagagagatgctgcaccaaatcattcagcgccacctcactgccaagtcacatggacgggttaataatgtgtttgatcatttttcagattgtgaatttttggctgccttgtataatccttttgggaattttaaaccccacttacaaaaactatgtgatggtatcaacaaaatgttggatgaagagaacatatgagcacatgagttaa

SEQ ID NO: 35308 - protein, 163 aa, Artificial Sequence
  derived and/or modified sequence
MEGDDCEFRYGDGTNEAQDNDFPTVERSRLQEMLSLLGLETYQVQKLSLQDSLQISFDSMKNWAPQVPKDLPWNFLRKLQALNADARNTTMVLDVLPDARPVEKESQMEEEIIYWDPADDLAADIYSFSELPTPDTPVNPLDLLCALLLSSDSFLQQEIALKM

SEQ ID NO: 35309 - protein, 931 aa, Artificial Sequence
  derived and/or modified sequence
MASPGIEVELLGKGHSDLGEVAPEIKASERRTAVAIADLEWREMEGDDCEFRYGDGTNEAQDNDFPTVERSRLQEMLSLLGLETYQVQKLSLQDSLQISFDSMKNWAPQVPKDLPWNFLRKLQALNADARNTTMVLDVLPDARPVEKESQMEEEIIYWDPADDLAADIYSFSELPTPDTPVNPLDLLCALLLSSDSFLQQEIALKMALCQFALPLVLPDSENHYHTFLLWAMRGIVRTWWSQPPRGMGSFREDSVVLSRAPAFAFVRMDVSSNSKSQLLNAVLSPGHRQWDCFWHRDLNLGTNAREISDGLVEISWFFPSGREDLDIFPEPVAFLNLRGDIGSHWLQFKLLTEISSAVFILTDNISKKEYKLLYSMKESTTKYYFILSPYRGKRNTNLRFLNKLIPVLKIDHSHVLVKVSSTDSDSFVKRIRAIVGNVLRAPCRRVSVEDMAHAARKLGLKVDEDCEECQKAKDRMERITRKIKDSDAYRRDELRLQGDPWRKAAQVEKEFCQLQWAVDPPEKHRAELRRRLLELRMQQNGHDPSSGVQEFISGISSPSLSEKQYFLRWMEWGLARVAQPRLRQPPETLLTLRPKHGGTTDVGEPLWPEPLGVEHFLREMGQFYEAESCLVEAGRLPAGQRRFAHFPGLASELLLTGLPLELIDGSTLSMPVRWVTGLLKELHVRLERRSRLVVLSTVGVPGTGKSTLLNTMFGLRFATGKSCGPRGAFMQLITVAEGFSQDLGCDHILVIDSGGLIGGALTSAGDRFELEASLATLLMGLSNVTVISLAETKDIPAAILHAFLRLEKTGHMPNYQFVYQNLHDVSVPGPRPRDKRQLLDPPGDLSRAAAQMEKQGDGFRALAGLAFCDPEKQHIWHIPGLWHGAPPMAAVSLAYSEAIFELKRCLLENIRNGLSNQNKNIQQLIELVRRL

SEQ ID NO: 35310 - protein, 122 aa, Artificial Sequence
  derived and/or modified sequence
MEGDDCEFRYGDGTNEAQDNDFPTVERSRLQEMLSLLGLETYQVQKLSLQDSLQISFDSMKNWAPQVPKDLPWNFLRKLQALNADARNTTMVLDVLPDARPVEKESQMEEEIIYWDPADDLA

SEQ ID NO: 35311 - DNA, 2796 bp, Artificial Sequence
  derived and/or modified sequence
atggccagccccggcatcgaggtggagctgctgggcaagggccacagcgacctgggcgaggtggcccccgagatcaaggccagcgagagaagaaccgccgtggccatcgccgacctggagtggagagagatggagggcgacgactgcgagttcagatacggcgacggcaccaacgaggcccaggacaacgacttccccaccgtggagagaagcagactgcaggagatgctgagcctgctgggcctggagacctaccaggtgcagaagctgagcctgcaggacagcctgcagatcagcttcgacagcatgaagaactgggccccccaggtgcccaaggacctgccctggaacttcctgagaaagctgcaggccctgaacgccgacgccagaaacaccaccatggtgctggacgtgctgcccgacgccagacccgtggagaaggagagccagatggaggaggagatcatctactgggaccccgccgacgacctggccgccgacatctacagcttcagcgagctgcccacccccgacacccccgtgaaccccctggacctgctgtgcgccctgctgctgagcagcgacagcttcctgcagcaggagatcgccctgaagatggccctgtgccagttcgccctgcccctggtgctgcccgacagcgagaaccactaccacaccttcctgctgtgggccatgagaggcatcgtgagaacctggtggagccagccccccagaggcatgggcagcttcagagaggacagcgtggtgctgagcagagcccccgccttcgccttcgtgagaatggacgtgagcagcaacagcaagagccagctgctgaacgccgtgctgagccccggccacagacagtgggactgcttctggcacagagacctgaacctgggcaccaacgccagagagatcagcgacggcctggtggagatcagctggttcttccccagcggcagagaggacctggacatcttccccgagcccgtggccttcctgaacctgagaggcgacatcggcagccactggctgcagttcaagctgctgaccgagatcagcagcgccgtgttcatcctgaccgacaacatcagcaagaaggagtacaagctgctgtacagcatgaaggagagcaccaccaagtactacttcatcctgagcccctacagaggcaagagaaacaccaacctgagattcctgaacaagctgatccccgtgctgaagatcgaccacagccacgtgctggtgaaggtgagcagcaccgacagcgacagcttcgtgaagagaatcagagccatcgtgggcaacgtgctgagagccccctgcagaagagtgagcgtggaggacatggcccacgccgccagaaagctgggcctgaaggtggacgaggactgcgaggagtgccagaaggccaaggacagaatggagagaatcaccagaaagatcaaggacagcgacgcctacagaagagacgagctgagactgcagggcgacccctggagaaaggccgcccaggtggagaaggagttctgccagctgcagtgggccgtggacccccccgagaagcacagagccgagctgagaagaagactgctggagctgagaatgcagcagaacggccacgaccccagcagcggcgtgcaggagttcatcagcggcatcagcagccccagcctgagcgagaagcagtacttcctgagatggatggagtggggcctggccagagtggcccagcccagactgagacagccccccgagaccctgctgaccctgagacccaagcacggcggcaccaccgacgtgggcgagcccctgtggcccgagcccctgggcgtggagcacttcctgagagagatgggccagttctacgaggccgagagctgcctggtggaggccggcagactgcccgccggccagagaagattcgcccacttccccggcctggccagcgagctgctgctgaccggcctgcccctggagctgatcgacggcagcaccctgagcatgcccgtgagatgggtgaccggcctgctgaaggagctgcacgtgagactggagagaagaagcagactggtggtgctgagcaccgtgggcgtgcccggcaccggcaagagcaccctgctgaacaccatgttcggcctgagattcgccaccggcaagagctgcggccccagaggcgccttcatgcagctgatcaccgtggccgagggcttcagccaggacctgggctgcgaccacatcctggtgatcgacagcggcggcctgatcggcggcgccctgaccagcgccggcgacagattcgagctggaggccagcctggccaccctgctgatgggcctgagcaacgtgaccgtgatcagcctggccgagaccaaggacatccccgccgccatcctgcacgccttcctgagactggagaagaccggccacatgcccaactaccagttcgtgtaccagaacctgcacgacgtgagcgtgcccggccccagacccagagacaagagacagctgctggacccccccggcgacctgagcagagccgccgcccagatggagaagcagggcgacggcttcagagccctggccggcctggccttctgcgaccccgagaagcagcacatctggcacatccccggcctgtggcacggcgccccccccatggccgccgtgagcctggcctacagcgaggccatcttcgagctgaagagatgcctgctggagaacatcagaaacggcctgagcaaccagaacaagaacatccagcagctgatcgagctggtgagaagactgtag

SEQ ID NO: 35312 - DNA, 2796 bp, Artificial Sequence
  derived and/or modified sequence
atggctagccccggaatagaagtggagttactcggaaaaggacactccgatctaggagaggtggcgccagagatcaaggcatccgagaggaggaccgccgtggcgatcgctgacctggaatggcgggagatggaaggtgatgattgcgaatttaggtatggtgacggaacgaacgaggcccaggataacgacttcccaaccgttgaaagatctcgactccaggaaatgctgagcttattaggtctggagacgtatcaggtgcagaagctttcactccaggactctctgcagatcagctttgattcaatgaaaaactgggctcctcaggttcccaaggatctgccctggaatttccttcgcaagttacaggcactgaacgctgatgcacgcaatacaacgatggtcctggacgtattgccagatgcacgaccggtggaaaaggaatcacagatggaggaggagataatatactgggatcccgctgacgacctggccgctgacatctatagcttttcggaactgcccacccccgatacgccagtgaatccgctggatctgctttgcgccctgcttttgagctcggactcctttctgcaacaagaaatcgccctcaaaatggcactatgtcagttcgccctccctctggtcctgcccgactctgaaaatcattaccacaccttcctcctgtgggcaatgaggggaattgttcgcacctggtggagtcaaccaccgaggggcatgggttcattccgggaagattccgtcgtgctgagccgtgcccccgctttcgccttcgtcagaatggatgtgagcagcaatagtaagtcccaactcctgaacgctgtcctgtcaccaggccatagacagtgggattgcttttggcaccgggaccttaacctcggaacaaacgcacgcgaaatatcagatggcttggtagagatctcttggttctttccttccggccgagaagacctagacatatttccagagccagtcgcctttctgaatctgagaggtgacatcggtagtcactggttgcagtttaagttgctcacagagatatcctccgccgtgtttatcctcactgacaacatctcgaaaaaggaatataagctgctttattctatgaaggagtctaccactaaatactactttattctgagcccttatcgcggtaaaaggaacaccaacctgcggtttctcaacaagttgatacccgtcctgaaaatcgatcactcacacgtgctggttaaggtttcatccactgactcggatagcttcgtgaaaagaatcagagcgatcgtcggtaatgttctgcgagccccctgcagacgggtctcagtggaggacatggcacacgccgctcgcaaactcgggcttaaagtagacgaggactgtgaggaatgtcagaaggccaaggaccgtatggaacgcattactagaaaaattaaagattcagacgcctatcggcgagatgaactcagacttcagggagacccatggagaaaagccgctcaagtagagaaagagttctgtcagctgcagtgggccgtggatcccccagagaaacaccgggcggaactcagaagacggcttctggagctgcgcatgcagcagaacggacacgatccatcctcaggcgtacaggaattcatctcaggcatttcctccccctccctctctgagaagcagtactttcttcgttggatggagtggggactggcaagagttgcccaaccacgcctgagacaaccccctgagaccctgctgacattgcggcctaagcacggtgggactactgatgtcggggagcccctgtggcccgagcccctgggcgtggagcactttttgagagaaatgggacagttttatgaagccgagtcttgcctggtggaggcagggaggctccccgccggccaacggcgatttgcccactttcctggcttggcgtctgaacttttattgacaggtctccccctggaactgatcgatgggtcgaccctttctatgcctgtccggtgggtcacaggactcctcaaggagctccatgtgaggctggagaggcgctcccgtcttgtggtcctctctactgtgggtgtccctggcactggcaagtctacgctgctgaacacaatgttcggtctacggttcgctacaggcaaatcttgcggcccccgtggagcttttatgcaactgattaccgtggccgaaggattctctcaagacctcgggtgcgaccacatcctggtgatcgactcgggcgggttgataggcggtgcgttaacttctgctggtgacaggtttgagctggaagcctcactggcaactctcctcatgggactcagcaacgtgaccgtgatttcacttgccgaaacgaaggatataccggccgctattctgcatgccttcctccggttagagaaaaccggtcacatgcctaattatcagtttgtataccaaaatctgcacgatgtgtccgttccggggccacgacccagagacaagcggcaactgcttgaccccccaggcgatctgtcaagggccgctgctcagatggagaagcagggggatggctttcgtgcccttgccggcctggctttctgtgatcctgagaagcaacacatttggcacattcccggattgtggcacggggcacctcccatggccgccgtgtccctggcctactcggaggctatttttgagttgaagcgctgccttcttgagaacataaggaacggacttagcaatcagaataagaacatccagcaattaattgaacttgtgagaagactctag

SEQ ID NO: 35313 - DNA, 2796 bp, Artificial Sequence
  derived and/or modified sequence
atggccagccctggcatcgaggtggagctgctgggcaagggccacagcgacctgggggaggtggcccctgagatcaaggccagcgagaggagaacagctgtggccatcgctgacctggagtggagggagatggagggagatgactgtgagttccgctatggagatggcaccaatgaggcccaggacaatgacttccccaccgtggagaggagccggctgcaggagatgctgagcctgctgggcctggagacctaccaggtgcagaagctgagcctgcaggacagcctgcagatcagctttgacagcatgaagaactgggccccccaggtgcccaaggacctgccctggaacttcctgaggaagctgcaggccctgaatgctgatgccaggaacaccaccatggtgctggatgtgctgcctgatgcccggcctgtggagaaggagagccagatggaggaggagatcatctactgggaccctgcagatgacctggccgctgacatctacagcttcagcgagctgcccaccccagacacccctgtgaaccccctggacctgctgtgtgccctgctgctgagcagtgacagcttcctgcagcaggagatcgccctgaagatggccctgtgccagtttgccctgcccctggtgctgcctgacagcgagaaccactaccacaccttcctgctgtgggccatgaggggcatcgtgaggacctggtggagccagcccccccggggcatgggcagcttccgggaggacagcgtggtgctgagccgggccccagcctttgcctttgtgaggatggatgtgagcagcaacagcaagagccagctgctgaatgctgtgctgagccctggccaccggcagtgggactgcttctggcaccgggacctgaacctgggcaccaatgcccgggagatcagtgatggcctggtggagatctcctggttcttccccagcggccgggaggacctggacatcttccctgagcctgtggccttcctgaacctgcggggggacatcggcagccactggctgcagttcaagctgctgacagagatcagcagcgctgtgttcatcctgacagacaacatcagcaagaaggagtacaagctgctgtacagcatgaaggagagcaccaccaagtactacttcatcctgagcccctaccggggcaagaggaacaccaacctgcgcttcctgaacaagctgatccctgtgctgaagattgaccacagccacgtgctggtgaaggtgagcagcacagacagcgacagctttgtgaagaggatccgggccatcgtgggcaatgtgctgcgggccccctgccggcgggtgtctgtggaggacatggcccacgccgccaggaagctgggcctgaaggtggatgaggactgtgaggagtgccagaaggccaaggacaggatggagcgcatcaccaggaagatcaaggacagtgatgcctacagaagagatgagctgcggctgcagggcgacccctggaggaaggccgcccaggtggagaaggagttctgccagctgcagtgggccgtggaccccccagagaagcacagagctgagctgcggcggcggctgctggagctgaggatgcagcagaatggacatgaccccagcagcggcgtgcaggagttcatcagcggcatcagcagccccagcctgtctgagaagcagtacttcctgcgctggatggagtggggcctggcccgggtggcccagccccggctgcggcagcccccagagaccctgctgaccctgcggcccaagcacggcggcaccacagatgtgggggagcccctgtggccagagcccctgggcgtggagcacttcctgcgggagatgggccagttctatgaggccgagagctgcctggtggaggccggccgcctgcctgctggccagaggagatttgcccacttccctggcctggccagcgagctgctgctgaccggcctgcccctggagctgattgatggcagcaccctgtccatgcctgtgcgctgggtgacaggcctgctgaaggagctgcacgtgcggctggagcggcgcagccggctggtggtgctgagcacagtgggcgtgcccggcaccgggaagagcaccctgctgaacaccatgtttggcctgcgctttgccaccgggaagagctgtggccccaggggggccttcatgcagctgatcaccgtggccgagggcttcagccaggacctgggctgtgaccacatcctggtgattgattctgggggcctgattggaggagccctgaccagcgctggggacagatttgagctggaggccagcctggccaccctgctgatgggcctgagcaatgtgaccgtcatcagcctggccgagaccaaggacatcccagctgccatcctgcacgccttcctgcggctggagaagacaggccacatgcccaactaccagtttgtgtaccagaacctgcatgatgtgtctgtgcccggcccccggccccgggacaagaggcagctgctggaccccccaggggacctgagcagagctgctgcccagatggagaagcagggagatggcttccgggccctggccggcctggccttctgtgaccctgagaagcagcacatctggcacatccctggcctgtggcatggagccccacccatggctgctgtgtccctggcctacagcgaggccatctttgagctgaagcgctgcctgctggagaacatcagaaatggcctgagcaaccagaacaagaacatccagcagctgattgagctggtgcggcggctgtag

SEQ ID NO: 35314 - DNA, 2796 bp, Artificial Sequence
  derived and/or modified sequence
atggccagccccggcatcgaggtggagctgctgggcaagggccactccgacctgggcgaggtggcccctgaaataaaagcttcagagagaagaacagccgtggcgatcgcagaccttgagtggcgggagatggagggtgacgactgcgaattcaggtatggggatgggacaaacgaggctcaggataatgacttccccactgtggagagaagcaggctacaggagatgctgagcttactcggcctagaaacataccaggtgcaaaaactgagtttacaagattcattacagatctcctttgatagtatgaagaattgggcccctcaagtacccaaagatttgccgtggaacttcctgcggaagttacaagcactcaacgcggacgcgcggaatactacaatggtgcttgacgtgctcccagacgcccgacccgtggagaaggagagccagatggaggaagaaatcatttattgggaccctgccgacgaccttgctgctgacatctacagtttttcagagttacccactccagatacaccggtgaaccctctggatctgctttgcgcccttttactctctagcgattcctttttacagcaggaaattgctctgaagatggcactgtgtcagttcgcgctccccctcgtactgccagacagtgagaatcactaccacaccttcctgctgtgggccatgcggggtattgtaaggacttggtggagtcagccccctcgcgggatggggtcgtttcgggaggatagcgtggtactcagccgggccccagcattcgccttcgtccggatggatgtatctagcaactcaaagtctcagctgttaaacgctgtgctgagccctggccacaggcagtgggactgtttttggcaccgcgatctaaacctggggacaaatgccagagaaattagcgatggattggttgagattagctggttttttccatcgggtcgcgaagatctggatatattccccgagcccgtggcattcttgaatctcagaggagacataggatcccattggctgcagttcaagttactcactgagatctcatcagctgtattcattttgacggataacatctccaaaaaagaatacaaactgttgtattctatgaaagaatcgaccactaagtattatttcatcctctcgccttaccgagggaagcgaaatacaaatctgcgctttctcaacaaactgatccccgtcctcaagatcgaccactctcacgtcttggtcaaggtctcatccaccgacagtgactcattcgtcaaacggatcagagctatcgtggggaacgtgctccgtgcaccgtgccgtagggtgagcgtggaagatatggcacatgccgcccgcaagctcggcctgaaagtcgatgaggattgcgaggagtgccagaaggctaaagacagaatggagaggatcactcgaaagatcaaagactccgacgcgtaccggcgcgatgagcttaggttgcagggagatccatggaggaaagcagcccaggtcgagaaagagttctgccagctgcagtgggccgtcgacccgccagaaaaacacagggccgaattacgaagaaggctgttagagctccggatgcagcagaatgggcatgaccccagctccggtgtccaggagttcattagcgggatttcttctccgagtctaagtgagaagcaatatttcttgagatggatggagtggggacttgcccgtgtggcacagcctcggctcaggcagcctcctgagacacttctgaccctgcgccctaagcacggtggtacgacagacgtcggcgaacccctgtggccagaacccttgggagttgaacactttttgcgggagatgggacagttttatgaagctgagtcttgtctcgttgaggccgggcgcttacccgccggacagcgccgctttgctcacttccctgggttagcatccgagctcctgctgactggccttcctctagaacttatcgatggcagcaccctgagcatgccggtgcgctgggttactggcttgctgaaggaactgcacgtgagactggagagacggtcacgacttgtggttttatccacagtaggagtcccaggcacggggaaatctaccttgttgaatactatgttcggactacgctttgccactggcaaaagctgtgggcctagaggcgcttttatgcagctgattaccgtggccgaggggttttctcaggatcttggctgcgaccacatccttgtgatcgattccggaggattgataggaggcgctctcactagtgccggggatagatttgagttagaggcttcattggccaccctcctgatggggctgagcaatgtgaccgtgatcagtttggcagagaccaaagacatccccgctgccattctgcacgccttcttgcggttagagaagaccggacatatgccaaattaccagttcgtctaccagaaccttcacgatgtctcagtaccaggtcctcgaccacgggataagagacagttgctggacccacccggtgacctgtctcgggccgctgctcaaatggagaagcaaggagacgggttccgcgcactcgccgggctcgcattttgcgatccagagaaacagcacatctggcatatcccaggcctgtggcatggggccccacccatggctgctgtatcacttgcttattctgaggccattttcgaactcaagcggtgcctgttagaaaacatacgcaacggtttgtccaaccagaataagaacattcagcagctaatcgagttggtcagaaggctatag

SEQ ID NO: 35315 - DNA, 2796 bp, Artificial Sequence
  derived and/or modified sequence
atggcgagccccggaattgaggtggaacttttggggaagggacactccgacctgggggaggttgccccagagatcaaggctagcgaaagaagaaccgccgttgcaatcgcagatctggaatggcgagagatggagggagatgattgcgagttcagatacggcgacggaacaaatgaagctcaggacaacgacttcccaactgtggaacggtcccgcctgcaggaaatgctgtcgttgctgggcctggagacatatcaggtgcagaagctcagtctgcaggactcactccaaatatctttcgacagcatgaaaaattgggcccctcaagtccctaaggatctgccttggaatttcctccggaagctccaggccctgaacgccgatgccaggaacacaactatggttctggacgttctccctgatgctaggccagttgagaaggaaagccaaatggaggaggaaattatctactgggatcccgcagatgatttagcagctgatatatattccttttcagagctgcctacccccgacacccctgtgaaccccctagatctcttatgcgccttgttgctgagttccgattcttttttgcagcaggagattgcactcaaaatggcactttgtcagttcgcgctgcctttggtcttgccagacagtgagaaccattaccacacgttcctcctctgggcgatgcgaggcatagtcaggacctggtggtctcagccccctagggggatgggcagttttcgggaggatagtgtcgtccttagcagggcccctgccttcgcctttgtccggatggacgtatcaagcaattccaagtctcagctgctgaatgctgtcctgagcccgggtcatcgccagtgggattgtttctggcatcgcgatttgaacctcggcaccaatgcccgagagattagcgatggattagtcgagataagttggtttttccctagtgggcgagaggatctggatatttttccagaaccagtggcctttctcaatctacgcggtgatatcggttcgcactggttacaattcaaacttctcaccgaaattagcagtgccgtgtttatcttaacagataacataagcaaaaaagagtacaagctgctctactccatgaaagagtctactactaaatactatttcattctttccccatatcggggtaagcggaacaccaaccttaggtttctgaataagctcatccctgtactgaagatagaccacagtcacgtactggtgaaagtttcctcaacggatagcgactctttcgttaaaaggattagggcaattgtggggaacgtacttcgtgcaccctgcagacgggttagcgtcgaggatatggctcacgccgcacgaaagttgggactcaaggtcgacgaggattgtgaggaatgccagaaggccaaggaccgcatggagcgcattacgcgaaagattaaagattctgatgcatatagacgggatgaactgcgcctacaaggagacccctggcgaaaggctgcccaggtggaaaaagaattctgccagcttcagtgggcggtggaccccccagagaagcacagagcagagcttcgccgacggttactggaactgcggatgcagcagaatggtcatgatccgtcctctggagtgcaggagttcatttctggcatctctagtcctagcctgagcgaaaagcagtactttttaaggtggatggagtggggtctagcacgcgtcgcccagcccagactgaggcagccacctgagaccttgttaaccctgcggccaaaacacggcggtacaactgacgtgggggagccactctggccagagccactgggtgtggagcactttctaagggagatgggccagttttacgaagctgagagttgcttagttgaggccggaagactacccgctgggcagcgccgttttgcccactttcctggcctcgccagcgagctgcttctgacgggattaccccttgagttaatcgacgggtcaacgttgtccatgccagtcaggtgggtcaccggcctgctgaaagaactgcatgttcggcttgagcggcgaagtcgcttagtcgtgctgagtacagtgggcgtgcccggaacagggaaaagtaccctgctgaacacaatgtttggcctgcgattcgccaccgggaaatcctgtgggccaaggggtgcgttcatgcagctgattactgtcgccgagggtttttctcaagatctcggctgcgatcacatactggtgattgattctggaggactgatcggcggagccctgactagcgctggtgaccggtttgagctggaggcctccctggcaactctgctgatgggcctttccaatgtcacagtgatttcacttgccgaaaccaaagacattcccgcagccatcctgcacgcctttttgcgacttgaaaagactggccacatgcccaactaccagtttgtatatcagaacctgcatgatgtgagcgtccccggtcctcgccctcgcgataagcggcagcttctggatcctcccggagatctaagccgcgcagctgcacaaatggaaaagcagggagacggattcagggcattggcaggactcgcattctgcgaccctgagaaacagcacatctggcacattcccggactctggcatggcgcacccccaatggcagccgtgtcactcgcttatagtgaggctatctttgagctgaaacggtgtctcttagaaaacattagaaatggcctcagcaaccaaaataagaacatccagcagctgattgagctggttaggaggctgtag

SEQ ID NO: 35316 - DNA, 885 bp, Artificial Sequence
  derived and/or modified sequence
actgtggggccgtcgtcgccgcgtgccgagcgtcctggcgcggccgaggggaagcagcggggctgcccgggttacgctggccacccgcacctggtcctgtggcttcgaccactagtcagcaaggccccggagaggccagcgaagaggaggggctcgttggctttacggagacgcgcggagcaccctcaaggtgccacacgctcgcctgctccctgttcctacatcctgggcgtcttcccaggctgtcatataactcctgagaatagtggttcttaactctgatagaagtggaattactgggcaaagggcattcagatttgggagaagtagccccagaaataaaagcatcagagagacgaacagctgtggccattgcagatttggaatggagagaaatggaaggagatgattgcgagttccgttatggagatggtacaaatgaggctcaggacaatgattttccaacagtggagagaagcaggcttcaagaaatgctgtcacttttgggcctagagacgtaccaggtccagaaactcagcctccaggactctctgcagatcagttttgacagtatgaagaactgggcccctcaggttcccaaagacttgccctggaatttcctcaggaagttgcaggccctcaatgctgatgccaggaataccactatggtgctggacgtgctcccagacgccaggcctgtggagaaggagagccagatggaagaggagatcatctactgggacccagctgatgaccttgctgccgacatttattccttttctgagctgcccacccctgatacgccagtgaaccccttagaccttctctgtgccctgctgctctcctcagacagtttcctgcaacaagaaatagcgttgaaaatgg

SEQ ID NO: 35317 - DNA, 3596 bp, Artificial Sequence
  derived and/or modified sequence
cggccgcgcggaggaagcgaaggaggcgggagcggagacctcgctgcgctcatggcgtcgcccggaagtggaattactgggcaaagggcattcagatttgggagaagtagccccagaaataaaagcatcagagagacgaacagctgtggccattgcagatttggaatggagagaaatggaaggagatgattgcgagttccgttatggagatggtacaaatgaggctcaggacaatgattttccaacagtggagagaagcaggcttcaagaaatgctgtcacttttgggcctagagacgtaccaggtccagaaactcagcctccaggactctctgcagatcagttttgacagtatgaagaactgggcccctcaggttcccaaagacttgccctggaatttcctcaggaagttgcaggccctcaatgctgatgccaggaataccactatggtgctggacgtgctcccagacgccaggcctgtggagaaggagagccagatggaagaggagatcatctactgggacccagctgatgaccttgctgccgacatttattccttttctgagctgcccacccctgatacgccagtgaaccccttagaccttctctgtgccctgctgctctcctcagacagtttcctgcaacaagaaatagcgttgaaaatggccctctgccagtttgcactcccactcgtgttgcctgactcggagaaccactaccatacatttctgctgtgggccatgcggggcattgtgaggacatggtggtcccagcccccaaggggcatggggagcttccgggaagacagcgtggtcttgtccagggcgcccgccttcgccttcgtgcgcatggacgtcagtagcaactccaagtcccagcttctcaacgccgtcctcagcccgggccacaggcagtgggactgcttctggcatcgggacctcaacttgggcaccaatgcccgggagatttcggatgggttggtagaaatttcctggttttttcccagcggaagggaggacttggacattttcccagaacctgtggcctttctgaacctgagaggtgacatcgggtctcactggctgcagtttaagctcttgacagaaatctcctccgctgtgtttatattgactgacaatatcagtaagaaggaatacaaattgctgtactccatgaaggagtcaaccacaaaatactacttcatcctgagtccctaccgtgggaagcgcaacacaaacctgagatttctgaataagttaattcctgtgctgaaaatagaccactcacatgtcctggtaaaggtcagcagcactgacagcgacagcttcgtgaagaggatccgggccatcgttgggaatgtgctgcgggcaccctgcaggcgggtatctgtggaggacatggcgcacgcagcccgcaaactgggcctaaaggtcgacgaggactgtgaggagtgtcagaaagcgaaagaccggatggagaggattaccaggaaaatcaaagactcggatgcctacagaagggacgagctgaggctgcagggggacccctggagaaaggcagcccaagtggagaaggagttctgccagctccagtgggccgtggacccccctgagaagcacagggctgagctgaggcggcggctgctagaacttcgaatgcagcagaacggccatgatccctcctcgggggtgcaggagttcatctcggggatcagcagcccctccttgagtgagaagcagtacttcctgaggtggatggagtggggcctggcacgggtggcccagccgcgactgagacagcctccggagacgcttctcaccctgagaccaaagcatgggggcaccacagacgtgggggagccgctctggcctgagcccctaggggtggaacacttcttgcgggagatgggacagttttatgaggctgagagctgtcttgtggaggcagggaggctgccggcaggccagaggcgttttgcccacttcccaggcttggcctcggagctgctgctgacagggctgcctctggagctaatcgatgggagcacgctgagcatgcccgtccgctgggtcacagggctcctgaaggagctgcacgtccgactggagagacggtcaaggctggtggttctgtcaaccgtcggggtgccaggcacgggcaagtccacactcctcaacaccatgtttgggctgcggtttgccacagggaagagctgcggtcctcgaggggccttcatgcagctcatcacagtggctgagggcttcagccaggacctgggctgtgaccacatcctggtgatagactccgggggcttgataggtggggccttgacgtcagctggggacagatttgagctggaggcttccttggccactctgctcatgggactgagcaatgtcaccgtgatcagtctagctgaaaccaaggacattccagcagctattctgcatgcatttctgaggttagaaaaaacggggcacatgcccaactaccagtttgtataccagaaccttcatgatgtatctgttcccggccctaggcccagagacaagagacagctcctggatccacctggtgacctgagcagggctgcagcccagatggagaaacagggcgacggcttccgggcactggcaggcctggccttctgcgaccctgagaagcagcacatctggcacatcccaggcctgtggcacggagcacctcccatggccgcagtgagcttggcctacagtgaagccatatttgaattgaagagatgcctactcgaaaacatcaggaacggcttgtcgaaccaaaacaaaaacatccagcagctcattgagctggtgagacggctgtgagtgtgcagagaaacccagttcaggtgtaggaggctgctgtgggcagccctgtctgatggggcacccgtgtggggctgtgctctggtgcctgagaatggctggtgcccaatcgacatgagaagacgaggaaaagacagggtttggagtctcctcaacagtgttaaaagaggaagtgacctcacagaccagctcagagatgttaccaagaatatcacagcccccagggtagggagacaagcagcagtttgttctgtctcagctcctgtcaaggatcctgcggggtgggccctctgtatagctgctctctgtcactggcccctggagtgggagcagcgtccttagtcactgcaggcccaggcgggcaggtggtcccaggacagaggtggggaagttgtcctgaggaagcagaagtaggccttgctcccgcccaacccaagggcctccagtggaccagcattcaagatgtgagtgcccgtggtgtgcaaggcactcccatggcaccgtatttattgactgatctgtgaaggcttccctgacccctgcccaggaagagttcactggtcgctctgttgtgccccacagcactttgttatacctctgccacacacttcacgcagcgcgttgtaactcatgtgtttacatgtctgtccccccagactgtgagctccttgagggcagggactgtacattctccagctctgtgtccccagggcctggcacattgtagacgcttaataaatgtctgttaaatgaa

SEQ ID NO: 35318 - DNA, 3408 bp, Artificial Sequence
  derived and/or modified sequence
actgtggggccgtcgtcgccgcgtgccgagcgtcctggcgcggccgaggggaagcagcggggctgcccgggttacgctggccacccgcacctggtcctgtggcttcgaccactagtcagcaaggccccggagaggccagcgaagaggaggggctcgttggctttacggagacgcgcggagcaccctcaaggtgccacacgctcgcctgctccctgttcctacatcctgggcgtcttcccaggctgtcatataactcctgagaatagtggttcttaactctaaagagtcttgctgtgtcacccaggctggagtgcagtggtgaaatcttggctcactgtggcttcagcctcccaggctcaagagatcctaccatctcagcctcctgagtagctgggactacaggatagaagtggaattactgggcaaagggcattcagatttgggagaagtagccccagaaataaaagcatcagagagacgaacagctgtggccattgcagatttggaatggagagaaatggaaggagatgattgcgagttccgttatggagatggtacaaatgaggctcaggacaatgattttccaacagtggagagaagcaggcttcaagaaatgctgtcacttttgggcctagagacgtaccaggtccagaaactcagcctccaggactctctgcagatcagttttgacagtatgaagaactgggcccctcaggttcccaaagacttgccctggaatttcctcaggaagttgcaggccctcaatgctgatgccaggaataccactatggtgctggacgtgctcccagacgccaggcctgtggagaaggagagccagatggaagaggagatcatctactgggacccagctgatgaccttgctgccgacatttattccttttctgagctgcccacccctgatacgccagtgaaccccttagaccttctctgtgccctgctgctctcctcagacagtttcctgcaacaagaaatagcgttgaaaatggccctctgccagtttgcactcccactcgtgttgcctgactcggagaaccactaccatacatttctgctgtgggccatgcggggcattgtgaggacatggtggtcccagcccccaaggggcatggggagcttccgggaagacagcgtggtcttgtccagggcgcccgccttcgccttcgtgcgcatggacgtcagtagcaactccaagtcccagcttctcaacgccgtcctcagcccgggccacaggcagtgggactgcttctggcatcgggacctcaacttgggcaccaatgcccgggagatttcggatgggttggtagaaatttcctggttttttcccagcggaagggaggacttggacattttcccagaacctgtggcctttctgaacctgagaggtgacatcgggtctcactggctgcagtttaagctcttgacagaaatctcctccgctgtgtttatattgactgacaatatcagtaagaaggaatacaaattgctgtactccatgaaggagtcaaccacaaaatactacttcatcctgagtccctaccgtgggaagcgcaacacaaacctgagatttctgaataagttaattcctgtgctgaaaatagaccactcacatgtcctggtaaaggtcagcagcactgacagcgacagcttcgtgaagaggatccgggccatcgttgggaatgtgctgcgggcaccctgcaggcgggtatctgtggaggacatggcgcacgcagcccgcaaactgggcctaaaggtcgacgaggactgtgaggagtgtcagaaagcgaaagaccggatggagaggattaccaggaaaatcaaagactcggatgcctacagaagggacgagctgaggctgcagggggacccctggagaaaggcagcccaagtggagaaggagttctgccagctccagtgggccgtggacccccctgagaagcacagggctgagctgaggcggcggctgctagaacttcgaatgcagcagaacggccatgatccctcctcgggggtgcaggagttcatctcggggatcagcagcccctccttgagtgagaagcagtacttcctgaggtggatggagtggggcctggcacgggtggcccagccgcgactgagacagcctccggagacgcttctcaccctgagaccaaagcatgggggcaccacagacgtgggggagccgctctggcctgagcccctaggggtggaacacttcttgcgggagatgggacagttttatgaggctgagagctgtcttgtggaggcagggaggctgccggcaggccagaggcgttttgcccacttcccaggcttggcctcggagctgctgctgacagggctgcctctggagctaatcgatgggagcacgctgagcatgcccgtccgctgggtcacagggctcctgaaggagctgcacgtccgactggagagacggtcaaggctggtggttctgtcaaccgtcggggtgccaggcacgggcaagtccacactcctcaacaccatgtttgggctgcggtttgccacagggaagagctgcggtcctcgaggggccttcatgcagctcatcacagtggctgagggcttcagccaggacctgggctgtgaccacatcctggtgatagactccgggggcttgataggtggggccttgacgtcagctggggacagatttgagctggaggcttccttggccactctgctcatgggactgagcaatgtcaccgtgatcagtctagctgaaaccaaggacattccagcagctattctgcatgcatttctgaggttagaaaaaacggggcacatgcccaactaccagtttgtataccagaaccttcatgatgtatctgttcccggccctaggcccagagacaagagacagctcctggatccacctggtgacctgagcagggctgcagcccagatggagaaacagggcgacggcttccgggcactggcaggcctggccttctgcgaccctgagaagcagcacatctggcacatcccaggcctgtggcacggagcacctcccatggccgcagtgagcttggcctacagtgaagccatatttgaattgaagagatgcctactcgaaaacatcaggaacggcttgtcgaaccaaaacaaaaacatccagcagctcattgagctggtgagacggctgtgagtgtgcagagaaacccagttcaggtgtaggaggctgctgtgggcagccctgtctgatggggcacccgtgtggggctgtgctctggtgcctgagaatggctggtgcccaatcgacatgagaagacgaggaaaagacagggtttggagtctcctcaacagtgttaaaagaggaagtgacctcacagaccagctcagagatgttaccaagaatatcacagcccccag

SEQ ID NO: 35319 - DNA, 4042 bp, Artificial Sequence
  derived and/or modified sequence
attttacaatgggtaccgtctcagagaggccagcaactcgtccaacacagcactgcaagtaagaagtaggaaagttattgttttgcttaataataaggccttacgcttcagggctaaagaaaagccttttcttacagaaattaaactccaattacagaaaggtgtgaagttcagtaaggccctggggcaggttatcctacagcttttggcaccgcaggcaccgcccggcgagttccggcctccaggcacctgggcaggtgggcgttgggcgggctgcgggctgacctgggccgccccgcccccaccccgccccagctgtccccgggctgctccgagaggaccccgggcccaccttaccccacctcaccccacctccacccctggagcgcgtcccggagcgggcgggcggccggcgggccaggcccctccccggcgccgagccgcggccgcgcggaggaagcgaaggaggcgggagcggagacctcgctgcgctcatggcgtcgcccgggatagaagtggaattactgggcaaagggcattcagatttgggagaagtagccccagaaataaaagcatcagagagacgaacagctgtggccattgcagatttggaatggagagaaatggaaggagatgattgcgagttccgttatggagatggtacaaatgaggctcaggacaatgattttccaacagtggagagaagcaggcttcaagaaatgctgtcacttttgggcctagagacgtaccaggtccagaaactcagcctccaggactctctgcagatcagttttgacagtatgaagaactgggcccctcaggttcccaaagacttgccctggaatttcctcaggaagttgcaggccctcaatgctgatgccaggaataccactatggtgctggacgtgctcccagacgccaggcctgtggagaaggagagccagatggaagaggagatcatctactgggacccagctgatgaccttgctgccgacatttattccttttctgagctgcccacccctgatacgccagtgaaccccttagaccttctctgtgccctgctgctctcctcagacagtttcctgcaacaagaaatagcgttgaaaatggccctctgccagtttgcactcccactcgtgttgcctgactcggagaaccactaccatacatttctgctgtgggccatgcggggcattgtgaggacatggtggtcccagcccccaaggggcatggggagcttccgggaagacagcgtggtcttgtccagggcgcccgccttcgccttcgtgcgcatggacgtcagtagcaactccaagtcccagcttctcaacgccgtcctcagcccgggccacaggcagtgggactgcttctggcatcgggacctcaacttgggcaccaatgcccgggagatttcggatgggttggtagaaatttcctggttttttcccagcggaagggaggacttggacattttcccagaacctgtggcctttctgaacctgagaggtgacatcgggtctcactggctgcagtttaagctcttgacagaaatctcctccgctgtgtttatattgactgacaatatcagtaagaaggaatacaaattgctgtactccatgaaggagtcaaccacaaaatactacttcatcctgagtccctaccgtgggaagcgcaacacaaacctgagatttctgaataagttaattcctgtgctgaaaatagaccactcacatgtcctggtaaaggtcagcagcactgacagcgacagcttcgtgaagaggatccgggccatcgttgggaatgtgctgcgggcaccctgcaggcgggtatctgtggaggacatggcgcacgcagcccgcaaactgggcctaaaggtcgacgaggactgtgaggagtgtcagaaagcgaaagaccggatggagaggattaccaggaaaatcaaagactcggatgcctacagaagggacgagctgaggctgcagggggacccctggagaaaggcagcccaagtggagaaggagttctgccagctccagtgggccgtggacccccctgagaagcacagggctgagctgaggcggcggctgctagaacttcgaatgcagcagaacggccatgatccctcctcgggggtgcaggagttcatctcggggatcagcagcccctccttgagtgagaagcagtacttcctgaggtggatggagtggggcctggcacgggtggcccagccgcgactgagacagcctccggagacgcttctcaccctgagaccaaagcatgggggcaccacagacgtgggggagccgctctggcctgagcccctaggggtggaacacttcttgcgggagatgggacagttttatgaggctgagagctgtcttgtggaggcagggaggctgccggcaggccagaggcgttttgcccacttcccaggcttggcctcggagctgctgctgacagggctgcctctggagctaatcgatgggagcacgctgagcatgcccgtccgctgggtcacagggctcctgaaggagctgcacgtccgactggagagacggtcaaggctggtggttctgtcaaccgtcggggtgccaggcacgggcaagtccacactcctcaacaccatgtttgggctgcggtttgccacagggaagagctgcggtcctcgaggggccttcatgcagctcatcacagtggctgagggcttcagccaggacctgggctgtgaccacatcctggtgatagactccgggggcttgataggtggggccttgacgtcagctggggacagatttgagctggaggcttccttggccactctgctcatgggactgagcaatgtcaccgtgatcagtctagctgaaaccaaggacattccagcagctattctgcatgcatttctgaggttagaaaaaacggggcacatgcccaactaccagtttgtataccagaaccttcatgatgtatctgttcccggccctaggcccagagacaagagacagctcctggatccacctggtgacctgagcagggctgcagcccagatggagaaacagggcgacggcttccgggcactggcaggcctggccttctgcgaccctgagaagcagcacatctggcacatcccaggcctgtggcacggagcacctcccatggccgcagtgagcttggcctacagtgaagccatatttgaattgaagagatgcctactcgaaaacatcaggaacggcttgtcgaaccaaaacaaaaacatccagcagctcattgagctggtgagacggctgtgagtgtgcagagaaacccagttcaggtgtaggaggctgctgtgggcagccctgtctgatggggcacccgtgtggggctgtgctctggtgcctgagaatggctggtgcccaatcgacatgagaagacgaggaaaagacagggtttggagtctcctcaacagtgttaaaagaggaagtgacctcacagaccagctcagagatgttaccaagaatatcacagcccccagggtagggagacaagcagcagtttgttctgtctcagctcctgtcaaggatcctgcggggtgggccctctgtatagctgctctctgtcactggcccctggagtgggagcagcgtccttagtcactgcaggcccaggcgggcaggtggtcccaggacagaggtggggaagttgtcctgaggaagcagaagtaggccttgctcccgcccaacccaagggcctccagtggaccagcattcaagatgtgagtgcccgtggtgtgcaaggcactcccatggcaccgtatttattgactgatctgtgaaggcttccctgacccctgcccaggaagagttcactggtcgctctgttgtgccccacagcactttgttatacctctgccacacacttcacgcagcgcgttgtaactcatgtgtttacatgtctgtccccccagactgtgagctccttgagggcagggactgtacattctccagctctgtgtccccagggcctggcacattgtagacgcttaataaatgtctgttaaatg

SEQ ID NO: 35320 - protein, 440 aa, Artificial Sequence
  derived and/or modified sequence
MMLAFLVLSTGMFCSSSAFLPSSFCMYTTLIAMTGWYMDKTSIAVLGVAAGAILGWPFSAALGLPIAFDLLVMKHRWKSFFHWSLMALILFLVPVVVIDSYYYGKLVIAPLNIVLYNVFTPHGPDLYGTEPWYFYLINGFLNFNVAFALALLVLPLTSLMEYLLQRFHVQNLGHPYWLTLAPMYIWFIIFFIQPHKEERFLFPVYPLICLCGAVALSALQKCYHFVFQRYRLEHYTVTSNWLALGTVFLFGLLSFSRSVALFRGYHGPLDLYPEFYRIATDPTIHTVPEGRPVNVCVGKEWYRFPSSFLLPDNWQLQFIPSEFRGQLPKPFAEGPLATRIVPTDMNDQNLEEPSRYIDISKCHYLVDLDTMRETPREPKYSSNKEEWISLAYRPFLDASRSSKLLRAFYVPFLSDQYTVYVNYTILKPRKAKQIRKKSGG

SEQ ID NO: 35321 - protein, 844 aa, Artificial Sequence
  derived and/or modified sequence
MAPRRLLLVGEGNFSFAAALSETLDQSTQLTATCLQRPAELARDPLAWENLQCLRERGIDVRFGVDCTQLADVFELHEREFDQIYFIFPHCGRKAGVAKNRELLAKFFQSCADVLAEEGEVHVALCRGQGGTPADKPQREWHNSWQVVAMAALGGLILSDVYPFSCKAVAGYKCTGYRSQDKSFHVEGALNHIFTRSLPFEGSQPRIFRIKLGNQWFSFPEPEALVGKLNRLAMASRGARQRLKGSGASSGDTAPAADKLRELLGSREAGGAEHRTELSGNKAGQVWAPEGSTAFKCLLSARLCAALLSNISDCDETFNYWEPTHYLIYGEGFQTWEYSPAYAIRSYAYLLLHAWPAAFHARILQTNKILVFYFLRCLLAFVSCICELYFYKAVCKKFGLHVSRMMLAFLVLSTGMFCSSSAFLPSSFCMYTTLIAMTGWYMDKTSIAVLGVAAGAILGWPFSAALGLPIAFDLLVMKHRWKSFFHWSLMALILFLVPVVVIDSYYYGKLVIAPLNIVLYNVFTPHGPDLYGTEPWYFYLINGFLNFNVAFALALLVLPLTSLMEYLLQRFHVQNLGHPYWLTLAPMYIWFIIFFIQPHKEERFLFPVYPLICLCGAVALSALQKCYHFVFQRYRLEHYTVTSNWLALGTVFLFGLLSFSRSVALFRGYHGPLDLYPEFYRIATDPTIHTVPEGRPVNVCVGKEWYRFPSSFLLPDNWQLQFIPSEFRGQLPKPFAEGPLATRIVPTDMNDQNLEEPSRYIDISKCHYLVDLDTMRETPREPKYSSNKEEWISLAYRPFLDASRSSKLLRAFYVPFLSDQYTVYVNYTILKPRKAKQIRKKSGG

SEQ ID NO: 35322 - DNA, 2535 bp, Artificial Sequence
  derived and/or modified sequence
atggccccgcgcagactgctgctcgtcggcgaggggaatttcagctttgccgcagctctaagtgaaacactggaccaatccactcagctgacagctacatgtctgcagcgacctgcagagctggcgagagacccactggcatgggagaacctgcagtgtctgcgggaacgtgggatcgacgtcagatttggagtggactgtacccagttagccgacgtgttcgaacttcacgagagagaattcgatcagatctattttattttccctcactgcggtaggaaggccggcgtggctaagaatagagaactgctggccaagttttttcaatcctgcgccgacgtgctggccgaggaaggggaggtgcacgtggccctctgtcgaggccaaggcggcaccccagcagataagcctcagcgggaatggcacaacagttggcaggtggtggcaatggctgctctgggcgggctaattctgtccgacgtctatcctttcagttgtaaagccgtggcaggatacaagtgcaccgggtaccgatctcaggataaaagttttcacgtggaaggggcgctcaatcatatcttcacacgctctctaccctttgaaggcagtcaaccacgaatcttccggatcaaacttggtaaccagtggttctcatttcccgaaccggaagccctcgtgggaaaactgaacaggctggccatggcgtcacggggtgctcgccaacgcctgaaggggtcaggagcatcttccggtgacaccgcaccggcggcagacaaactgcgcgaactcctggggagccgcgaggctgggggggctgaacataggacggaactgtccggaaataaggctggtcaggtctgggcccctgaaggaagcacggctttcaaatgtctgctgagtgccaggttgtgcgcggcgctgctcagcaacatcagcgattgcgatgagacttttaactattgggaaccaactcactatttgatatatggggaggggttccagacatgggagtacagtcctgcgtacgccattagatcctatgcctacctgttgctgcacgcctggccagccgcattccatgcccggatcctgcagactaacaagattctcgtcttttatttcctgagatgtcttttagctttcgtatcttgtatctgcgaactgtatttttacaaagcagtgtgcaagaaattcggattacatgtgtctcgaatgatgcttgcgttcttggtgctgagcacagggatgttttgtagcagctccgcctttctgccttctagcttttgcatgtacacgacacttatcgctatgactggatggtatatggataaaaccagcattgccgttctgggcgttgccgcaggcgccattctaggatggcctttctcagccgctctcggtctgccaatagcattcgacttactggtgatgaagcatcgttggaagtcattttttcactggagcctcatggccctcatcttgttcctggtacccgtcgtggtgatcgatagctactactacggcaaattggtgatcgctcccctcaacatcgtactgtacaacgtctttacgccacacggacccgatttatatggtacggagccctggtatttctatctgatcaacggtttcctgaatttcaatgtggcctttgcactcgctctgctggtcctcccactgacgagcctgatggaatatctcctgcagagatttcatgttcagaacctgggtcacccttactggttaacgctcgccccaatgtatatttggttcattattttcttcatacagccccacaaggaggagcgttttttgtttccagtgtacccactgatctgcctttgcggagcagtagctctctcggctctccagaaatgttaccatttcgtttttcaaagatatagacttgaacattacacagtgacttctaactggctggctctcggtaccgttttcctgttcgggttgctctctttctcacgcagtgtggccctgtttcggggctaccatggaccactggacctgtatccagagttctacagaatcgctaccgaccctaccattcatacagtgcctgagggccgcccggtaaacgtgtgcgtgggaaaggaatggtacagattcccctcttccttcttgcttccagataactggcaactccagttcataccgtccgaatttcggggtcagttgcctaagcctttcgccgaagggccacttgccactcgtatagtgcccacagatatgaatgaccagaaccttgaggaaccgagccgctatattgatatctccaagtgccactatttggttgatctagacaccatgcgcgagacaccccgggagcccaagtatagctcaaacaaggaggaatggatctccctcgcatataggccatttttggacgcttccagaagttctaaactgctgcgagctttctatgttccctttctgagtgatcagtacactgtgtacgtgaactacacaattttgaagcccagaaaggccaaacaaatccgcaaaaaatcgggcggctag

SEQ ID NO: 35323 - DNA, 2535 bp, Artificial Sequence
  derived and/or modified sequence
atggccccccggcggctgctgctggtgggggagggcaacttctcctttgctgctgccctgtctgagaccctggaccagagcacccagctgacagccacctgcctgcagaggcctgctgagctggcccgggaccccctggcctgggagaacctgcagtgcctgcgggagcggggcattgatgtgcgctttggagtggactgcacccagctggctgatgtgtttgagctgcacgagcgggagtttgaccagatctacttcatcttcccccactgcggcaggaaggccggcgtggccaagaaccgggagctgctggccaagttcttccagagctgtgctgatgtgctggccgaggagggggaggtgcacgtggccctgtgccggggccagggcggcaccccagctgacaagccccagcgggagtggcacaacagctggcaggtggtggccatggccgccctgggcggcctcatcctgagtgatgtgtaccccttcagctgcaaggctgtggccggctacaagtgcaccggctaccgcagccaggacaagagcttccacgtggagggcgccctgaaccacatcttcaccaggagcctgccctttgagggcagccagccccgcatcttccgcatcaagctgggcaaccagtggttctccttccctgagcctgaggccctggtgggcaagctgaaccggctggccatggccagcagaggagcccggcagaggctgaagggcagcggggccagcagcggggacacagccccagctgctgacaagctgcgggagctgctgggcagccgggaggccggcggcgctgagcacaggacagagctgagcggcaacaaggccggccaggtgtgggcccctgagggcagcacagccttcaagtgcctgctgagcgcccggctgtgtgccgccctgctgagcaacatcagtgactgtgatgagaccttcaactactgggagcccacccactacctgatctatggagagggcttccagacctgggagtacagccctgcctatgccatccgctcctatgcctacctgctgctgcacgcctggccagctgccttccacgcccgcatcctgcagaccaacaagatcctggtgttctacttcctgcgctgcctgctggcctttgtgtcctgcatctgtgagctgtacttctacaaggctgtgtgcaagaagtttggcctgcacgtgtccaggatgatgctggccttcctggtgctgagcacaggcatgttctgcagcagcagcgccttcctgcccagcagcttctgcatgtacaccaccctgattgccatgacaggctggtacatggacaagaccagcattgctgtgctgggcgtggccgccggggccatcctgggctggcccttctctgctgccctgggcctgcccatcgcctttgacctgctggtgatgaagcaccgctggaagagcttcttccactggagcctgatggccctgatcctcttcctggtgcctgtggtggtgattgacagctactactacggcaagctggtgattgcccccctgaacatcgtgctgtacaacgtgttcaccccccacggccctgacctgtatggaacagagccctggtacttctacctgatcaatggcttcctgaacttcaacgtggcctttgccctggccctgctggtgctgcccctgaccagcctgatggagtacctgctgcagcgcttccacgtgcagaacctgggccacccctactggctgaccctggcccccatgtacatctggttcatcatcttcttcatccagccccacaaggaggagcgcttcctgtttcctgtgtaccccctcatctgcctgtgtggggctgtggccctgagcgccctgcagaagtgctaccactttgtgttccagcgctaccgcctggagcactacacagtgaccagcaactggctggccctgggcaccgtcttcctgtttggcctgctgtccttcagccgctctgtggccctcttccggggctaccacggccccctggacctgtacccagagttctaccgcatcgccacagaccccaccatccacacagtgcctgagggccggcctgtgaatgtgtgtgtgggcaaggagtggtaccgcttccccagcagcttcctgctgcctgacaactggcagctgcagttcatccccagcgagttccggggccagctgcccaagccctttgctgagggccccctggccacccgcatcgtgcccacagacatgaatgaccagaacctggaggagcccagccgctacatcgacatcagcaagtgccactacctggtggacctggacaccatgagggagaccccccgggagcccaagtacagcagcaacaaggaggagtggatcagcctggcctaccggcccttcctggatgccagccgcagcagcaagctgctgcgggccttctacgtgcccttcctgagtgaccagtacacagtgtatgtgaactacaccatcctgaagcccaggaaggccaagcagatcaggaagaagagcggcggctag

SEQ ID NO: 35324 - DNA, 2535 bp, Artificial Sequence
  derived and/or modified sequence
atggccccccggcggctgctgctggtgggcgagggcaacttcagcttcgcagccgcgctatctgaaacactagaccagagcactcagctaaccgcaacctgccttcaacgtcccgcggagcttgcccgcgaccctcttgcctgggaaaacctgcagtgtctgcgggaaagaggcattgatgttcggttcggcgtggattgtactcagttggccgatgtcttcgagctccatgaaagagagttcgatcaaatttacttcatctttccccattgtgggcggaaggccggtgtggccaagaatcgcgaactgttggccaaattttttcagagctgcgcagatgttcttgccgaggaaggagaagtgcatgtcgctctgtgtcgcgggcagggcggaactcccgccgacaaaccacagcgcgagtggcataactcttggcaagtggttgccatggccgcactcggggggttgatcctgtctgacgtgtatccgttctcatgtaaggccgtggccggatataaatgcacaggctatcgttcccaggataagtctttccacgtggaaggtgccctgaatcacatattcacgagatcgctgccattcgaggggtctcagcctcgaattttccgaatcaaactggggaatcagtggttcagctttcccgagccagaggccctggtggggaagctgaatagactggcaatggccagccgaggtgccaggcagaggctgaagggctcgggcgcgtcctccggagacactgctccagcagcagataagctgagggaattattgggctccagagaggccggtggtgccgagcatagaacagaactgtctggaaacaaggctggtcaggtgtgggctcctgagggcagcaccgcattcaaatgtcttcttagcgcccgactctgcgccgccctgctttctaatatttctgactgcgacgaaacttttaattactgggaaccaacccactatctcatatacggtgaggggtttcaaacttgggagtattctcctgcctacgcgattagaagctatgcatacttgctcctgcacgcttggccagcagcattccatgcaaggatcttgcaaaccaataagatacttgtgttttactttttgaggtgtttgcttgctttcgtcagctgcatctgcgaactgtatttctacaaagctgtgtgtaaaaagttcggcctgcacgtttctagaatgatgcttgcattcctagtgctctcaaccggcatgttttgttcttcatcagcattcctgccctcttctttttgcatgtatacaaccctgattgccatgactggctggtacatggataagaccagtatcgcagtactcggagtagcagcaggggcaatcctgggttggcctttctcagccgccttaggcctaccaatcgctttcgacctcctagtaatgaagcacaggtggaagtcgttcttccattggtctctcatggccttgattttgtttctggtccccgttgtggtgatcgatagttattattatggcaagctggttatcgccccactcaacattgtactctataacgtttttacaccccatgggcccgacctgtacgggacggagccctggtatttctatcttattaacgggtttctgaatttcaatgtggcgtttgctttggccctccttgttctgccgctgacatctcttatggagtatctcctgcagagattccatgtgcagaatcttggtcatccctactggctcacgctggcccccatgtacatctggtttattatcttcttcatccaacctcacaaagaggagcgattcttatttcccgtctaccctctgatctgcctgtgcggcgccgttgccctctccgctctgcaaaaatgctaccacttcgtgttccagcgctataggctggagcactacaccgtgacatcaaactggctagcccttggcaccgtctttttatttgggcttttatccttctctcggtctgtggcgctttttaggggttatcatgggcccctggacttatacccagagttctaccggattgcaactgatcccaccatccatacggttcctgaaggccgcccagtaaacgtgtgcgtaggtaaggagtggtaccgtttccccagctcttttcttcttccagataattggcagctgcagttcattccgtccgagtttagggggcagctgcctaaaccgttcgccgagggcccactggctaccaggatcgtgcccactgatatgaatgatcaaaacctggaggagccatctcggtatatcgacatttccaagtgccattatctggttgatctggatactatgcgcgagacaccgagagagcctaagtattctagcaataaggaagaatggatcagtctggcgtatcggccattcctcgacgctagccgatcttccaagctacttcgagccttttacgttcctttcctgtcagatcaatacaccgtgtatgttaactacactatcctgaagccacgaaaggctaagcagattaggaaaaagtcggggggttag

SEQ ID NO: 35325 - DNA, 2535 bp, Artificial Sequence
  derived and/or modified sequence
atggcaccaagacgcctcttactggtcggtgaggggaacttttcctttgcagccgctctctccgagaccttagatcaaagtactcagttgaccgccacatgcctgcagcgcccagcagagctggccagggatcccctggcgtgggaaaatcttcaatgcctgcgtgagaggggcatcgatgtgaggttcggggtagactgcactcagctcgctgacgtgtttgagctgcatgaacgggaatttgaccaaatctatttcatattcccccactgcggaagaaaagcaggagtggccaagaacagagaactcctggccaagttctttcagagctgtgccgatgttttagccgaagaaggcgaggtgcacgtcgcattgtgccgcggacagggcggaacacccgcagacaaaccacagagagagtggcacaactcttggcaagtcgtcgcaatggctgcactgggaggactgatactgagtgacgtataccctttctcatgtaaagctgtagcaggctataaatgcactgggtatcggtcgcaagacaagagcttccatgttgagggcgctctgaaccatatttttactcggtcactgccatttgaggggtctcagccgcgtatttttcggatcaagctcgggaaccaatggttttccttccccgagccggaggcattagtgggcaagctcaaccgattagcgatggcttcccgcggagccagacagcgccttaagggctccggtgctagctccggtgacaccgctcccgcagcagataaattgagagagctcctgggcagccgcgaagctggaggcgctgaacatcgaacagagctgagtggtaataaagcgggacaagtttgggcacccgagggaagcactgccttcaaatgcctccttagcgccaggctgtgtgcagcgctgttgtctaacatctccgactgcgacgaaacatttaactattgggagccaacgcactatctcatctatggagaggggtttcagacctgggaatactcacccgcatatgctatcagaagctacgcctaccttctgttacacgcctggccagcagcgtttcatgcgagaattttgcagacaaacaagattttggtgttctactttctgagatgtcttctggccttcgttagctgtatctgcgagctttatttctacaaggccgtttgtaagaaatttgggctgcacgtctcccgcatgatgctcgcctttttggttctttcgactgggatgttttgtagttcatctgcattcctcccaagcagcttttgtatgtataccacccttattgccatgactggctggtatatggataagactagcattgccgtcctgggtgtggcagccggagctatcctggggtggcccttctctgcagcattaggcctgccaatcgcatttgatctcctggtgatgaagcataggtggaagtcatttttccactggtcgctgatggcactcatactgtttctcgtgcctgtggtcgtaatagatagctattattatggcaagctcgtcatagcccctttgaacattgttctctacaatgtctttaccccacacggacctgatctgtacggaacggagccgtggtacttctacttgataaacggctttctgaacttcaacgtggcttttgcattagcactcctggtgctccctctaacttctctcatggagtacctgctgcagcgattccacgtgcaaaatctgggccacccatattggctcactcttgctcccatgtacatttggttcataattttttttatccagccccataaggaagagagattcctcttccccgtgtacccgctgatctgcctatgtggagccgtggccctgtcggccttgcagaaatgctaccactttgtttttcagcgataccggctagaacactatacggtcaccagcaattggctcgctcttggaacggtgttcttgttcggcctgctgtctttcagccgcagcgtcgccctttttcggggataccacggtcccctcgacctctatccagaattttaccgaattgccaccgaccctaccatccacacagtgccggaaggaagaccagtcaatgtctgtgtgggcaaggagtggtaccggttcccctcaagctttctgcttcctgacaactggcagctgcaatttattccttctgagttccgaggtcagcttcctaaaccgttcgcagaaggtcccctcgctacaagaattgtgccgaccgacatgaatgaccagaacctggaggaaccctcacgatacattgatatttccaagtgccactatctcgttgacctggatacaatgcgggaaacccctcgggagccgaagtactcttccaataaggaggagtggatttcattggcgtatagaccctttctcgacgccagcaggagcagtaagctgctgcgcgcattctacgtccctttcctgtctgaccagtatactgtgtacgtgaattacactattctcaaacctcgaaaggccaagcaaatacgtaaaaagagcggtggctag

SEQ ID NO: 35326 - DNA, 2345 bp, Artificial Sequence
  derived and/or modified sequence
gctgcccccgggagggtcttagctgtggcgcgcggggctcagtccggcctggcctcaccgcgggaggcccgagctccctcttcagctaggtcctattggtcttcctgggcgggtcagcattcagtcttcgcccaccttagatccctccactgcgctgtaaaactgccttggagtgcggatctgtgatgctcctgggccaggcctagagtgggcacagcctctgtgggagatgtagacaggatcaaagagtataccttttacggctgttcctcacagctccttttattctccctcaagtcccgaccctttactgggcccatccaacccgccatcacctcttcccaaaccctggaggctgcaggttagaactgcattaagggagctgtcaacatatggaattggagtaggctatgtaccttgcacctaggcttctatctgaacataagggggaatgaataaagccatcaaaagcaatgaccttgttaagaaaagaaagaaaaggagaatgacagctttgtggccttcaagttatctgggaacaaagcaggacaagtctgggcacctgaaggatctactgctttcaagtgtctgctttcagcaaggttatgtgctgctctcctgagcaacatctctgactgtgatgaaacattcaactactgggagccaacacactacctcatctatggggaagggtttcagacttgggaatattccccagcatatgccattcgctcctatgcttacctgttgcttcatgcctggccagctgcatttcatgcaagaattctacaaactaataagattcttgtgttttactttttgcgatgtcttctggcttttgtgagctgtatttgtgaactttacttttacaaggctgtgtgcaagaagtttgggttgcacgtgagtcgaatgatgctagccttcttggttctcagcactggcatgttttgctcatcatcagcattccttcctagtagcttctgtatgtacactacgttgatagccatgactggatggtatatggacaagacttccattgctgtgctgggagtagcagctggggctatcttaggctggccattcagtgcagctcttggtttacccattgcctttgatttgctggtcatgaaacacaggtggaagagtttctttcattggtcgctgatggccctcatactatttctggtgcctgtggtggtcattgacagctactattatgggaagttggtgattgcaccactcaacattgttttgtataatgtctttactcctcatggacctgatctttatggtacagaaccctggtatttctatttaattaatggatttctgaatttcaatgtagcctttgctttggctctcctagtcctaccactgacttctcttatggaatacctgctgcagagatttcatgttcagaatttaggccacccgtattggcttaccttggctccaatgtatatttggtttataattttcttcatccagcctcacaaagaggagagatttcttttccctgtgtatccacttatatgtctctgtggcgctgtggctctctctgcacttcagaaatgttaccactttgtgtttcaacgatatcgcctggagcactatactgtgacatcgaattggctggcattaggaactgtcttcctgtttgggctcttgtcattttctcgctctgtggcactgttcagaggatatcacgggccccttgatttgtatccagaattttaccgaattgctacagacccaaccatccacactgtcccagaaggcagacctgtgaatgtctgtgtgggaaaagagtggtatcgatttcccagcagcttccttcttcctgacaattggcagcttcagttcattccatcagagttcagaggtcagttaccaaaaccttttgcagaaggacctctggccacccggattgttcctactgacatgaatgaccagaatctagaagagccatccagatatattgatatcagtaaatgccattatttagtggatttggacaccatgagagaaacaccccgggagccaaaatattcatccaataaagaagaatggatcagcttggcctatagaccattccttgatgcttctagatcttcaaagctgctgcgggcattctatgtccccttcctgtcagatcagtatacagtgtacgtaaactacaccatcctcaaaccccggaaagcaaagcaaatcaggaagaaaagtggaggttagcaacacacctgtggccccaaaggacaaccatcttgttaactattgattccagtgacctgactccctgcaagtcatcgcctgtaacatttgtaataaaggtcttctgacatgaa

SEQ ID NO: 35327 - DNA, 2935 bp, Artificial Sequence
  derived and/or modified sequence
gtgacctcatgcaggtgtgatgaagtcgctcaaggccatgcttgggctaaagacactttgatcttcccgagggggtgaaagggcgaggtgacaggaaagtgcgcgtcttgcttttgcactcatagttatcatccaccggggagtcggtacaccggctcgtctagacaaccaggcgccatgggtgcgtcatcaactagtgacgggagaagacggggcggagagagatccgtgaaggaagtgacgtaaaacgagcgccacagagaacgcgagccgggagtccgtggaggccatggcccctcggcgcctcctgttggttggggaggggaatttctccttcgccgccgctctgagcgaaaccctggatcagagcactcaacttaccgccacctgcctccagcgcccggccgagttggctcgggatccactggcctgggagaatctgcagtgcctgcgcgagcgaggtatcgatgtacgtttcggtgtggactgcacccagctggcagatgtctttgaactgcacgagagagaatttgatcaaatttatttcatcttcccgcattgtggacgcaaagctggcgtagctaagaacagggaactgcttgccaaatttttccaaagctgtgcagacgttcttgcagaggaaggagaagtccacgtggcattatgtagaggacaaggtggaactcctgcggataagccccagagagaatggcacaacagttggcaagtggttgccatggcagccctgggggggctcattttaagcgacgtgtatccattcagctgtaaggctgtggcagggtacaagtgcactggatataggagtcaagataagtcctttcatgtagaaggtgctttgaaccatatcttcaccaggagcttaccttttgaaggttctcaacccagaatcttcaggatcaaactgggtaaccagtggttttcctttccagaaccagaagcacttgtaggaaagttgaacaggcttgccatggctagtcgaggggctcggcagcgcctgaagggcagcggggccagcagtggggatacggccccggctgcggacaagctgcgggagctgctgggcagccgagaggcgggcggcgcggagcaccggaccgagttatctgggaacaaagcaggacaagtctgggcacctgaaggatctactgctttcaagtgtctgctttcagcaaggttatgtgctgctctcctgagcaacatctctgactgtgatgaaacattcaactactgggagccaacacactacctcatctatggggaagggtttcagacttgggaatattccccagcatatgccattcgctcctatgcttacctgttgcttcatgcctggccagctgcatttcatgcaagaattctacaaactaataagattcttgtgttttactttttgcgatgtcttctggcttttgtgagctgtatttgtgaactttacttttacaaggctgtgtgcaagaagtttgggttgcacgtgagtcgaatgatgctagccttcttggttctcagcactggcatgttttgctcatcatcagcattccttcctagtagcttctgtatgtacactacgttgatagccatgactggatggtatatggacaagacttccattgctgtgctgggagtagcagctggggctatcttaggctggccattcagtgcagctcttggtttacccattgcctttgatttgctggtcatgaaacacaggtggaagagtttctttcattggtcgctgatggccctcatactatttctggtgcctgtggtggtcattgacagctactattatgggaagttggtgattgcaccactcaacattgttttgtataatgtctttactcctcatggacctgatctttatggtacagaaccctggtatttctatttaattaatggatttctgaatttcaatgtagcctttgctttggctctcctagtcctaccactgacttctcttatggaatacctgctgcagagatttcatgttcagaatttaggccacccgtattggcttaccttggctccaatgtatatttggtttataattttcttcatccagcctcacaaagaggagagatttcttttccctgtgtatccacttatatgtctctgtggcgctgtggctctctctgcacttcagaaatgttaccactttgtgtttcaacgatatcgcctggagcactatactgtgacatcgaattggctggcattaggaactgtcttcctgtttgggctcttgtcattttctcgctctgtggcactgttcagaggatatcacgggccccttgatttgtatccagaattttaccgaattgctacagacccaaccatccacactgtcccagaaggcagacctgtgaatgtctgtgtgggaaaagagtggtatcgatttcccagcagcttccttcttcctgacaattggcagcttcagttcattccatcagagttcagaggtcagttaccaaaaccttttgcagaaggacctctggccacccggattgttcctactgacatgaatgaccagaatctagaagagccatccagatatattgatatcagtaaatgccattatttagtggatttggacaccatgagagaaacaccccgggagccaaaatattcatccaataaagaagaatggatcagcttggcctatagaccattccttgatgcttctagatcttcaaagctgctgcgggcattctatgtccccttcctgtcagatcagtatacagtgtacgtaaactacaccatcctcaaaccccggaaagcaaagcaaatcaggaagaaaagtggaggttagcaacacacctgtggccccaaaggacaaccatcttgttaactattgattccagtgacctgactccctgcaagtcatcgcctgtaacatttgtaataaaggtcttctgacatg

SEQ ID NO: 35328 - DNA, 2535 bp, Artificial Sequence
  derived and/or modified sequence
atggcccccagaagactgctgctggtgggcgagggcaacttcagcttcgccgccgccctgagcgagaccctggaccagagcacccagctgaccgccacctgcctgcagagacccgccgagctggccagagaccccctggcctgggagaacctgcagtgcctgagagagagaggcatcgacgtgagattcggcgtggactgcacccagctggccgacgtgttcgagctgcacgagagagagttcgaccagatctacttcatcttcccccactgcggcagaaaggccggcgtggccaagaacagagagctgctggccaagttcttccagagctgcgccgacgtgctggccgaggagggcgaggtgcacgtggccctgtgcagaggccagggcggcacccccgccgacaagccccagagagagtggcacaacagctggcaggtggtggccatggccgccctgggcggcctgatcctgagcgacgtgtaccccttcagctgcaaggccgtggccggctacaagtgcaccggctacagaagccaggacaagagcttccacgtggagggcgccctgaaccacatcttcaccagaagcctgcccttcgagggcagccagcccagaatcttcagaatcaagctgggcaaccagtggttcagcttccccgagcccgaggccctggtgggcaagctgaacagactggccatggccagcagaggcgccagacagagactgaagggcagcggcgccagcagcggcgacaccgcccccgccgccgacaagctgagagagctgctgggcagcagagaggccggcggcgccgagcacagaaccgagctgagcggcaacaaggccggccaggtgtgggcccccgagggcagcaccgccttcaagtgcctgctgagcgccagactgtgcgccgccctgctgagcaacatcagcgactgcgacgagaccttcaactactgggagcccacccactacctgatctacggcgagggcttccagacctgggagtacagccccgcctacgccatcagaagctacgcctacctgctgctgcacgcctggcccgccgccttccacgccagaatcctgcagaccaacaagatcctggtgttctacttcctgagatgcctgctggccttcgtgagctgcatctgcgagctgtacttctacaaggccgtgtgcaagaagttcggcctgcacgtgagcagaatgatgctggccttcctggtgctgagcaccggcatgttctgcagcagcagcgccttcctgcccagcagcttctgcatgtacaccaccctgatcgccatgaccggctggtacatggacaagaccagcatcgccgtgctgggcgtggccgccggcgccatcctgggctggcccttcagcgccgccctgggcctgcccatcgccttcgacctgctggtgatgaagcacagatggaagagcttcttccactggagcctgatggccctgatcctgttcctggtgcccgtggtggtgatcgacagctactactacggcaagctggtgatcgcccccctgaacatcgtgctgtacaacgtgttcaccccccacggccccgacctgtacggcaccgagccctggtacttctacctgatcaacggcttcctgaacttcaacgtggccttcgccctggccctgctggtgctgcccctgaccagcctgatggagtacctgctgcagagattccacgtgcagaacctgggccacccctactggctgaccctggcccccatgtacatctggttcatcatcttcttcatccagccccacaaggaggagagattcctgttccccgtgtaccccctgatctgcctgtgcggcgccgtggccctgagcgccctgcagaagtgctaccacttcgtgttccagagatacagactggagcactacaccgtgaccagcaactggctggccctgggcaccgtgttcctgttcggcctgctgagcttcagcagaagcgtggccctgttcagaggctaccacggccccctggacctgtaccccgagttctacagaatcgccaccgaccccaccatccacaccgtgcccgagggcagacccgtgaacgtgtgcgtgggcaaggagtggtacagattccccagcagcttcctgctgcccgacaactggcagctgcagttcatccccagcgagttcagaggccagctgcccaagcccttcgccgagggccccctggccaccagaatcgtgcccaccgacatgaacgaccagaacctggaggagcccagcagatacatcgacatcagcaagtgccactacctggtggacctggacaccatgagagagacccccagagagcccaagtacagcagcaacaaggaggagtggatcagcctggcctacagacccttcctggacgccagcagaagcagcaagctgctgagagccttctacgtgcccttcctgagcgaccagtacaccgtgtacgtgaactacaccatcctgaagcccagaaaggccaagcagatcagaaagaagagcggcggctag

SEQ ID NO: 35329 - DNA, 1344 bp, Artificial Sequence
  derived and/or modified sequence
atgatgctggctttcctcgtgctgtcgacaggtatgttttgtagcagctccgccttcctcccctcttctttttgtatgtatacgaccctgattgctatgactggctggtacatggataagacatctattgcagttctgggcgttgccgccggggcgatcttggggtggcctttttctgccgccttaggtttgccaatcgcatttgacctgttagttatgaaacatcgttggaagtcgttctttcactggtcactgatggcactcatcctgttcttggtgcctgttgtggtcattgattcctattactacgggaagctagtgattgcccctcttaacattgttctttacaatgtttttactcctcacggccctgatctgtacggcacggaaccttggtacttctatctgataaatggctttttaaatttcaatgtcgctttcgccctggctctgctggtgttacctctaacttcgctgatggagtatttgctgcagcgctttcacgtacaaaacttgggccatccctattggctaactctggcaccaatgtatatttggtttatcatattttttatccagcctcacaaggaggagcggttcttgttcccagtctacccattaatctgtctgtgcggtgcagtcgcgctgagcgcgttgcagcattcattcctttactttcagaagtgctaccacttcgtgttccaacggtaccggctggagcattacacggttacaagcaattggctggcgcttggtaccgtgtttcttttcggcctcctttcattttcccgttccgtcgccctttttcgggggtaccacggaccactggatctgtatcccgaattttaccgtatcgctacagatcccaccatacatactgtaccagaggggagacctgtaaacgtgtgcgtgggtaaggagtggtacaggttcccaagtagtttcctgctgcccgacaactggcagctgcagtttattccctcagaatttagggggcagctgccgaagcccttcgcagagggccccctggccacgcgcatcgttcccaccgacatgaacgatcagaatttggaggaaccctctcggtacatcgatatctccaaatgccactatctggtagatttagatactatgagggaaaccccaagggagcctaaatacagctccaacaaagaagagtggatcagcctggcctaccgaccctttcttgacgcttccaggagttcaaaactccttagggccttctacgtcccatttttgtctgatcagtacaccgtctatgtgaactatactattctgaagcctcgtaaggccaagcagattcgcaaaaagagcggagggtag

SEQ ID NO: 35330 - DNA, 1344 bp, Artificial Sequence
  derived and/or modified sequence
atgatgctggccttcctggtgctgagcacaggcatgttctgcagcagcagcgccttcctgcccagcagcttctgcatgtacaccaccctgattgccatgacaggctggtacatggacaagaccagcattgctgtgctgggcgtggccgccggggccatcctgggctggcccttctctgctgccctgggcctgcccatcgcctttgacctgctggtgatgaagcaccgctggaagagcttcttccactggagcctgatggccctgatcctcttcctggtgcctgtggtggtgattgacagctactactacggcaagctggtgattgcccccctgaacatcgtgctgtacaacgtgttcaccccccacggccctgacctgtatggaacagagccctggtacttctacctgatcaatggcttcctgaacttcaacgtggcctttgccctggccctgctggtgctgcccctgaccagcctgatggagtacctgctgcagcgcttccacgtgcagaacctgggccacccctactggctgaccctggcccccatgtacatctggttcatcatcttcttcatccagccccacaaggaggagcgcttcctgtttcctgtgtaccccctcatctgcctgtgtggggctgtggccctgagcgccctgcagcacagcttcctgtacttccagaagtgctaccactttgtgttccagcgctaccgcctggagcactacacagtgaccagcaactggctggccctgggcaccgtcttcctgtttggcctgctgtccttcagccgctctgtggccctcttccggggctaccacggccccctggacctgtacccagagttctacagaattgccacagaccccaccatccacacagtgcctgagggccggcctgtgaatgtgtgtgtgggcaaggagtggtaccgcttccccagcagcttcctgctgcctgacaactggcagctgcagttcatccccagcgagttccggggccagctgcccaagccctttgctgagggccccctggccaccagaattgtgcccacagacatgaatgaccagaacctggaggagcccagccgctacatcgacatcagcaagtgccactacctggtggacctggacaccatgagggagaccccccgggagcccaagtacagcagcaacaaggaggagtggatcagcctggcctaccggcccttcctggatgccagccgcagcagcaagctgctgcgggccttctacgtgcccttcctgagtgaccagtacacagtgtatgtgaactacaccatcctgaagcccaggaaggccaagcagatcaggaagaagagcggcggctag

SEQ ID NO: 35331 - DNA, 1344 bp, Artificial Sequence
  derived and/or modified sequence
atgatgctggccttcctggtgctgagcaccggcatgttctgcagcagtagcgcttttttgccatcttctttttgcatgtatactactcttattgctatgaccggttggtacatggataagacttccatagccgtccttggcgttgccgccggcgctattctgggatggcctttctcagctgccttggggcttccgattgcgttcgacttactcgtaatgaagcatcgatggaagtcattcttccactggtccctgatggcgctcatcttgttcctagtgccggtcgtcgtcattgattcctattactatggaaaactggtaatagctcccctaaatatcgtcttgtataacgtctttacgccccatggcccggacctgtacgggaccgagccatggtatttctatcttatcaatggcttcctaaactttaatgtggcctttgccctggccctgctggtcctgccactgactagcctgatggagtatctgctgcaaaggtttcacgtgcagaacctaggccatccgtactggttgacattggctcctatgtatatttggttcattatcttcttcatccagccccataaggaggagcgcttcctatttcccgtgtacccactcatttgcctgtgtggcgccgtggctctcagcgccctgcagcattccttcctgtacttccagaagtgttaccattttgtctttcagcggtataggctagaacactataccgtgacaagtaattggctggccctcggaaccgtctttctctttggcctgctgagcttcagcaggtctgtcgcactgttccgtggttaccatggaccactggatctgtatcccgagttttaccgcatagcgacggatcccactattcacactgttcccgaggggcggcccgtgaacgtgtgcgtcggcaaggagtggtatcgctttccctccagttttcttctgcccgataattggcagttgcagtttatcccctcagagtttaggggccagctccctaaaccattcgccgaaggccccctggctacacggatcgtccctacagatatgaacgaccaaaacctggaagagccctccagatacatcgatatctctaaatgtcattatctggtggatctcgacaccatgcgggaaaccccgcgagaaccaaagtattcgagtaacaaggaagaatggatctcgctggcgtaccgtccattcttggacgccagtcgatcttcaaagctgcttcgagctttttatgttccattccttagcgatcagtacaccgtttacgtgaactatacgattcttaagcctcgcaaagctaaacagattcggaagaagagcggcggctag

SEQ ID NO: 35332 - DNA, 1344 bp, Artificial Sequence
  derived and/or modified sequence
atgatgctggccttcctggtcctgtccacggggatgttctgctcatccagtgcttttctgccttcatctttctgcatgtatactaccctgattgctatgaccgggtggtacatggacaagacaagtattgctgttttgggcgtagcagctggcgctatcctggggtggccattctccgccgctttgggtctgcctattgcgtttgatctcctggtcatgaagcaccgctggaagtcattttttcactggagcttaatggccctgatcctgttcttagtgccggttgtcgtgatcgattcttactattacggcaagctcgtgattgctcctctgaatatcgtgttgtacaacgtgttcacaccccacggacccgacctgtacggaactgagccttggtatttttacctgattaacggttttcttaacttcaacgtggcatttgctctggctttattggtgctgcccctgacatccctgatggagtatctgcttcagagattccacgtacagaatctgggccatccctactggctcacgcttgcccctatgtacatttggtttattatctttttcatccagccacacaaggaggagcgattcctgttccccgtgtatccattgatctgtctgtgcggcgctgtagccctgtccgcattgcaacactcctttctttacttccagaagtgctatcacttcgtgttccagcgctacaggcttgagcactataccgtgacctctaattggttggcactgggtaccgtgttcttgttcgggctgctgtcattcagcaggtctgttgcactgtttcgagggtatcacgggcctctggacctctatcccgaattctatcgcattgccactgaccctactatacatacagtcccggagggacgcccagtgaacgtttgtgtgggtaaggagtggtaccgctttccgtcatcttttcttctgccagataattggcagctccagtttattccaagcgaattccggggtcagctgcctaaaccattcgctgaggggcctctggccactagaattgttcccaccgacatgaacgaccagaacctggaggaaccttcccgttatatagatattagcaaatgtcattaccttgttgaccttgatactatgagggagacgcctcgggaacctaaatatagtagtaacaaggaggagtggatttcactggcataccggccatttctcgatgcatccagaagctctaagttgctgcgggctttttatgtcccttttttaagcgaccagtatacggtgtacgttaactatacaatcctgaaacctcgaaaggctaagcaaatacgtaaaaagagcggcggatag

SEQ ID NO: 35333 - DNA, 1344 bp, Artificial Sequence
  derived and/or modified sequence
atgatgctggccttcctggtgctgagcaccggcatgttctgcagcagcagcgccttcctgcccagcagcttctgcatgtacaccaccctgatcgccatgaccggctggtacatggacaagaccagcatcgccgtgctgggcgtggccgccggcgccatcctgggctggcccttcagcgccgccctgggcctgcccatcgccttcgacctgctggtgatgaagcacagatggaagagcttcttccactggagcctgatggccctgatcctgttcctggtgcccgtggtggtgatcgacagctactactacggcaagctggtgatcgcccccctgaacatcgtgctgtacaacgtgttcaccccccacggccccgacctgtacggcaccgagccctggtacttctacctgatcaacggcttcctgaacttcaacgtggccttcgccctggccctgctggtgctgcccctgaccagcctgatggagtacctgctgcagagattccacgtgcagaacctgggccacccctactggctgaccctggcccccatgtacatctggttcatcatcttcttcatccagccccacaaggaggagagattcctgttccccgtgtaccccctgatctgcctgtgcggcgccgtggccctgagcgccctgcagcacagcttcctgtacttccagaagtgctaccacttcgtgttccagagatacagactggagcactacaccgtgaccagcaactggctggccctgggcaccgtgttcctgttcggcctgctgagcttcagcagaagcgtggccctgttcagaggctaccacggccccctggacctgtaccccgagttctacagaatcgccaccgaccccaccatccacaccgtgcccgagggcagacccgtgaacgtgtgcgtgggcaaggagtggtacagattccccagcagcttcctgctgcccgacaactggcagctgcagttcatccccagcgagttcagaggccagctgcccaagcccttcgccgagggccccctggccaccagaatcgtgcccaccgacatgaacgaccagaacctggaggagcccagcagatacatcgacatcagcaagtgccactacctggtggacctggacaccatgagagagacccccagagagcccaagtacagcagcaacaaggaggagtggatcagcctggcctacagacccttcctggacgccagcagaagcagcaagctgctgagagccttctacgtgcccttcctgagcgaccagtacaccgtgtacgtgaactacaccatcctgaagcccagaaaggccaagcagatcagaaagaagagcggcggctag

SEQ ID NO: 35334 - DNA, 1323 bp, Artificial Sequence
  derived and/or modified sequence
atgatgctggccttcctggtgctttctaccgggatgttctgctccagctctgcctttctaccaagtagcttttgcatgtacaccaccctcattgcaatgacaggatggtatatggataagacatcaatcgccgttttgggtgtggctgcgggtgcaatactggggtggccttttagcgccgctcttgggctgccaattgcttttgacctgctcgtgatgaagcacagatggaagtctttcttccactggagcctaatggccctgatcctgttccttgttcccgttgtcgttattgattcttattactatggcaaactggtcatcgcccctttgaacatcgtgttgtacaatgtcttcaccccacatggtcccgatctgtatggtactgagccatggtatttctacttgatcaatggattccttaactttaatgttgccttcgcactcgctctgcttgtgctcccattaacaagcttaatggagtacctgttgcaacgatttcacgtgcagaatctgggacatccctactggctgaccctcgctccgatgtacatctggttcataatttttttcattcaacctcacaaagaggagcgctttctgtttcccgtgtaccccctaatttgcttgtgtggcgctgtggcactgtccgcgctgcaaaaatgctaccattttgtgttccagagatacaggctggagcactatacagtgaccagtaattggctagcactcggcacagtatttctgttcggactgctatccttctcccggtcagtggcattattcagggggtatcatggcccgctggacctgtaccccgaattctacaggatcgcaacagatccgactattcacacagttccagagggccggcctgtaaatgtgtgcgtggggaaagaatggtacaggttccctagtagtttcctcctccccgacaattggcagctccaattcatcccaagcgagttccgaggccaactgcccaaacctttcgccgagggccctttggcaacacggattgtaccaactgacatgaacgaccaaaatctagaggagccaagcaggtacatcgacataagcaagtgtcattacctagtagatctcgacaccatgcgggaaacccccagggaaccaaaatatagttccaataaagaagagtggatttcgctcgcgtaccgtcccttcctggacgcatcacgaagtagtaaactcctgcgggctttctacgtaccgtttctgagcgaccaatacaccgtatacgttaactacaccatcctaaaaccccggaaggctaaacagatacggaaaaaaagcgggggttag

SEQ ID NO: 35335 - DNA, 1323 bp, Artificial Sequence
  derived and/or modified sequence
atgatgctggccttcctggtgctgagcacaggcatgttctgcagcagcagcgccttcctgcccagcagcttctgcatgtacaccaccctgattgccatgacaggctggtacatggacaagaccagcattgctgtgctgggcgtggccgccggggccatcctgggctggcccttctctgctgccctgggcctgcccatcgcctttgacctgctggtgatgaagcaccgctggaagagcttcttccactggagcctgatggccctgatcctcttcctggtgcctgtggtggtgattgacagctactactacggcaagctggtgattgcccccctgaacatcgtgctgtacaacgtgttcaccccccacggccctgacctgtatggaacagagccctggtacttctacctgatcaatggcttcctgaacttcaacgtggcctttgccctggccctgctggtgctgcccctgaccagcctgatggagtacctgctgcagcgcttccacgtgcagaacctgggccacccctactggctgaccctggcccccatgtacatctggttcatcatcttcttcatccagccccacaaggaggagcgcttcctgtttcctgtgtaccccctcatctgcctgtgtggggctgtggccctgagcgccctgcagaagtgctaccactttgtgttccagcgctaccgcctggagcactacacagtgaccagcaactggctggccctgggcaccgtcttcctgtttggcctgctgtccttcagccgctctgtggccctcttccggggctaccacggccccctggacctgtacccagagttctaccgcatcgccacagaccccaccatccacacagtgcctgagggccggcctgtgaatgtgtgtgtgggcaaggagtggtaccgcttccccagcagcttcctgctgcctgacaactggcagctgcagttcatccccagcgagttccggggccagctgcccaagccctttgctgagggccccctggccacccgcatcgtgcccacagacatgaatgaccagaacctggaggagcccagccgctacatcgacatcagcaagtgccactacctggtggacctggacaccatgagggagaccccccgggagcccaagtacagcagcaacaaggaggagtggatcagcctggcctaccggcccttcctggatgccagccgcagcagcaagctgctgcgggccttctacgtgcccttcctgagtgaccagtacacagtgtatgtgaactacaccatcctgaagcccaggaaggccaagcagatcaggaagaagagcggcggctag

SEQ ID NO: 35336 - DNA, 1323 bp, Artificial Sequence
  derived and/or modified sequence
atgatgctggccttcctggtgctgagcaccggcatgttctgcagcagttccgcttttctgccttcaagtttttgtatgtacacgactctgattgctatgacagggtggtacatggataaaacctcaatcgccgtcctgggagtcgctgctggcgcaatattgggatggccatttagtgcagccctgggcttgccaattgccttcgacttactcgtgatgaagcaccggtggaaatcctttttccactggtccttaatggccttgattctgtttctcgttccggttgtggtcattgatagttactactatggaaagttggtgatagcgccactaaacattgtcctctacaatgtgtttacccctcacggaccagatctctacggcaccgagccttggtatttctacctgattaacggtttcctcaacttcaacgtggcattcgccctggccctattggtgctacctctgacctctttaatggagtacttactgcagagattccatgtgcagaacttgggccatccctattggctgactctcgcccccatgtatatatggttcataatcttttttatacagccccacaaagaagagagattcctgttcccggtctatcctttaatctgcctctgcggagcagtagccttatcggctcttcagaagtgctatcattttgtctttcagaggtatcgcctagagcactacactgtgacaagcaattggctcgcactgggaactgtcttcttattcggccttctcagttttagccggtccgttgccctgttccgaggctaccatggccctcttgacttgtaccccgagttctaccgtatcgcgacagatcccaccatccacacagtgcccgaaggaagacccgttaatgtttgcgtggggaaggagtggtatcgatttcccagtagctttctgctgccggataactggcaactgcagtttatccctagtgaattccgaggacagctgccaaaacccttcgccgaaggaccccttgcgactagaattgtacctaccgacatgaatgatcagaacctggaagagcccagtcgatacatcgatatttctaagtgccactatttggtggacctggacactatgagggagaccccacgagaaccgaaatactcaagcaacaaagaggaatggattagcttagcttacaggccttttctcgatgccagtcgctcaagcaagctgttaagagctttctatgtgccttttctgagtgatcagtatactgtctacgtgaattatacgatcctcaagcctagaaaggctaagcagatccgcaagaaaagcggcggctag

SEQ ID NO: 35337 - DNA, 1323 bp, Artificial Sequence
  derived and/or modified sequence
atgatgttagcctttcttgtgctctctaccggcatgttttgctcttcttctgctttccttcccagcagtttctgcatgtatacaacccttatcgctatgaccggctggtatatggacaaaacgtctatagccgtgctcggcgttgctgcgggagccattctgggctggccattctccgctgccctcggacttcccatcgcttttgatctcctagtgatgaagcaccgatggaagtccttttttcactggtctcttatggccttaatattgtttctggtgcccgtggttgttattgacagttattactacggcaagctggtaatcgcacccctgaacattgtgctatataacgtgttcaccccccacggccctgacctgtacgggacagaaccatggtatttctacctcatcaacgggtttctgaatttcaatgtagcttttgctctggcactgctggtgttacctcttaccagtctcatggagtatctcttgcagcgattccatgtgcaaaatcttggccacccctactggttgaccctggccccaatgtacatttggttcattatcttctttattcagccccataaggaggaacgattcctgtttcccgtgtatccgctgatatgtctttgcggagccgtcgctctcagcgcactgcagaagtgctaccatttcgtcttccagagatatcgcctcgaacattatacggtgacatcgaattggctggcactgggcaccgttttcctgtttgggcttctgtccttttccagaagtgttgcgcttttcaggggctatcatggccctctggatctgtatccggagttttaccgcatcgccactgatcccaccatccacactgtgcctgaggggcgtcccgtcaacgtgtgcgtggggaaggagtggtacagatttccttcatcttttctgcttcccgacaactggcagcttcaatttattccctccgagttccgtggacagctcccaaagccctttgcagagggtcctttagctactagaatcgtgccaacagatatgaacgatcagaatctggaggagccatcacgctatatagacatcagcaaatgtcactacctagtggatcttgatactatgagggagacaccacgggagccaaagtactcctccaacaaggaggagtggatctccctcgcatataggccctttcttgatgcgtcccggtctagcaagctgttgcgggcattctatgtgccctttctgtctgatcaatacaccgtgtacgtaaattacaccatccttaaacctagaaaggccaagcagatcagaaaaaagtcaggcggatag

SEQ ID NO: 35338 - DNA, 1323 bp, Artificial Sequence
  derived and/or modified sequence
atgatgctggccttcctggtgctgagcaccggcatgttctgcagcagcagcgccttcctgcccagcagcttctgcatgtacaccaccctgatcgccatgaccggctggtacatggacaagaccagcatcgccgtgctgggcgtggccgccggcgccatcctgggctggcccttcagcgccgccctgggcctgcccatcgccttcgacctgctggtgatgaagcacagatggaagagcttcttccactggagcctgatggccctgatcctgttcctggtgcccgtggtggtgatcgacagctactactacggcaagctggtgatcgcccccctgaacatcgtgctgtacaacgtgttcaccccccacggccccgacctgtacggcaccgagccctggtacttctacctgatcaacggcttcctgaacttcaacgtggccttcgccctggccctgctggtgctgcccctgaccagcctgatggagtacctgctgcagagattccacgtgcagaacctgggccacccctactggctgaccctggcccccatgtacatctggttcatcatcttcttcatccagccccacaaggaggagagattcctgttccccgtgtaccccctgatctgcctgtgcggcgccgtggccctgagcgccctgcagaagtgctaccacttcgtgttccagagatacagactggagcactacaccgtgaccagcaactggctggccctgggcaccgtgttcctgttcggcctgctgagcttcagcagaagcgtggccctgttcagaggctaccacggccccctggacctgtaccccgagttctacagaatcgccaccgaccccaccatccacaccgtgcccgagggcagacccgtgaacgtgtgcgtgggcaaggagtggtacagattccccagcagcttcctgctgcccgacaactggcagctgcagttcatccccagcgagttcagaggccagctgcccaagcccttcgccgagggccccctggccaccagaatcgtgcccaccgacatgaacgaccagaacctggaggagcccagcagatacatcgacatcagcaagtgccactacctggtggacctggacaccatgagagagacccccagagagcccaagtacagcagcaacaaggaggagtggatcagcctggcctacagacccttcctggacgccagcagaagcagcaagctgctgagagccttctacgtgcccttcctgagcgaccagtacaccgtgtacgtgaactacaccatcctgaagcccagaaaggccaagcagatcagaaagaagagcggcggctag

SEQ ID NO: 35339 - protein, 35 aa, Artificial Sequence
  derived and/or modified sequence
  misc_feature (1)..(1): Xaa can be any naturally occurring amino acid
XCSTANGEKDSITLISMKNINMNNGKQSLSAEKVL

SEQ ID NO: 35340 - DNA, 108 bp, Artificial Sequence
  derived and/or modified sequence
tgatgcagcaccgccaacggcgagaaggacagcatcaccctgatcagcatgaagaacatcaacatgaacaacggcaagcagagcctgagcgccgagaaggtgctgtag

SEQ ID NO: 35341 - DNA, 450 bp, Artificial Sequence
  derived and/or modified sequence
ctgctccacagccaatggagagaaagacagcatcacccttatctccatgaagaacatcaacatgaataatggcaaacaaagtctctcagcagagaaggttctttaaaagcaactttgggtccccatgagtccaaggatgatgcagctgccctgtgactacaaggaggaagagatggaattagtagaggcaatgaaccacatgtaaattattttattgtttcatgtctgcttctagatctaaaggacactagcattgccccagatctgggagcaagctaccaacaggggagactctttcctgtatggacagctgctgtggaaatactgcctgcttctcccacctcctcagagccacaggaaagaggaggtgacagagagagagcaaggaaagtgatgaggtggattgatactttctactttgcattaaaattattttctagcctgcagtct

SEQ ID NO: 35342 - DNA, 108 bp, Artificial Sequence
  derived and/or modified sequence
tgatgtagcacggcgaacggcgaaaaggactctattaccctcatttctatgaagaatattaatatgaataacggcaaacagtcactctctgccgaaaaggtgttgtag

SEQ ID NO: 35343 - DNA, 108 bp, Artificial Sequence
  derived and/or modified sequence
tgatgcagcacagccaacggggagaaggacagcatcaccctcatctccatgaagaacatcaacatgaacaacgggaagcagagcctgtctgctgagaaggtgctgtag

SEQ ID NO: 35344 - DNA, 108 bp, Artificial Sequence
  derived and/or modified sequence
tgatgcagcaccgccaacggcgagaaggacagcatcaccctgatcagcatgaagaacattaatatgaataacggcaagcagtcccttagtgccgagaaggtcctgtag

SEQ ID NO: 35345 - DNA, 108 bp, Artificial Sequence
  derived and/or modified sequence
tagtgcagtactgctaatggggagaaggactcaattacccttatatcgatgaagaatatcaacatgaataatgggaagcagtctctcagcgcggaaaaagttctatag

SEQ ID NO: 35346 - protein, 321 aa, Artificial Sequence
  derived and/or modified sequence
MRALAALSAPPNERLLPRDPAATRDPDAARPARRSAVERLAADRAKYVRGRPGTGRGVASEGSGPGAIKCPGNDPGPPARAPAPVARRAIARKPLRPDSLIIYRQKCEFVRGSGADGPRASLVKKLFQGPGKDKAPVPRTGDEGKAGNPETVPTTPGPAADPAIPETPAPAARSAAPSSVPAAPPGPEPRVVRRRGLQRSQSDLSSRYSAALAESDTFFQYCGLDPEVVEALGRENFTAGSDCVTLKVRSVSVATSGSGFSRHSGGDDEGLQEEELIEQVPSTTSVIERNARIIKWLYTCKKAKETPSQEQSRTRGSKPSR

SEQ ID NO: 35347 - DNA, 966 bp, Artificial Sequence
  derived and/or modified sequence
atgagagccctggccgccctgagcgccccccccaacgagagactgctgcccagagaccccgccgccaccagagaccccgacgccgccagacccgccagaagaagcgccgtggagagactggccgccgacagagccaagtacgtgagaggcagacccggcaccggcagaggcgtggccagcgagggcagcggccccggcgccatcaagtgccccggcaacgaccccggcccccccgccagagcccccgcccccgtggccagaagagccatcgccagaaagcccctgagacccgacagcctgatcatctacagacagaagtgcgagttcgtgagaggcagcggcgccgacggccccagagccagcctggtgaagaagctgttccagggccccggcaaggacaaggcccccgtgcccagaaccggcgacgagggcaaggccggcaaccccgagaccgtgcccaccacccccggccccgccgccgaccccgccatccccgagacccccgcccccgccgccagaagcgccgcccccagcagcgtgcccgccgccccccccggccccgagcccagagtggtgagaagaagaggcctgcagagaagccagagcgacctgagcagcagatacagcgccgccctggccgagagcgacaccttcttccagtactgcggcctggaccccgaggtggtggaggccctgggcagagagaacttcaccgccggcagcgactgcgtgaccctgaaggtgagaagcgtgagcgtggccaccagcggcagcggcttcagcagacacagcggcggcgacgacgagggcctgcaggaggaggagctgatcgagcaggtgcccagcaccaccagcgtgatcgagagaaacgccagaatcatcaagtggctgtacacctgcaagaaggccaaggagacccccagccaggagcagagcagaaccagaggcagcaagcccagcagatag

SEQ ID NO: 35348 - DNA, 966 bp, Artificial Sequence
  derived and/or modified sequence
atgcgcgccctggcagccctatccgcacctccaaatgagcgcttgttaccccgtgatcctgctgccactagggaccccgatgccgcaaggcccgcacgccgaagcgcagtggaacgtctcgccgctgaccgagcaaagtatgttcggggcaggccaggcaccgggcgtggagtggcttctgaaggctccggtcccggcgccattaaatgccccggaaacgaccctggtcccccagctagggctcctgcccccgttgcaagacgggccatcgccaggaaacccctgaggcccgactccctgatcatctacagacaaaagtgcgaatttgtgcgcgggtcaggggccgacggcccacgcgcaagtctcgttaagaagctatttcagggtccaggcaaagacaaggcccccgtcccccgtactggtgacgagggaaaagctggaaatcccgaaaccgtgcctactactccaggacccgccgcagatcccgccatcccggagaccccggcaccagcagcccggtctgcagccccgtctagtgttcctgctgccccgcctggtcccgaacctcgagtcgtccggagacggggcctgcaaagaagccaatctgatctctcatccagatactctgccgcactcgcagaaagtgatactttctttcagtactgtgggctggacccagaagttgtcgaagctctgggaagggaaaacttcacggccgggagcgattgcgtcaccttgaaagtgagatccgtgtccgtggctaccagtggctcgggcttcagtcgccattcaggcggcgatgacgaaggcctccaggaggaggagctcatcgagcaggttccatcaaccacgtccgtcatcgaacgcaatgctagaatcataaagtggctttatacctgtaagaaggcaaaggagaccccaagtcaggagcagtccaggacccgaggtagcaaacctagtagatag

SEQ ID NO: 35349 - DNA, 966 bp, Artificial Sequence
  derived and/or modified sequence
atgagggccctggccgccctgagcgcccccccaaatgaaaggctgctgccccgggaccctgctgccacccgggaccctgatgctgcccggcctgccaggagatctgctgtggagcggctggccgctgaccgggccaagtatgtgcggggccggcccggcaccggccggggcgtggccagcgagggcagcggccctggggccatcaagtgccctggaaatgaccccggccccccagcccgggccccagcccctgtggcccggcgggccatcgccaggaagcccctgcggccagacagcctcatcatctaccggcagaagtgtgaatttgtgcggggcagcggggctgatggcccccgggccagcctggtgaagaagctgttccagggccctgggaaggacaaggcccctgtgcccaggactggagatgagggcaaggccggcaaccctgagaccgtgcccaccaccccaggccctgctgctgaccctgccatccctgagaccccagccccagctgcccggtctgctgcccccagctctgtgcctgctgcccctcctggccctgagccccgggtggtgagaagaagaggcctgcagaggagccagagcgacctgagcagccgctacagcgctgccctggccgagagtgacaccttcttccagtactgcggcctggaccctgaggtggtggaggccctgggccgggagaacttcaccgctggcagtgactgtgtgaccctgaaggtgcgctctgtgtctgtggccaccagcggcagcggcttcagccgccacagcggaggagatgatgagggcctgcaggaggaggagctgattgagcaggtgcccagcaccacctctgtgattgaaagaaatgcccgcatcatcaagtggctgtacacctgcaagaaggccaaggagacccccagccaggagcagagcaggacccggggcagcaagcccagcaggtag

SEQ ID NO: 35350 - DNA, 966 bp, Artificial Sequence
  derived and/or modified sequence
atgcgggccctggccgccctgagcgccccccccaacgagcggctgctcccacgcgaccccgctgcaactagggatcccgatgccgctcggcccgcgagaaggtccgcagttgaacggttggctgccgaccgtgcaaaatatgtccggggccgccccggtactgggagaggagttgcctctgagggttccggaccaggtgctatcaagtgccccggcaatgaccctgggcctcctgcaagagcgcccgctcccgttgctagacgtgccatcgctcgcaagccgctgaggcccgatagcctaataatttaccgccaaaaatgcgagttcgtgaggggaagtggtgccgacggccctcgggccagtttagtgaagaagctgtttcagggacccgggaaagacaaagctccagtcccgcgcacaggagacgagggcaaagctggcaacccagaaacagtccctacaactcccggcccggccgccgatccagccattccagaaacacccgcccctgcagcccgctccgccgcgccctcaagtgtgcctgctgcaccaccaggtccagagccccgcgtcgtccgcaggagaggactacagcgctctcagtcagacctttccagcaggtactctgcagcattggcagagtccgacacctttttccagtactgcgggctggatccagaagtagtcgaggccctgggacgcgagaactttaccgcgggctccgactgcgtaactctaaaggtgcggtccgtgtctgttgcaacatctggctccgggttttccagacatagcggaggagatgacgaaggtttgcaggaagaggagcttatagaacaggttcccagtactacatccgtgattgaaagaaatgcccggatcatcaagtggctgtacacgtgcaagaaggctaaagaaacccctagccaggaacagtctcgaacgaggggttccaagccctcaagatag

SEQ ID NO: 35351 - DNA, 966 bp, Artificial Sequence
  derived and/or modified sequence
atgcgggcacttgccgcactgtcggctccacccaacgaaaggttgctcccacgcgatcctgcagctaccagggatcctgatgccgcacggcctgcgcgtcgctccgccgtcgagagactggctgccgacagggccaaatacgtccgtggtaggccgggaacggggaggggagtggcatccgagggctccggccctggcgcaatcaaatgtcctggaaacgatccaggccctcccgctcgggctcccgctcccgtggctaggcgcgcaatcgcaaggaagccgcttcgtccagacagtctgatcatctataggcagaagtgcgagttcgtccgaggcagtggcgcagacggcccaagagcatccctagtaaagaaactgttccagggtccagggaaggacaaagcgcctgttcccaggacaggagacgaaggcaaggctgggaatccggagactgtgccaaccactccaggtcccgctgcagatccggctattcccgaaactcctgccccagctgctcgttccgctgcccctagtagcgtccctgccgctcctcctggtcctgagccgagggtcgtgaggcgacgtggtctgcagcgttcacagtctgacttgtcatcgaggtattccgccgctctcgctgagagcgatacttttttccaatattgtggcctggatcccgaggttgtggaggctctgggacgcgaaaatttcaccgcgggaagcgactgtgtgacactcaaggtgaggtcggtttccgtcgcaacgtctgggtctggattctcccgtcactccggcggagatgatgaaggccttcaggaggaggagcttatagagcaggtgcctagtaccacatccgtcatcgagaggaatgcacgtataatcaagtggctttatacatgcaagaaggcaaaggagactccctcacaggagcagtccaggacccgcggaagcaaacccagtagatag

SEQ ID NO: 35352 - DNA, 3760 bp, Artificial Sequence
  derived and/or modified sequence
atgcgcgccctggcggccctgagcgcgcccccgaacgagcggctccttccccgggaccccgcggctacccgggaccccgacgccgcgcggccggcgcgcaggagcgcagtggagaggctggcggcggatcgcgccaagtatgtgcggggtcggccggggactggccggggcgtcgcttccgagggcagcggcccgggggcgatcaagtgcccggggaacgaccctgggcccccggcccgcgccccggccccggtggcgcgcagggctattgcgcggaagccgttgagaccggactcgctgatcatctaccggcagaaatgcgaattcgtgcgaggatcgggcgccgacggccccagggcaagcctggtgaagaagctcttccaggggccgggtaaggacaaggcgccggtgccccggacgggagacgagggcaaggccgggaacccggagacggtcccgaccactcctggccccgcggcggaccccgcaatccccgagaccccagccccagccgcgcggtccgcggcgccctccagtgtcccggccgcgccccctgggccagagccgcgggtggtgaggcgtcgggggctgcagcgctcacagtcggacctcagctcccgctattccgctgccttggccgagtctgacaccttcttccagtactgcggcctggaccccgaggtggtggaggccctggggagggagaacttcaccgcggggtcggactgtgtgaccctcaaggtgcgcagcgtgagcgtcgccacctccggcagcggcttctcccggcacagcggcggcgacgacgaggggctgcaggaggaggagctgatagagcaggtgcccagcaccacttcggtcatcgagaggaacgcccgcatcatcaagtggctgtacacctgtaagaaggccaaggagacccccagccaggagcagagccggacccgaggaagcaaaccttcccgatgatgaagacttcttgaaggatttcatgggtgatttgggatcccaggaccatttggctagtgtgcctaggtgaccacatgattgctgttttaccaggaatgcagcatcccattgacaaaacaagtgctctgagaaggtttaaaatactacagagaatatgggaacacagaccttgaaatttagctgagttgtaacagctgaaactccaagaggtgtcttccttgtttgaggtgaaactagtgttgcttccagagggcagctggaaaccgtaaagctgtttggaaatctttttgactgacttgctgacaaagaggtactgtgatgcattttaacaatatctaagttgatttttttttaaatcaaggaaaataaaaaccaagcatgaatgctatggtatgtgccccttttgaccatcctgggctgattaacatcatttaaatcaaagtaatcataaaaaggcatattctacttcaattatgtggtcaaataagagtaaacacacacactcacacatgctgaccccaattgccagagcattactgcactataaattacggttaattcccaaattatactactgtttatcttatttaacaagtcagaaagcacttttaaaataacttgagggctacaaggtcattctattaatgtcattctccattcgggttgtaggcatgtggaagtacccattaaaagataagttagagtttaaatactgataaacaaaaccttttattgcaactggacagtttctggagagttagcggaagaatcttggagtttcctttggtcagatgaatacaacatttcacttttgcagcactatttagaatgtactccatggttctcttgttcccaacttccaaaaagaacagaaaactttggtttacacagaacacgggcatctgaggcaggacctcttccctgccctttgatctgactcacacctccacatatgacgtaatcaacccaaatttgacaccaattcactcttttctgcaaagggcatattttgaaacaagggacagcctgagggcggctataatgagaatgttcatgggggttactgggtccctaattctgaacttgcttatgacacccagagtgaatagattcagattcagaaccttctgagaaataacccaaagaaaatttgttacccagccaattcttcgaaagcttaatatcaaaatatatcttttcaagaagaaaatcgttagagagaagaatgtggaggggagagaaatgggtttctcattgatatgatattttgttaaccatttcattttgaattattcaagttttggttaatattgtattcttttttcgtaactattttaccgtgagagtaggtcattgggttacttagatatttatttttacacagttattagtcttcagatagttttattttacttcatatgattttagtttttgtcagtataattttaaatcatgtttttcttggtcatctctttgtgtatattgtgtaattggattttcattgactgcaagtggagtgtttgccactcaattcagtactcagtactatggtgacttgttttcaaataagtctcagatacacatttagggagcctttgctggccgaatatagactctgtcaggacagcaggtcccctgatctaagaattttccccaatggttgctctaaaaatgctgctattttgctgttcactgtattgcacttagttaaaaagaagataatgtgaaagatgagagcagttttttaaaggatcttttcatatacccaattcccttattttcagatgtcccatcaattttagatatgaaagctttaagtaaaagtgtgtatgcctttctactgtcagaacaggatggatgcagcctgggtcagatttatttaagataaaaatcatgcagactcatcattcatatcataggtgaaaaatgtaaaaaccaaatggtttccactaaagccaccaagatcttttagaaatgtttgcacctttggtggtggcacaggaaaagagaagaattcagctggagtgaattctagaagtagatatcagaaacggggcatgaagaacaggggaactgggtggcatcagactcctaaagaagtgagttaattttccttcccttccattcagattcatgccacagctccatatcttgagtatgtgtaagaggtgagttccttcttcagccaggggcggtggctcatgcctttaatcccaatgctttgggaggccaaggtgggaggatcacttgtgccttggggttcaaggttgcagtgaaccatgattgcaccactgcactccagcctgagtgacagagcaagaccctgtctctaaaaatatatataaaaagtaaaactaaagaacttcttgcctaaacctgaattaccgcaatttgctgagtgactttgagaaaaatcagactgtttagttcagtcgggatgaaaagcttgcgattgcttcccacaagaatgggcaatagtgacggctgcaaggtacttttatttgttcatgaaagaacgacaatttttcaaaatgtaattaaacataatagaatgttttaaactactgggcactgaaactggaagaaaaaggaggctttattgaacattcccctttttcagttggttcaaagttcagcactgtggttatcattggtgatgccagaaaacattagtagacttagacaattgctatggcagtttctaaacagagctttttctatacactatttgcaactggagtgcaatattgtatattctgtgttaaagaaataaagtatttttatcatttattaa

SEQ ID NO: 35353 - protein, 201 aa, Artificial Sequence
  derived and/or modified sequence
MSGGGVIRGPAGNNDCRIYVGNLPPDIRTKDIEDVFYKYGAIRDIDLKNRRGGPPFAFVEFEDPRDAEDAVYGRDGYDYDGYRLRVEFPRSGRGTGRGGGGGGGGGAPRGRYGPPSRRSENRVVVSGLPPSGSWQDLKDHMREAGDVCYADVYRDGTGVVEFVRKEDMTYAVRKLDNTKFRSHEVGYTRILFFDQNWIQWS

SEQ ID NO: 35354 - DNA, 606 bp, Artificial Sequence
  derived and/or modified sequence
atgagcggtggcggggtgatcagaggccccgccgggaacaacgattgccggatctatgtcgggaatctaccccccgacatcagaactaaagacattgaggatgtattctacaagtatggggcaatccgagatatagatctgaaaaatcggcgtggcggccccccctttgccttcgtggaattcgaagacccacgggacgccgaagacgccgtgtacgggcgtgatgggtacgactacgacggctatagattgagagtagagttcccaaggtcaggacggggtacaggccgcggtgggggcggtggcggggggggtggcgcaccccggggtaggtatggccccccttccagaagaagcgagaacagagttgtggtgagtggactgccgccgtccggatcttggcaggatctcaaagaccacatgcgagaggctggagatgtgtgttacgcggacgtgtaccgcgacggaacaggagtggtggaattcgtacggaaggaagacatgacttatgcagtgcggaaactggataacacaaagtttaggagtcatgaagtggggtacacacgcatcctgttttttgatcagaattggatccagtggtcttag

SEQ ID NO: 35355 - DNA, 606 bp, Artificial Sequence
  derived and/or modified sequence
atgtctgggggcggcgtcatccggggccctgctggcaacaatgactgccgcatctacgtgggcaacctgcccccagacatccgcaccaaggacattgaagatgtgttctacaagtatggagccatccgggacatcgacctgaagaacagaagaggaggccccccatttgcctttgtggagtttgaggaccccagagatgctgaagatgctgtgtatggaagagatggctatgactatgatggctaccgcctgcgggtggagttccccaggagcggccggggcaccggccggggcggcggcggcggcggcggcggcggggccccccggggccgctatggcccccccagcagaagaagtgagaacagagtggtggtgtctggcctgcccccatctggctcctggcaggacctgaaggaccacatgagggaggccggagatgtgtgctacgcagatgtgtacagagatggcactggagtggtggagtttgtgaggaaggaggacatgacctatgctgtgaggaagctggacaacaccaagttccgcagccatgaggtgggctacacccgcatcctcttctttgaccagaactggatccagtggagctag

SEQ ID NO: 35356 - DNA, 606 bp, Artificial Sequence
  derived and/or modified sequence
atgagcggcggcggcgtgatccggggccccgccggcaacaacgactgccgcatttacgtcggcaatctccctccagacatccgcaccaaggacatcgaagacgttttctataaatatggagcgattagggatatagacttaaaaaatagacggggtggtcccccttttgcgtttgtggagtttgaggaccctcgggatgctgaggacgcggtgtacgggagagacggctatgactacgacgggtatcggctgagggtggaattcccaaggtcgggccgagggactgggaggggcggcggcggcggcgggggaggcggcgcgcctcgcggacgctatggccccccttctcgccggtctgagaatcgtgtcgtcgtcagtggactgccccccagcggaagctggcaagacctgaaggaccacatgcgcgaggcgggagacgtgtgctacgcagacgtttacagggatgggaccggcgtggtcgagtttgtccgaaaagaagacatgacttacgcagtaaggaagctggataataccaaatttcgctcgcacgaggtgggttacacccggattctattcttcgaccagaattggatccagtggagctag

SEQ ID NO: 35357 - DNA, 606 bp, Artificial Sequence
  derived and/or modified sequence
atgagtggtgggggtgttattcgtgggcctgcaggcaacaacgattgtcgcatttatgtgggcaacttgccacccgatatccgcactaaggacattgaagacgttttctacaaatatggggcaattcgcgacatagatctgaagaacaggcgtggtggtcccccattcgcatttgtggagtttgaggaccctcgggacgccgaagacgctgtctacgggcgtgatggatacgattacgacgggtacaggctccgagtggagtttccacgctcaggcagaggaaccggcaggggcggtggcggagggggaggtgggggtgctccgcgaggacgttacggccctcccagtaggaggagcgaaaaccgagtggtggtgtccgggctgccgccttctgggtcttggcaggacctgaaagaccacatgcgagaggccggtgacgtgtgctatgccgatgtgtaccgagatggcactggagtcgtggaatttgtgcggaaggaagacatgacatatgcagtaaggaaactcgacaatactaaatttcggagccacgaagtgggatatacacgtatactgttttttgatcagaactggattcagtggtcctag

SEQ ID NO: 35358 - DNA, 2983 bp, Artificial Sequence
  derived and/or modified sequence
cgagctgataaaggcgccattttggaggggccgcgggagacgtggtgccgctgcgggctcgctctgccgtgcgctaggcttggtgggaaggcctgttctcgagtccgcgcttttcgtcaccgccatgtcgggaggtggtgtgattcgtggccccgcagggaacaacgattgccgcatctacgtgggtaacttacctccagacatccgaaccaaggacattgaggacgtgttctacaaatacggcgctatccgcgacatcgacctcaagaatcgccgcgggggaccgcccttcgccttcgttgagttcgaggacccgcgagacgcggaagacgcggtgtatggtcgcgacggctatgattacgatgggtaccgtctgcgggtggagtttcctcgaagcggccgtggaacaggccgaggcggcggcgggggtggaggtggcggagctccccgaggtcgctatggccccccatccaggcggtctgaaaacagagtggttgtctctggactgcctccaagtggaagttggcaggatttaaaggatcacatgcgtgaagcaggtgatgtatgttatgctgatgtttaccgagatggcactggtgtcgtggagtttgtacggaaagaagatatgacctatgcagttcgaaaactggataacactaagtttagatctcatgaggtaggttatacacgtattcttttctttgaccagaattggatacagtggtcttaacagtggaatttcaaggtaaggattcaggcaaggttgtccaagtaaattgccagatttctggttttagttacattgtattcattcagcatgtctgaagatagatgaaagcttagatctttcaatggaaagttctgtctatccaatagggagaaactgcctacatccgggttaaagttgatgggcccagaagtccaagttatggaagatctcgatctcgaagccgtagtcgtagcagaagccgtagcagaagcaacagcaggagtcgcagttactccccaaggagaagcagaggatcaccacgctattctccccgtcatagcagatctcgctctcgtacataagatgattggtgacactttttgtagaacccatgttgtatacagttttcctttattcagtacaatcttttcattttttaattcaaactgttttgttcagaatgggctaaagtgttgaattgcattcttgtaatatccccttgctcctaacatctacattcccttcgtgtctttgataaattgtattttaagtgatgtcatagacaggattgtttaaatttagttaactccatactcttcagactgtgatattgtgtaaatgtctatctgccctggtttgtgtgaactgggatgttgggggtgtttgtggttatcttacctggggaagttcttatgtttatcttgcttttcatgtgtctttctgtagacatatctgaagagatggattaagaatgctttggattaaggattgtggagcacatttcaatcattttaggattgtcaaaaggaggattgaggaggatcagatcaataatggaggcaatggtatgactccaagtgctattgtcacagatgaaattggcagtattgaccttatactaaaaggcaggggttaaaaatgattatatacattttccttaaaacacttgcaaacattttattcagttgtctttagctacaattgctttgctttttaaaccttggcaattgtggcaaaattatattgcccattttgtagcaacttattttgctcccttccccccatttttgttttaatagggactaatgtgggaagaactggctaatttgtcacagtgcttagttacaactgttaatgtgtgacctgctgttggtgtacatgtgggtacagggtgtttttaaatccaacaagatagagtataatatcaatactgctaaatctgcatgtcctctgtgtgactgatagagcgttgctatttcatttttttaagacaaaatgaaagcaaaatatagagttccaatgtattggtgtagataatctagttgggaatacttttaagtctcaccttcccctttaaactaatattcataattggttcatatgtttaaaagactttaatttacaaattaaattgcaaatgggagcattagatttagttttagacttaggtgggtagcaatgccagtaaacttaaattacgtaacttcttgcaaccacgaaacctgtaatacgctgtacagtaacaagtgttggcattatcagttgaactgtaaatacaaaatgcttcttccaattagtctctatgatgattaagtttctaaaatttatctgaacaccattcagaaacttgttttggggaatttgatagttattgatgtgcatctgttaaactgatgacagacataactcatcattccccagaaaccttttttgattacagtatctaacattttgcctcctcttttttggttttgctggttataaaggtttggattggagagggctcactggatcccaatccttggagctggatcattggattcaaatcataatgtggataggatagggaggatgaattaccaggattcatggagcgggatcagattaccaggaacataggagtggattcctgccccaaccaaaccgcattcgtgtggatttttttattcaacttaattggctattccaaagattttttttttcctatttttgacgattggagcccttaagatgcacgatggaattgtgttttgcgttttttggtaaaaggagcaaagcgaggacctggagataaacgctggagcaatctccttggaaggattcagcacgagtagatggtaaacatttaaaggggaaagggggggtttgtttaaaatagtaaatcagtaagtcacttctaaatttaaagaaaacaaaattggagttgaagaataagtaggtttccaattggctattgccgttttctttgaaaaaataaacattttttaaaaaact

SEQ ID NO: 35359 - DNA, 606 bp, Artificial Sequence
  derived and/or modified sequence
atgagcggcggcggcgtgatcagaggccccgccggcaacaacgactgcagaatctacgtgggcaacctgccccccgacatcagaaccaaggacatcgaggacgtgttctacaagtacggcgccatcagagacatcgacctgaagaacagaagaggcggcccccccttcgccttcgtggagttcgaggaccccagagacgccgaggacgccgtgtacggcagagacggctacgactacgacggctacagactgagagtggagttccccagaagcggcagaggcaccggcagaggcggcggcggcggcggcggcggcggcgcccccagaggcagatacggcccccccagcagaagaagcgagaacagagtggtggtgagcggcctgccccccagcggcagctggcaggacctgaaggaccacatgagagaggccggcgacgtgtgctacgccgacgtgtacagagacggcaccggcgtggtggagttcgtgagaaaggaggacatgacctacgccgtgagaaagctggacaacaccaagttcagaagccacgaggtgggctacaccagaatcctgttcttcgaccagaactggatccagtggagctag

SEQ ID NO: 35360 - protein, 1756 aa, Artificial Sequence
  derived and/or modified sequence
MRRSKAYGERYLASVQGSAPSPGKKLRGFYFAKLYYEAKEYDLAKKYVCTYLSVQERDPRAHRFLGLLYELEENTEKAVECYRRSLELNPPQKDLVLKIAELLCKNDVTDGRAKYWVERAAKLFPGSPAIYKLKEHLLDCEGEDGWNKLFDWIQSELYVRPDDVHMNIRLVELYRSNKRLKDAVARCHEAERNIALRSSLEWNSCVVQTLKEYLESLQCLESDKSDWRATNTDLLLAYANLMLLTLSTRDVQESRELLESFDSALQSAKSSLGGNDELSATFLEMKGHFYMHAGSLLLKMGQHGNNVQWQALSELAALCYVIAFQVPRPKIKLIKGEAGQNLLEMMACDRLSQSGHMLLNLSRGKQDFLKEVVETFANKSGQSVLYNALFSSQSSKDTSFLGSDDIGNIDVQEPELEDLARYDVGAIQAHNGSLQHLTWLGLQWNSLPALPGIRKWLKQLFHHLPQETSRLETNAPESICILDLEVFLLGVVYTSHLQLKEKCNSHHSSYQPLCLPLPVCKRLCTERQKSWWDAVCTLIHRKAVPGNSAELRLVVQHEINTLRAQEKHGLQPALLVHWAKCLQKMGRGLNSSYDQQEYIGRSVHYWKKVLPLLKIIKKNSIPEPIDPLFKHFHSVDIQASEIVEYEEDAHITFAILDAVHGNIEDAVTAFESIKSVVSYWNLALIFHRKAEDIENDAVFPEEQEECKNYLRKTRDYLIKIIDDSDSNLSVVKKLPVPLESVKEMLKSVMQELEDYSEGGPLYKNGSLRNADSEIKHSTPSPTKYSLSPSKSYKYSPKTPPRWAEDQNSLRKMICQEVKAITKLNSSKSASRHRWPTENYGPDSVPDGYQGSQTFHGAPLTVATTGPSVYYSQSPAYNSQYLLRPAANVTPTKGSSNTEFKSTKEGFSIAVSADGFKFGISEPGNQEKKSEKPLENDTGFQAQDISGQKNGRGVIFGQTSSTFTFADVAKSTSGEGFQFGKKDPNFKGFSGAGEKLFSSQCGKMANKANTSGDFEKDDDACKTEDSDDIHFEPVVQMPEKVELVTGEEGEKVLYSQGVKLFRFDAEISQWKERGLGNLKILKNEVNGKPRMLMRRDQVLKVCANHWITTTMNLKPLSGSDRAWMWLASDFSDGDAKLERLAAQFKTPELAEEFKQKFEECQRLLLDIPLQTPHKLVDTGRAAKLIQRAEEMKSGLKDFKTFLTNDQTKVTEEENKGSGTGAAGASDTTIKPNPENTGPTLEWDNYDLREDALDDNVSSSSVHDSPLASSPVRKNIFRFDESTTGFNFSFKSALSLSKSPAKLNQSGTSVGTDEESDVTQEEERDGQYFEPVVPLPDLVEVSSGEENEQVVFSHRAELYRYDKDVGQWKERGIGDIKILQNYDNKQVRIVMRRDQVLKLCANHRITPDMSLQNMKGTERVWVWTACDFADGERKVEHLAVRFKLQDVADSFKKIFDEAKTAQEKDSLITPHVSRSSTPRESPCGKIAVAVLEETTRERTDVIQGDDVADAASEVEVSSTSETTTKAVVSPPKFVFGSESVKRIFSSEKSNPFAFGNSSATGSLFGFSFNAPLKSNDSETSSVAQSGSESKVEPKKCELSKNSDIEQSSDSKVKNLSASFPMEESSINYTFKTPEKEPPLWHAEFTKEELVQKLSSTTKSADQLNGLLRETEATSAVLMEQIKLLKSEIRRLERNQEESAANVEHLKNVLLQFIFLKPGSERESLLPVINTMLQLSPEEKGKLAAVAQGLQETSIPKKK

SEQ ID NO: 35361 - protein, 1013 aa, Artificial Sequence
  derived and/or modified sequence
MLKSVMQELEDYSEGGPLYKNGSLRNADSEIKHSTPSPTKYSLSPSKSYKYSPKTPPRWAEDQNSLRKMICQEVKAITKLNSSKSASRHRWPTENYGPDSVPDGYQGSQTFHGAPLTVATTGPSVYYSQSPAYNSQYLLRPAANVTPTKGSSNTEFKSTKEGFSIAVSADGFKFGISEPGNQEKKSEKPLENDTGFQAQDISGQKNGRGVIFGQTSSTFTFADVAKSTSGEGFQFGKKDPNFKGFSGAGEKLFSSQCGKMANKANTSGDFEKDDDACKTEDSDDIHFEPVVQMPEKVELVTGEEGEKVLYSQGVKLFRFDAEISQWKERGLGNLKILKNEVNGKPRMLMRRDQVLKVCANHWITTTMNLKPLSGSDRAWMWLASDFSDGDAKLERLAAQFKTPELAEEFKQKFEECQRLLLDIPLQTPHKLVDTGRAAKLIQRAEEMKSGLKDFKTFLTNDQTKVTEEENKGSGTGAAGASDTTIKPNPENTGPTLEWDNYDLREDALDDNVSSSSVHDSPLASSPVRKNIFRFDESTTGFNFSFKSALSLSKSPAKLNQSGTSVGTDEESDVTQEEERDGQYFEPVVPLPDLVEVSSGEENEQVVFSHMAELYRYDKDVGQWKERGIGDIKILQNYDNKQVRIVMRRDQVLKLCANHRITPDMSLQNMKGTERVWVWTACDFADGERKVEHLAVRFKLQDVADSFKKIFDEAKTAQEKDSLITPHVSRSSTPRESPCGKIAVAVLEETTRERTDVIQGDDVADAASEVEVSSTSETTTKAVVSPPKFVFGSESVKRIFSSEKSNPFAFGNSSATGSLFGFSFNAPLKSNDSETSSVAQSGSESKVEPKKCELSKNSDIEQSSDSKVKNLSASFPMEESSINYTFKTPEKEPPLWHAEFTKEELVQKLSSTTKSADQLNGLLRETEATSAVLMEQIKLLKSEIRRLERNQEESAANVEHLKNVLLQFIFLKPGSERESLLPVINTMLQLSPEEKGKLAAVAQGLQETSIPKKK

SEQ ID NO: 35362 - protein, 1756 aa, Artificial Sequence
  derived and/or modified sequence
MRRSKAYGERYLASVQGSAPSPGKKLRGFYFAKLYYEAKEYDLAKKYVCTYLSVQERDPRAHRFLGLLYELEENTEKAVECYRRSLELNPPQKDLVLKIAELLCKNDVTDGRAKYWVERAAKLFPGSPAIYKLKEHLLDCEGEDGWNKLFDWIQSELYVRPDDVHMNIRLVELYRSNKRLKDAVARCHEAERNIALRSSLEWNSCVVQTLKEYLESLQCLESDKSDWRATNTDLLLAYANLMLLTLSTRDVQESRELLESFDSALQSAKSSLGGNDELSATFLEMKGHFYMHAGSLLLKMGQHGNNVQWQALSELAALCYVIAFQVPRPKIKLIKGEAGQNLLEMMACDRLSQSGHMLLNLSRGKQDFLKEVVETFANKSGQSVLYNALFSSQSSKDTSFLGSDDIGNIDVQEPELEDLARYDVGAIQAHNGSLQHLTWLGLQWNSLPALPGIRKWLKQLFHHLPQETSRLETNAPESICILDLEVFLLGVVYTSHLQLKEKCNSHHSSYQPLCLPLPVCKRLCTERQKSWWDAVCTLIHRKAVPGNSAELRLVVQHEINTLRAQEKHGLQPALLVHWAKCLQKMGRGLNSSYDQQEYIGRSVHYWKKVLPLLKIIKKNSIPEPIDPLFKHFHSVDIQASEIVEYEEDAHITFAILDAVHGNIEDAVTAFESIKSVVSYWNLALIFHRKAEDIENDAVFPEEQEECKNYLRKTRDYLIKIIDDSDSNLSVVKKLPVPLESVKEMLKSVMQELEDYSEGGPLYKNGSLRNADSEIKHSTPSPTKYSLSPSKSYKYSPKTPPRWAEDQNSLRKMICQEVKAITKLNSSKSASRHRWPTENYGPDSVPDGYQGSQTFHGAPLTVATTGPSVYYSQSPAYNSQYLLRPAANVTPTKGSSNTEFKSTKEGFSIAVSADGFKFGISEPGNQEKKSEKPLENDTGFQAQDISGQKNGRGVIFGQTSSTFTFADVAKSTSGEGFQFGKKDPNFKGFSGAGEKLFSSQCGKMANKANTSGDFEKDDDACKTEDSDDIHFEPVVQMPEKVELVTGEEGEKVLYSQGVKLFRFDAEISQWKERGLGNLKILKNEVNGKPRMLMRRDQVLKVCANHWITTTMNLKPLSGSDRAWMWLASDFSDGDAKLERLAAQFKTPELAEEFKQKFEECQRLLLDIPLQTPHKLVDTGRAAKLIQRAEEMKSGLKDFKTFLTNDQTKVTEEENKGSGTGAAGASDTTIKPNPENTGPTLEWDNYDLREDALDDNVSSSSVHDSPLASSPVRKNIFRFDESTTGFNFSFKSALSLSKSPAKLNQSGTSVGTDEESDVTQEEERDGQYFEPVVPLPDLVEVSSGEENEQVVFSHMAELYRYDKDVGQWKERGIGDIKILQNYDNKQVRIVMRRDQVLKLCANHRITPDMSLQNMKGTERVWVWTACDFADGERKVEHLAVRFKLQDVADSFKKIFDEAKTAQEKDSLITPHVSRSSTPRESPCGKIAVAVLEETTRERTDVIQGDDVADAASEVEVSSTSETTTKAVVSPPKFVFGSESVKRIFSSEKSNPFAFGNSSATGSLFGFSFNAPLKSNDSETSSVAQSGSESKVEPKKCELSKNSDIEQSSDSKVKNLSASFPMEESSINYTFKTPEKEPPLWHAEFTKEELVQKLSSTTKSADQLNGLLRETEATSAVLMEQIKLLKSEIRRLERNQEESAANVEHLKNVLLQFIFLKPGSERESLLPVINTMLQLSPEEKGKLAAVAQGLQETSIPKKK

SEQ ID NO: 35363 - protein, 644 aa, Artificial Sequence
  derived and/or modified sequence
MLMRRDQVLKVCANHWITTTMNLKPLSGSDRAWMWLASDFSDGDAKLERLAAQFKTPELAEEFKQKFEECQRLLLDIPLQTPHKLVDTGRAAKLIQRAEEMKSGLKDFKTFLTNDQTKVTEEENKGSGTGAAGASDTTIKPNPENTGPTLEWDNYDLREDALDDNVSSSSVHDSPLASSPVRKNIFRFDESTTGFNFSFKSALSLSKSPAKLNQSGTSVGTDEESDVTQEEERDGQYFEPVVPLPDLVEVSSGEENEQVVFSHMAELYRYDKDVGQWKERGIGDIKILQNYDNKQVRIVMRRDQVLKLCANHRITPDMSLQNMKGTERVWVWTACDFADGERKVEHLAVRFKLQDVADSFKKIFDEAKTAQEKDSLITPHVSRSSTPRESPCGKIAVAVLEETTRERTDVIQGDDVADAASEVEVSSTSETTTKAVVSPPKFVFGSESVKRIFSSEKSNPFAFGNSSATGSLFGFSFNAPLKSNDSETSSVAQSGSESKVEPKKCELSKNSDIEQSSDSKVKNLSASFPMEESSINYTFKTPEKEPPLWHAEFTKEELVQKLSSTTKSADQLNGLLRETEATSAVLMEQIKLLKSEIRRLERNQEESAANVEHLKNVLLQFIFLKPGSEREPSSCYKYDVAAQP

SEQ ID NO: 35364 - DNA, 5271 bp, Artificial Sequence
  derived and/or modified sequence
atgcggcgatccaaggcctacggcgaacgatacttggctagcgttcagggctccgctcccagtcctggcaagaagctgcgggggttctacttcgccaaactgtactacgaggccaaagaatatgacctggccaagaagtatgtctgtacatatttatctgtccaggagagggacccaagggctcatcgcttcctcggtcttctgtacgaactcgaggaaaacaccgagaaagccgtcgaatgctaccgtaggtctctggaattgaatccacctcagaaggatctcgtgttgaaaatcgctgagctgctttgcaagaacgatgtgaccgatggcagagccaaatactgggttgagcgcgccgccaagttgttccccggctcaccagcgatttacaagttaaaggaacaccttttggattgcgagggtgaggacggatggaataagctcttcgactggatacagtccgaactatatgtccgcccagacgatgttcacatgaatatccgcctagtggagctatatcggtcaaacaaaagactgaaagacgctgttgcgaggtgtcatgaggctgagagaaatatcgccctccgctcatctctggaatggaactcctgcgttgtacaaacactcaaggagtatttagaatcactgcaatgtttggaatcggataaaagtgactggcgggccaccaacaccgatctgctactcgcttacgctaacctgatgttgctcactctgagtacccgcgacgtccaggaaagcagagaactgctggaatcttttgattctgcgcttcagagtgcaaagagcagcctgggtgggaatgacgaattaagcgccacctttctggaaatgaaaggacacttttatatgcatgcaggcagcctgctgcttaaaatgggccaacacgggaacaatgttcaatggcaggcactgagcgagctggccgcactctgctacgtgatcgccttccaggtcccaaggccaaaaattaagctcattaagggcgaagctggtcagaacctgctggagatgatggcctgcgaccggctctctcagtccgggcacatgctcttaaatcttagccggggtaaacaggacttcctgaaggaggtcgtggagacttttgcgaacaaatctggccagagcgtcctttataacgccctgttcagctcacagagctcgaaggatacctccttcttgggttcagacgatatcggaaatatagatgtgcaggagcccgagctggaggatctggcacggtacgacgtaggggccattcaggcccataacggtagtttgcagcacctaacatggttgggcttgcagtggaactctctgccggccctcccaggcattcggaagtggttgaagcagttgttccaccatctgcctcaagaaacttcaagattggagaccaatgcccctgagtctatctgtatcctcgatctcgaggtatttttgctgggggtggtttacacatctcacctccaactcaaggagaaatgtaacagtcatcattcttcctaccagcctctgtgcctgcccttacctgtctgcaaaagattatgcaccgagcggcagaaatcatggtgggatgcagtttgtacactcattcatagaaaggccgtgcctggaaacagcgcggaactacgattggtggtccagcatgagatcaataccctcagagcccaagagaaacacgggctgcagccagcactccttgtgcactgggccaagtgtttgcagaaaatgggacgaggcttgaactcctcctatgaccagcaggagtatatcggtcgcagcgtgcattattggaagaaggtgctacccctgctcaagataatcaagaaaaactcaatccccgagcccatcgaccccctgttcaagcactttcatagcgtggatatacaggcaagcgagatcgttgaatacgaggaggacgctcatattacattcgctatccttgatgcagtacacggaaatatcgaagacgctgtaactgcatttgagtcgattaaatcagtcgtgtcgtactggaacctagccctgatctttcaccggaaggctgaagacattgaaaatgacgccgtatttcccgaggagcaggaagaatgcaaaaactatctgcgcaagacccgcgactacctaataaagattatcgacgactctgatagcaacctctcagtagtgaagaaattgcctgtccccctagaatctgtgaaagagatgctcaagtcagtaatgcaagagctggaggattactccgaaggcgggccgctgtacaagaacggatctctgaggaacgccgactctgagatcaagcatagtacccccagtcccacaaaatattccctcagtccgtcaaagagttacaagtatagcccaaaaacacctcccagatgggctgaggaccagaacagcctgaggaagatgatttgtcaggaggtaaaagcgataacaaagttgaatagctctaagtctgcttcccgacaccgatggccaacagaaaactacggaccggattcggtgcctgatggctaccaaggttctcaaactttccacggcgcccccctcactgtggcaaccaccgggcctagtgtgtactattcacagagccctgcttacaatagtcagtaccttttgcgccccgctgccaacgtcaccccaaccaaagggagctctaacacggagtttaagtccacgaaggaagggttttccatagctgtatcagccgatgggtttaagttcggcatctccgaacctgggaaccaggagaagaaaagcgagaaaccgctggagaatgacacaggattccaggcccaggacatcagtgggcagaagaatgggagaggcgtaatttttggccagacatccagtacctttacattcgcggacgtagccaaatcaacgagcggcgaaggatttcaatttgggaaaaaggatcccaatttcaaaggcttttccggcgccggcgagaagctgttcagctcacagtgtggtaaaatggccaacaaggccaatacttccggcgacttcgaaaaagatgatgacgcatgcaaaaccgaggactctgacgacattcattttgagcctgtggtccaaatgcccgaaaaagtcgaactagttacaggtgaagagggggaaaaggtgctttattctcagggtgttaagctgttcagattcgacgccgagatctctcaatggaaggagcgtggtctgggaaatttaaagattctaaaaaatgaggtcaatggcaagcccagaatgctaatgcgcagggaccaagtgctgaaagtgtgtgctaaccactggatcacaactacgatgaatctgaagccactgtcagggtccgatcgcgcttggatgtggcttgctagtgacttcagtgacggtgacgccaagcttgaacgcctggccgctcagttcaaaactcctgagctcgccgaggaattcaaacagaaattcgaagaatgtcaaagactactgcttgacatccccctgcaaaccccacacaaactggtagataccgggcgtgctgcgaaactcatacagcgggccgaggagatgaagtccggcctgaaggatttcaagaccttcctcacaaatgatcagactaaggtgacggaggaggagaataaaggctcaggtactggagctgcaggagcttcagacaccactattaagcctaaccccgagaataccggtccaactctggaatgggacaactacgacctgcgggaggatgctctagatgataacgtatcttcctcttcagtgcacgactcccccttggcatcctcgccagtacgcaaaaacatcttcaggttcgacgagagcactacaggatttaactttagctttaaaagcgctctcagcctgtctaaaagtcctgctaagttgaaccaatcaggcacctccgttgggacagatgaagagagtgacgtgacccaggaggaggagcgggatgggcagtacttcgagccagtcgttcctctcccagacctggtggaagtaagctctggcgaggagaatgagcaggttgtcttctcccatcgcgcggagctgtatcgatatgacaaagacgtcggccagtggaaggagcggggtataggggatatcaaaatccttcagaattacgacaataaacaagtccgaatcgtgatgagacgtgatcaggtgctcaaactgtgcgccaatcaccgcatcaccccagacatgtctctccaaaatatgaaaggaacagaaagagtgtgggtctggaccgcctgcgacttcgccgatggggaaagaaaggttgaacacttagcagttagatttaagctacaggatgtcgccgattcattcaagaaaattttcgacgaggcgaaaacagctcaagaaaaagattccttgatcactccgcatgtgagtagaagctctaccccacgcgaaagcccatgtggaaagattgcagtggctgtgctggaggagactactcgcgagcgcaccgatgtgattcagggggacgatgtggccgatgctgcttccgaggttgaggtaagttctacctccgagaccacaaccaaggcagtggtgtctccacccaaattcgtctttggctctgaatccgtcaagagaatttttagctccgaaaagtctaatccatttgcgttcgggaatagtagcgctacgggctcccttttcggcttttccttcaacgctcccctgaaatcgaatgattcagaaaccagcagcgtagcacagagcggctcagagtcaaaagtcgagccaaagaagtgcgagctcagcaagaattccgacatagaacagtctagcgacagtaaggtgaagaatctgagtgccagctttcccatggaggaatcatccatcaattacacattcaagaccccagaaaaggaaccccctctttggcacgccgaatttacgaaggaggagctagtgcagaagttatccagtacaacaaaatcagcggaccaactcaatggcctgctaagagaaactgaagccacctcagccgtgttgatggaacaaattaagctgctaaaaagtgaaattcgtcgattggaacgtaatcaggaggagagcgcagccaacgtggagcacctaaagaatgtactcctgcagttcatctttctgaaaccaggctctgagagggaatcactgctgccggtgatcaacactatgctgcaactcagtccagaggagaagggcaaacttgcggccgtcgcccagggactccaggaaaccagcatcccaaagaagaagtag

SEQ ID NO: 35365 - DNA, 3042 bp, Artificial Sequence
  derived and/or modified sequence
atgctgaagtcggttatgcaagagctggaggactacagtgaggggggacctctgtacaagaatggatcccttagaaacgccgattccgagatcaagcattcgaccccatccccgaccaagtactcactatcaccatccaaatcttacaaatattctcccaagaccccccccaggtgggctgaagatcagaactcattgcggaagatgatttgtcaggaggtgaaggccattaccaagttgaacagcagcaagtcagcatcccgccacaggtggccaacagagaactatggccccgatagtgtgcccgatggctatcagggaagccagacatttcatggagctcctctcaccgtagcaaccactgggccctccgtttactactctcagtcccccgcttacaatagtcagtacctgttaagacctgcagcaaacgtgacccccaccaaggggtccagtaataccgagtttaaatcaacgaaagaggggttttccatcgcagtttctgctgacggcttcaagtttggcatatccgagccaggaaaccaggagaagaaaagcgaaaagcccctggaaaacgacaccgggtttcaggctcaagatatatccgggcagaagaatgggaggggagtgattttcggacagaccagttccacttttacattcgctgacgttgccaaatccacctctggcgagggcttccaatttggaaagaaagaccccaattttaaaggcttctctggagcgggcgagaagttattttcatctcagtgtggtaagatggcaaacaaagccaacacctctggagactttgagaaagatgatgacgcctgcaaaactgaggactcagacgacatacattttgagcccgtggtgcagatgccggaaaaggtggaactggtcaccggggaagaaggcgagaaggtgctctactcgcagggggttaagctctttcggtttgacgctgaaatctcccaatggaaagaacgcggtctgggtaacctcaaaattctgaaaaatgaggtgaatggcaaaccgcgtatgctcatgagacgcgaccaggtgttaaaggtgtgtgcaaaccattggatcactaccacaatgaatttaaagcccctgagtgggagcgatagggcctggatgtggctcgccagcgacttctctgatggcgacgctaaacttgaacgtctggccgcccagttcaagacaccagaacttgcagaggagttcaagcagaagtttgaagagtgccagcgactcttgctggacatcccccttcaaactccacacaagttggtggatacaggcagggccgcgaagctcatacagcgcgccgaggaaatgaagtcaggactcaaggactttaagaccttcctgaccaatgatcaaactaaagtcaccgaagaggagaataaaggctctggaacaggcgctgcaggcgccagtgacaccacgattaaaccgaacccggagaatacgggaccaacactagaatgggacaattatgacctacgcgaggacgctcttgatgacaacgtgagcagctcatccgtgcatgacagtcctctggcttccagtcctgttagaaaaaatatctttcgttttgatgagagcaccacgggctttaatttctctttcaagagcgcactatcattatcaaaaagcccggcgaaattgaaccagtcaggcacctctgtggggaccgatgaggagtcagatgtgacacaagaggaagaacgcgacggtcaatactttgaacccgtggtgcccctcccagacctagtcgaggtttcgtccggagaggagaatgagcaggtcgtattttcacatatggccgagctctacaggtatgataaggatgtcgggcagtggaaagaacgcggcatcggagatattaaaatactgcagaactacgataacaaacaggttaggattgtgatgcgtcgcgaccaagtcctaaagctgtgtgctaaccatcgcatcaccccagacatgtcacttcaaaatatgaaaggtacagagcgagtgtgggtgtggactgcttgtgactttgccgatggcgagagaaaggttgaacatctggcagtgaggtttaagctccaagatgtagcagatagtttcaaaaaaattttcgatgaggctaaaaccgcacaggaaaaggactcactgatcacaccccatgtgagccggtctagtactccacgtgaatccccctgcggaaaaatagccgtggccgtgctggaagaaactaccagagaacgtacggacgtcatccaaggggacgatgttgctgacgctgccagtgaggtggaggtgtcctccacctctgagactaccactaaagcagttgtgtccccgcctaagttcgtgtttgggtcagagtctgtcaagcggattttctcctccgagaagagcaatcccttcgcattcggtaattcctccgcgaccggcagcctgttcggcttcagtttcaatgcccccttgaaatcaaatgattctgagacctcttctgtagcccagagcggttccgagagcaaggtggaacctaagaagtgtgagttgagcaagaattccgatatagagcaatcatcggattctaaggtgaagaatttatctgcgtcttttccaatggaggagtcttctattaactacacctttaagactccagagaaagagccccccctgtggcacgccgagttcactaaagaggagctagtacaaaaattgagctctaccaccaaaagcgcagaccagctcaatggcctattgcgtgagacagaagcaacctctgccgtgctaatggagcaaataaagctgctgaagtcagagattcgaagactggagcgaaaccaggaggaaagcgccgctaacgtagagcacttgaaaaacgtcctcttacagttcatctttctaaagcctggtagtgagcgtgaatccttattacccgtgataaacacgatgttacaattaagccctgaggaaaaaggcaagctggctgctgtggcccaggggctgcaggaaacatcgatccccaagaagaaatag

SEQ ID NO: 35366 - DNA, 5271 bp, Artificial Sequence
  derived and/or modified sequence
atgcgtcgctcaaaagcctacggcgagcggtacctggcatcagtccaaggcagtgcaccaagcccggggaaaaagctgagaggcttctattttgccaaactgtattatgaggcgaaggagtacgacctcgctaagaagtacgtttgcacatacttgtcggtgcaggaacgcgacccccgcgctcaccgctttctgggactgctgtatgagctagaggaaaacacagagaaggctgtcgagtgttaccggcgatcattagaacttaacccgccccagaaagacctcgtcctgaaaattgccgaactgttgtgcaagaatgatgtcacagatggacgtgccaagtactgggtggagcgggcagctaagctgtttcctggatccccagccatttacaagttgaaggagcaccttctggattgcgaaggcgaggatggatggaataaactcttcgattggatacagtcagaactgtatgttcggcctgacgatgttcacatgaacataagactggtagagctttataggtccaacaagcgtctcaaggatgccgtggcaaggtgccatgaggctgagcgcaacatagctctgagaagcagtctcgaatggaattcttgcgtcgtccagacattaaaggagtacttagagagccttcagtgcctcgagtccgacaaaagcgattggcgcgctaccaacacagacctgttgctcgcctacgccaacctcatgcttcttaccctgtctactcgcgacgttcaggagagcagagagctcctggagtcattcgatagtgcactgcagagcgcaaagtcttcacttggagggaacgatgaactgtccgctaccttcctcgaaatgaagggccacttttatatgcatgcaggctctcttctgttaaagatgggacagcacggcaataacgtgcagtggcaggcactgtccgagctggccgcgctctgctatgtgattgcgtttcaggttccccgcccaaagataaagctgatcaaaggagaagcaggccaaaatttgttagagatgatggcttgcgaccggttaagccagagcgggcacatgttactgaacctgagtaggggaaaacaggacttccttaaagaagtggtcgagaccttcgcaaacaagagcggccagtcagttctgtacaatgcattgttttccagccaatccagtaaggacactagttttctggggagcgacgacatcggaaatattgatgtgcaggaaccagaactagaagatctcgcccgttacgatgtaggagcaattcaggctcacaacgggtcactgcaacatctaacatggctcgggctccaatggaattcactgcccgcactgcctggcattcgcaaatggttaaaacagctcttccatcatctcccccaggagacctcccgcctagagacaaacgctcctgaatctatatgtatcttggatctcgaggtattccttctgggcgtggtctatacttcccatcttcagctgaaagagaaatgcaattcccaccattcaagctaccagccgctgtgcctgccattgcctgtgtgtaagcgtctttgcaccgagagacagaaaagctggtgggatgccgtttgcacactcattcacagaaaggcagtgcccggcaattcagctgagcttcggctggtggtacagcacgagatcaataccttacgtgcccaggaaaaacatggccttcagcctgctttactggtgcactgggctaaatgcctacaaaaaatgggaaggggccttaactcttcgtacgaccaacaggagtacatcggcagaagcgtccattactggaaaaaggtgctgccactgctcaaaatcattaagaagaattccatacccgaacctattgaccccctctttaagcactttcattcagtcgatatccaggcctctgagatagtcgagtatgaggaggatgctcatataacgttcgctatcctggatgcagtgcatggtaatattgaagatgccgtcaccgccttcgaatcgatcaagtccgttgtgagctactggaatctcgccctcatctttcatcgcaaagccgaagatatagagaacgacgccgtcttccccgaagagcaggaagagtgtaagaactatctccgtaagacccgggactatctgatcaaaattattgatgattccgactccaatttgagcgtggtcaaaaaactcccagtccctctggaatctgtgaaggagatgctcaaatcagtcatgcaagagttggaagattactctgaaggcggccctctgtataagaacggaagcctgcgtaacgcagactctgaaataaagcatagcacaccgagtcccacgaaatatagcctgagcccttctaaatcttacaagtacagtcccaagaccccccccagatgggctgaagatcagaactccctgcgaaaaatgatttgccaggaagtgaaggctatcaccaaactaaattcttcaaaaagcgccagcaggcatagatggccgacggagaactatggaccagattccgtccccgatggctaccaaggatcccagacattccacggtgcccctctgaccgttgctactacgggcccaagcgtgtactattctcagagccccgcatacaatagccagtacctcctgaggccagcagccaatgtcacacccaccaagggctccagcaataccgagtttaagagcaccaaggaaggcttcagcatcgccgtgtcggcggacgggttcaagttcggtatctccgagcctggtaaccaagaaaaaaaatcggagaagccgctggaaaacgatacgggctttcaggctcaagatatctccggacagaaaaacggtaggggcgtaatctttgggcagacaagctcaacgttcacctttgccgatgtcgccaaatcgacttccggagagggcttccagtttggcaagaaggatcctaactttaagggattttcaggcgccggagaaaagctgttctctagccaatgcggaaaaatggcaaataaagcaaacacctccggcgacttcgagaaggacgacgatgcatgcaaaaccgaggattcagacgatattcacttcgagccagtggtgcagatgccagagaaggttgaactggtgactggcgaagaaggggagaaagtgctgtacagccagggggtgaagttgtttagatttgacgctgagattagccaatggaaagaaagagggctcggcaacttgaaaatcctcaagaacgaagtgaacggcaaaccacgaatgctcatgagacgggaccaggttctcaaagtgtgcgctaatcattggataacgaccaccatgaacctcaaaccattgtccggatctgatagagcctggatgtggctggcatccgacttttcagacggcgatgccaaactcgaaagactagcagcccagtttaagaccccagagctggctgaggaattcaagcagaaatttgaggagtgtcagcgccttctgctcgatattcctctgcagacacctcataagctcgtggacaccggaagggccgcaaagctgatccagcgcgccgaggaaatgaaatccggactcaaagacttcaagacttttttgactaacgatcaaacaaaagtcactgaagaagaaaacaaagggagtggcaccggcgctgcaggcgcctcggatactacaatcaagcctaatcccgagaacactggaccaacccttgaatgggataactacgacctgcgggaagacgcactcgatgacaacgtttcttcctctagcgtgcatgatagtcccttggcctcatcccctgtccgcaagaatatttttagatttgacgaatccacaacaggatttaatttctcattcaaatccgcactctcgctgtcgaaatcaccagctaagttgaaccagagcggcacctccgtcggaaccgacgaggagagtgatgtgactcaggaagaggaacgagatgggcagtactttgaacctgtggttcccttaccagatctggtggaagtgtcctcaggggaagaaaatgaacaagtagtcttttcacatatggcagaactgtaccggtatgacaaggatgtgggacagtggaaggaaaggggcatcggcgacataaagatattgcaaaactatgacaacaagcaggtgaggatcgttatgcgcagagaccaggtgctaaaactttgcgccaatcacaggatcacaccggacatgagtctgcaaaacatgaagggtaccgagagggtatgggtgtggactgcctgcgacttcgctgatggcgaacgtaaggtggagcacctggcagtgcgattcaagcttcaggatgtggccgacagcttcaaaaagatctttgatgaggccaaaactgcccaggaaaaagactccctgattacacctcatgtgtctcggtcaagtacgccacgcgagtcaccatgtggaaaaattgccgttgcagtcttggaagaaactaccagagaaaggactgacgtaatccaaggggacgacgtagccgacgcagcgtcggaggtggaagtctcctcaactagtgagaccactacgaaagctgttgtttccccccccaaattcgtgttcggtagcgagtctgtgaaaagaattttttcctctgaaaaaagtaatccgtttgcgttcggaaattcaagtgccacaggatctctgttcggcttttcctttaatgcccctctaaaaagtaatgactccgagacctccagcgtggcacaatccggcagtgagagcaaggtcgagcccaagaagtgtgaactgagcaaaaacagcgacatagagcaaagctccgacagtaaggtgaaaaatctgagtgcctcgttccccatggaggaatcatccattaattataccttcaagactcccgaaaaggagcctcctctgtggcatgctgagtttacaaaggaagaactggttcagaaactgagcagtactaccaaaagcgctgaccaacttaacggactgctgcgagaaactgaggccacaagtgccgtgttaatggagcagataaagctactgaaatctgaaatacgccggctggagcggaatcaggaggaatctgctgccaacgtggaacatttgaaaaatgttctcctgcaattcatttttctcaagccggggtctgagcgggagtcccttttgccagttatcaatactatgctgcaactctctcccgaagaaaaaggcaaactggcggccgtggcacagggtctgcaagagacaagtatcccaaaaaaaaagtag

SEQ ID NO: 35367 - DNA, 5271 bp, Artificial Sequence
  derived and/or modified sequence
atgaggaggagcaaggcctatggagagcgctacctggcctctgtgcagggcagcgcccccagccctgggaagaagctgcggggcttctactttgccaagctgtactatgaggccaaggagtatgacctggccaagaagtatgtgtgcacctacctgtctgtgcaggagcgggacccccgggcccaccgcttcctgggcctgctgtatgagctggaggagaacacagagaaggctgtggagtgctacagaagaagcctggagctgaaccccccccagaaggacctggtgctgaagattgctgagctgctgtgcaagaatgatgtgacagatggccgggccaagtactgggtggagcgggccgccaagctgtttcctggcagccctgccatctacaagctgaaggagcacctgctggactgtgaaggagaagatggctggaacaagctgtttgactggatccagagcgagctgtatgtgcggccagatgatgtgcacatgaacatccggctggtggagctgtaccgcagcaacaagaggctgaaggatgctgtggcccgctgccacgaggccgagaggaacatcgccctgcggagcagcctggagtggaacagctgtgtggtgcagaccctgaaggagtacctggagagcctgcagtgcctggagagtgacaagagtgactggagggccaccaacacagacctgctgctggcctatgccaacctgatgctgctgaccctgagcaccagagatgtgcaggagagccgggagctgctggagagctttgattctgccctgcagagcgccaagagcagcctgggcggcaatgatgagctgagcgccaccttcctggagatgaagggccacttctacatgcatgctggcagcctgctgctgaagatgggccagcacggcaacaacgtgcagtggcaggccctgtctgagctggccgccctgtgctacgtgattgccttccaggtgccccggcccaagatcaagctgatcaagggggaggccggccagaacctgctggagatgatggcctgtgaccggctgagccagagcggccacatgctgctgaacctgagccggggcaagcaggacttcctgaaggaggtggtggagacctttgccaacaagagcggccagagcgtgctgtacaatgccctcttcagcagccagagcagcaaggacaccagcttcctgggcagtgatgacatcggcaacattgatgtgcaggagcctgagctggaggacctggcccgctatgatgtgggcgccatccaggcccacaacggcagcctgcagcacctgacctggctgggcctgcagtggaacagcctgcctgccctgcccggcatcaggaagtggctgaagcagctgttccaccacctgccccaggagaccagccggctggagaccaatgcccctgagagcatctgcatcctggacctggaggtgttcctgctgggcgtggtgtacaccagccacctgcagctgaaggagaagtgcaacagccaccacagcagctaccagcccctgtgcctgcccctgcctgtgtgcaagaggctgtgcacagagcggcagaagtcctggtgggatgctgtgtgcaccctcatccacaggaaggctgtgcccggcaacagcgctgagctgcggctggtggtgcagcacgagatcaacaccctgcgggcccaggagaagcacggcctgcagcctgccctgctggtgcactgggccaagtgcctgcagaagatgggccggggcctgaacagcagctatgaccagcaggagtacatcggccgctctgtgcactactggaagaaggtgctgcccctgctgaagatcatcaagaagaacagcatccctgagcccatcgaccccctcttcaagcacttccacagcgtggacatccaggccagcgagatcgtggagtatgaagaagatgcccacatcacctttgccatcctggatgctgtgcacggcaacattgaagatgctgtgacagcctttgagagcatcaagtctgtggtgtcctactggaacctggccctgatcttccacaggaaggcagaagatattgaaaatgatgctgtgtttcctgaggagcaggaggagtgcaagaactacctgaggaagacccgggactacctgatcaagatcattgatgacagcgacagcaacctgtctgtggtgaagaagctgcctgtgcccctggagagcgtgaaggagatgctgaagtctgtgatgcaggagctggaggactacagcgagggcggccccctgtacaagaatggcagcctgagaaatgctgacagcgagatcaagcacagcacccccagccccaccaagtacagcctgagccccagcaagagctacaagtacagccccaagaccccaccccgctgggccgaggaccagaacagcctgaggaagatgatctgccaggaggtgaaggccatcaccaagctgaacagcagcaagagcgccagccgccaccgctggcccacagaaaattatggcccagattctgtgcctgatggctaccagggcagccagaccttccatggagcccccctgactgtggccaccaccggccccagcgtgtactacagccagagccctgcctacaacagccagtacctgctgcggcctgctgccaacgtgacccccaccaagggcagcagcaacacagagttcaagagcaccaaggagggcttcagcattgctgtgtctgcagatggcttcaagtttggcatcagcgagcccggcaaccaggagaagaagtctgagaagcccctggagaatgacaccggcttccaggcccaggacatcagcggccagaagaatggccggggcgtcatcttcggccagaccagcagcaccttcacctttgctgatgtggccaagagcaccagcggggagggcttccagtttgggaagaaggaccccaacttcaagggcttctctggagctggggagaagctgttcagcagccagtgtgggaagatggccaacaaggccaacaccagcggggactttgagaaggatgatgatgcctgcaagacagaagattctgatgacatccactttgagcctgtggtgcagatgcctgagaaggtggagctggtgactggagaggagggggagaaggtgctgtacagccagggcgtgaagctgttccgctttgatgctgagatcagccagtggaaggagcggggcctgggcaacctgaagatcctgaagaatgaggtgaatggcaagcccaggatgctgatgagaagagaccaggtgctgaaggtgtgtgccaaccactggatcaccaccaccatgaacctgaagcccctgagcggcagtgaccgggcctggatgtggctggccagtgacttcagtgatggagatgccaagctggagcggctggccgcccagttcaagaccccagagctggccgaggagttcaagcagaagtttgaggagtgccagaggctgctgctggacatccccctgcagaccccccacaagctggtggacaccggccgggccgccaagctgatccagagagctgaggagatgaagagcggcctgaaggacttcaagaccttcctgaccaatgaccagaccaaggtgacagaggaggagaacaagggcagcggcaccggggctgctggggccagtgacaccaccatcaagcccaacccagaaaatacaggccccaccctggagtgggacaactatgacctgcgggaggatgccctggatgacaacgtgagcagcagctctgtgcatgacagccccctggccagcagccctgtgaggaagaacatcttccgctttgatgagagcaccaccggcttcaacttctccttcaagagcgccctgagcctgagcaagagccctgccaagctgaaccagagcggcacctctgtgggcacagatgaggagagtgatgtgacccaggaggaggagagagatggccagtactttgagcctgtggtgcccctgcctgacctggtggaggtgtcctctggagaggagaatgagcaggtggtgttcagccacagagctgagctgtaccgctatgacaaggatgtgggccagtggaaggagcggggcattggagacatcaagatcctgcagaactatgacaacaagcaggtgagaattgtgatgaggcgggaccaggtgctgaagctgtgtgccaaccaccgcatcaccccagacatgagcctgcagaacatgaagggcacagagcgggtgtgggtgtggacagcctgtgactttgctgatggagagaggaaggtggagcacctggccgtgcgcttcaagctgcaggatgtggccgacagcttcaagaagatctttgatgaggccaagacagcccaggagaaggacagcctcatcacccctcatgtgagccgcagcagcaccccccgggagagcccctgtgggaagattgctgtggccgtgctggaggagaccacccgggagaggacagatgtgatccagggagatgatgtggctgatgctgccagcgaggtggaggtgagcagcaccagcgagaccaccaccaaggctgtggtgagcccccccaagtttgtgtttggaagtgaatctgtgaagaggatcttcagcagcgagaagagcaacccctttgccttcggcaacagcagcgccaccggcagcctgtttggcttctccttcaatgcccccctgaagagcaatgattctgagaccagctctgtggcccagagcggcagcgagagcaaggtggagcccaagaagtgtgagctgagcaagaacagcgacatcgagcagagcagtgacagcaaggtgaagaacctgagcgccagcttccccatggaggagagcagcatcaactacaccttcaagaccccagagaaggagccccccctgtggcacgccgagttcaccaaggaggagctggtgcagaagctgagcagcaccaccaagtctgctgaccagctgaatggcctgctgcgggagacagaggccaccagcgctgtgctgatggagcagatcaagctgctgaagtctgagatccggcggctggagaggaaccaggaggagagcgctgccaacgtggagcacctgaagaatgtgctgctgcagttcatcttcctgaagccaggcagcgagcgggagagcctgctgcccgtcatcaacaccatgctgcagctgagccctgaggagaagggcaagctggccgctgtggcccagggcctgcaggagaccagcatccccaagaagaagtag

SEQ ID NO: 35368 - DNA, 3042 bp, Artificial Sequence
  derived and/or modified sequence
atgctgaagtctgtgatgcaggagctggaggactacagcgagggcggccccctgtacaagaatggcagcctgagaaatgctgacagcgagatcaagcacagcacccccagccccaccaagtacagcctgagccccagcaagagctacaagtacagccccaagaccccaccccgctgggccgaggaccagaacagcctgaggaagatgatctgccaggaggtgaaggccatcaccaagctgaacagcagcaagagcgccagccgccaccgctggcccacagagaactacggccctgacagcgtgcctgatggctaccagggcagccagaccttccacggggcccccctgactgtggccaccaccggccccagcgtgtactacagccagagccctgcctacaacagccagtacctgctgcggcctgctgccaacgtgacccccaccaagggcagcagcaacacagagttcaagagcaccaaggagggcttcagcattgctgtgtctgcagatggcttcaagtttggcatcagcgagcccggcaaccaggagaagaagtctgagaagcccctggagaatgacaccggcttccaggcccaggacatcagcggccagaagaatggccggggcgtcatcttcggccagaccagcagcaccttcacctttgctgatgtggccaagagcaccagcggggagggcttccagtttgggaagaaggaccccaacttcaagggcttcagcggggccggggagaagctgttcagcagccagtgtgggaagatggccaacaaggccaacaccagcggggactttgagaaggatgatgatgcctgcaagacagaggacagtgatgacatccactttgagcctgtggtgcagatgcctgagaaggtggagctggtgactggagaggagggggagaaggtgctgtacagccagggcgtgaagctgttccgctttgatgctgagatcagccagtggaaggagcggggcctgggcaacctgaagatcctgaagaatgaggtgaatggcaagcccaggatgctgatgaggcgggaccaggtgctgaaggtgtgtgccaaccactggatcaccaccaccatgaacctgaagcccctgagcggcagtgaccgggcctggatgtggctggccagtgacttcagtgatggagatgccaagctggagcggctggccgcccagttcaagaccccagagctggccgaggagttcaagcagaagtttgaggagtgccagaggctgctgctggacatccccctgcagaccccccacaagctggtggacaccggccgggccgccaagctgatccagagagctgaggagatgaagagcggcctgaaggacttcaagaccttcctgaccaatgaccagaccaaggtgacagaggaggagaacaagggcagcggcactggagctgctggggccagtgacaccaccatcaagcccaaccctgagaacacaggccccaccctggagtgggacaactatgacctgagagaagatgccctggatgacaacgtgagcagcagctctgtgcatgacagccccctggccagcagccctgtgaggaagaacatcttccgctttgatgagagcaccaccggcttcaacttctccttcaagagcgccctgagcctgagcaagagccctgccaagctgaaccagagcggcacctctgtgggcacagatgaggagagtgatgtgacccaggaggaggagagagatggccagtactttgagcctgtggtgcccctgcctgacctggtggaggtgagcagcggggaggagaatgagcaggtggtgttcagccacatggccgagctgtaccgctatgacaaggatgtgggccagtggaaggagcggggcatcggggacatcaagatcctgcagaactatgacaacaagcaggtgcgcatcgtgatgagaagagaccaggtgctgaagctgtgtgccaaccaccgcatcaccccagacatgagcctgcagaacatgaagggcacagagcgggtgtgggtgtggacagcctgtgactttgctgatggagagaggaaggtggagcacctggccgtgcgcttcaagctgcaggatgtggccgacagcttcaagaagatctttgatgaggccaagacagcccaggagaaggacagcctcatcaccccccacgtgagccgcagcagcaccccccgggagagcccctgtgggaagattgctgtggccgtgctggaggagaccacccgggagaggacagatgtgatccagggagatgatgtggctgatgctgccagcgaggtggaggtgagcagcaccagcgagaccaccaccaaggctgtggtgtccccacccaagtttgtgtttggcagcgagagcgtgaagaggatcttcagcagcgagaagagcaacccctttgcctttggaaacagcagcgccaccggcagcctgtttggcttctccttcaatgcccccctgaagagcaatgacagcgagaccagctctgtggcccagagcggcagcgagagcaaggtggagcccaagaagtgtgagctgagcaagaacagcgacatcgagcagagcagtgacagcaaggtgaagaacctgagcgccagcttccccatggaggagagcagcatcaactacaccttcaagaccccagagaaggagccccccctgtggcatgctgagttcaccaaggaggagctggtgcagaagctgagcagcaccaccaagtctgctgaccagctgaatggcctgctgcgggagacagaggccaccagcgctgtgctgatggagcagatcaagctgctgaagtctgagatccggcggctggagaggaaccaggaggagagcgctgccaacgtggagcacctgaagaatgtgctgctgcagttcatcttcctgaagccaggcagcgagcgggagagcctgctgcctgtgatcaacaccatgctgcagctgagccctgaggagaagggcaagctggccgctgtggcccagggcctgcaggagaccagcatccccaagaagaagtag

SEQ ID NO: 35369 - DNA, 5271 bp, Artificial Sequence
  derived and/or modified sequence
atgaggaggagcaaggcctatggagagcgctacctggcctctgtgcagggcagcgcccccagccctgggaagaagctgcggggcttctactttgccaagctgtactatgaggccaaggagtatgacctggccaagaagtatgtgtgcacctacctgtctgtgcaggagcgggacccccgggcccaccgcttcctgggcctgctgtatgagctggaggagaacacagagaaggctgtggagtgctacagaagaagcctggagctgaaccccccccagaaggacctggtgctgaagattgctgagctgctgtgcaagaatgatgtgacagatggccgggccaagtactgggtggagcgggccgccaagctgtttcctggcagccctgccatctacaagctgaaggagcacctgctggactgtgaaggagaagatggctggaacaagctgtttgactggatccagagcgagctgtatgtgcggccagatgatgtgcacatgaacatccggctggtggagctgtaccgcagcaacaagaggctgaaggatgctgtggcccgctgccacgaggccgagaggaacatcgccctgcggagcagcctggagtggaacagctgtgtggtgcagaccctgaaggagtacctggagagcctgcagtgcctggagagtgacaagagtgactggagggccaccaacacagacctgctgctggcctatgccaacctgatgctgctgaccctgagcaccagagatgtgcaggagagccgggagctgctggagagctttgattctgccctgcagagcgccaagagcagcctgggcggcaatgatgagctgagcgccaccttcctggagatgaagggccacttctacatgcatgctggcagcctgctgctgaagatgggccagcacggcaacaacgtgcagtggcaggccctgtctgagctggccgccctgtgctacgtgattgccttccaggtgccccggcccaagatcaagctgatcaagggggaggccggccagaacctgctggagatgatggcctgtgaccggctgagccagagcggccacatgctgctgaacctgagccggggcaagcaggacttcctgaaggaggtggtggagacctttgccaacaagagcggccagagcgtgctgtacaatgccctcttcagcagccagagcagcaaggacaccagcttcctgggcagtgatgacatcggcaacattgatgtgcaggagcctgagctggaggacctggcccgctatgatgtgggcgccatccaggcccacaacggcagcctgcagcacctgacctggctgggcctgcagtggaacagcctgcctgccctgcccggcatcaggaagtggctgaagcagctgttccaccacctgccccaggagaccagccggctggagaccaatgcccctgagagcatctgcatcctggacctggaggtgttcctgctgggcgtggtgtacaccagccacctgcagctgaaggagaagtgcaacagccaccacagcagctaccagcccctgtgcctgcccctgcctgtgtgcaagaggctgtgcacagagcggcagaagtcctggtgggatgctgtgtgcaccctcatccacaggaaggctgtgcccggcaacagcgctgagctgcggctggtggtgcagcacgagatcaacaccctgcgggcccaggagaagcacggcctgcagcctgccctgctggtgcactgggccaagtgcctgcagaagatgggccggggcctgaacagcagctatgaccagcaggagtacatcggccgctctgtgcactactggaagaaggtgctgcccctgctgaagatcatcaagaagaacagcatccctgagcccatcgaccccctcttcaagcacttccacagcgtggacatccaggccagcgagatcgtggagtatgaagaagatgcccacatcacctttgccatcctggatgctgtgcacggcaacattgaagatgctgtgacagcctttgagagcatcaagtctgtggtgtcctactggaacctggccctgatcttccacaggaaggcagaagatattgaaaatgatgctgtgtttcctgaggagcaggaggagtgcaagaactacctgaggaagacccgggactacctgatcaagatcattgatgacagcgacagcaacctgtctgtggtgaagaagctgcctgtgcccctggagagcgtgaaggagatgctgaagtctgtgatgcaggagctggaggactacagcgagggcggccccctgtacaagaatggcagcctgagaaatgctgacagcgagatcaagcacagcacccccagccccaccaagtacagcctgagccccagcaagagctacaagtacagccccaagaccccaccccgctgggccgaggaccagaacagcctgaggaagatgatctgccaggaggtgaaggccatcaccaagctgaacagcagcaagagcgccagccgccaccgctggcccacagaaaattatggcccagattctgtgcctgatggctaccagggcagccagaccttccatggagcccccctgactgtggccaccaccggccccagcgtgtactacagccagagccctgcctacaacagccagtacctgctgcggcctgctgccaacgtgacccccaccaagggcagcagcaacacagagttcaagagcaccaaggagggcttcagcattgctgtgtctgcagatggcttcaagtttggcatcagcgagcccggcaaccaggagaagaagtctgagaagcccctggagaatgacaccggcttccaggcccaggacatcagcggccagaagaatggccggggcgtcatcttcggccagaccagcagcaccttcacctttgctgatgtggccaagagcaccagcggggagggcttccagtttgggaagaaggaccccaacttcaagggcttctctggagctggggagaagctgttcagcagccagtgtgggaagatggccaacaaggccaacaccagcggggactttgagaaggatgatgatgcctgcaagacagaagattctgatgacatccactttgagcctgtggtgcagatgcctgagaaggtggagctggtgactggagaggagggggagaaggtgctgtacagccagggcgtgaagctgttccgctttgatgctgagatcagccagtggaaggagcggggcctgggcaacctgaagatcctgaagaatgaggtgaatggcaagcccaggatgctgatgagaagagaccaggtgctgaaggtgtgtgccaaccactggatcaccaccaccatgaacctgaagcccctgagcggcagtgaccgggcctggatgtggctggccagtgacttcagtgatggagatgccaagctggagcggctggccgcccagttcaagaccccagagctggccgaggagttcaagcagaagtttgaggagtgccagaggctgctgctggacatccccctgcagaccccccacaagctggtggacaccggccgggccgccaagctgatccagagagctgaggagatgaagagcggcctgaaggacttcaagaccttcctgaccaatgaccagaccaaggtgacagaggaggagaacaagggcagcggcaccggggctgctggggccagtgacaccaccatcaagcccaacccagaaaatacaggccccaccctggagtgggacaactatgacctgcgggaggatgccctggatgacaacgtgagcagcagctctgtgcatgacagccccctggccagcagccctgtgaggaagaacatcttccgctttgatgagagcaccaccggcttcaacttctccttcaagagcgccctgagcctgagcaagagccctgccaagctgaaccagagcggcacctctgtgggcacagatgaggagagtgatgtgacccaggaggaggagagagatggccagtactttgagcctgtggtgcccctgcctgacctggtggaggtgtcctctggagaggagaatgagcaggtggtgttcagccacatggccgagctgtaccgctatgacaaggatgtgggccagtggaaggagcggggcattggagacatcaagatcctgcagaactatgacaacaagcaggtgagaattgtgatgaggcgggaccaggtgctgaagctgtgtgccaaccaccgcatcaccccagacatgagcctgcagaacatgaagggcacagagcgggtgtgggtgtggacagcctgtgactttgctgatggagagaggaaggtggagcacctggccgtgcgcttcaagctgcaggatgtggccgacagcttcaagaagatctttgatgaggccaagacagcccaggagaaggacagcctcatcacccctcatgtgagccgcagcagcaccccccgggagagcccctgtgggaagattgctgtggccgtgctggaggagaccacccgggagaggacagatgtgatccagggagatgatgtggctgatgctgccagcgaggtggaggtgagcagcaccagcgagaccaccaccaaggctgtggtgagcccccccaagtttgtgtttggaagtgaatctgtgaagaggatcttcagcagcgagaagagcaacccctttgccttcggcaacagcagcgccaccggcagcctgtttggcttctccttcaatgcccccctgaagagcaatgattctgagaccagctctgtggcccagagcggcagcgagagcaaggtggagcccaagaagtgtgagctgagcaagaacagcgacatcgagcagagcagtgacagcaaggtgaagaacctgagcgccagcttccccatggaggagagcagcatcaactacaccttcaagaccccagagaaggagccccccctgtggcacgccgagttcaccaaggaggagctggtgcagaagctgagcagcaccaccaagtctgctgaccagctgaatggcctgctgcgggagacagaggccaccagcgctgtgctgatggagcagatcaagctgctgaagtctgagatccggcggctggagaggaaccaggaggagagcgctgccaacgtggagcacctgaagaatgtgctgctgcagttcatcttcctgaagccaggcagcgagcgggagagcctgctgcccgtcatcaacaccatgctgcagctgagccctgaggagaagggcaagctggccgctgtggcccagggcctgcaggagaccagcatccccaagaagaagtag

SEQ ID NO: 35370 - DNA, 5271 bp, Artificial Sequence
  derived and/or modified sequence
atgcggcggagcaaggcctacggcgagcggtacctggccagcgtgcagggttccgcaccttctcccgggaaaaaattaaggggcttctactttgccaaactatattatgaggctaaggaatatgatctggctaagaagtacgtgtgtacgtacctctccgttcaggagcgggatccgcgggcccaccgctttctgggccttctttatgagctggaagagaatacggaaaaagccgttgagtgttaccgcagaagcctcgagttgaaccctccacaaaaagatttggtcctcaagattgccgagctgttatgtaagaatgacgttaccgatgggagggccaaatactgggtggagcgcgcggccaaactattccccggatctcctgcaatttacaaactgaaggaacacctgctcgactgtgagggcgaagatgggtggaacaaattgtttgattggatccagtccgagctgtacgttaggccagacgatgttcatatgaatattcgcctggtcgaactctaccgttcgaacaaaagattaaaagacgctgtggcaaggtgtcatgaggccgagcgaaatatcgcattgcgatcgagtctggagtggaactcgtgtgtggtgcagactcttaaagaatatcttgaatcactgcaatgtttggaatctgacaaatcagactggcgcgccactaataccgacctcctcctagcgtatgcaaaccttatgctgttaaccctgagtaccagagatgtccaggaaagcagggagctgcttgagagcttcgactccgctctccagtctgccaagagttcccttggaggtaatgatgagctgtccgccacctttctggaaatgaagggccacttttacatgcacgcagggagcttgcttctgaaaatgggacagcacggcaacaatgtacagtggcaggctttaagtgaattagccgcattgtgttacgtgattgccttccaggttccacgacctaaaatcaaactgatcaagggcgaggcaggccagaatttattagaaatgatggcgtgcgatcgcctctcgcagtccgggcatatgttactcaacctgagtcggggaaagcaagactttctgaaagaggtggtcgaaacctttgccaataagagtggacaatccgtactctataacgctctgtttagtagccagtcttccaaggacacctcctttctcgggtctgacgacatcggcaatatagacgtgcaggagccagaactggaggatttggctcgctatgatgtgggtgccatccaggcacacaacggatctctacagcatctcacctggttaggtctccagtggaactctctccccgccctgcccggaattagaaaatggcttaagcaactctttcatcatcttccccaggagacatcaaggctggagaccaacgctccagagtctatctgtatccttgatctagaggtgttcctgttgggagtggtttatactagccacctgcagttgaaggagaaatgcaatagccatcattcttcataccagcctttgtgtctccctctgcctgtatgtaaacgattatgcactgagaggcagaaaagctggtgggacgccgtgtgcacgctgatccatagaaaggctgtgccagggaactcagccgagctccgattagtggtgcagcatgagataaacaccttgcgcgctcaagaaaaacatgggctgcaacccgccctactggtgcactgggccaagtgcctgcagaaaatgggtcgcgggttgaatagttcatatgaccaacaggaatatatcggccgctccgttcattactggaaaaaggtgctgcccctgctcaagataatcaagaagaattccattcccgagcccatcgatcccctcttcaaacactttcactcagtcgatatccaagcttccgagatcgttgagtatgaggaggacgctcatatcactttcgccatactggatgctgttcatggcaacattgaggacgcggtgacagccttcgaatcaataaaatcagtggtcagttattggaacctggccttaattttccatcgaaaggccgaagacattgagaacgacgcggtgttcccagaggaacaggaggaatgcaaaaactatttgagaaaaacaagagactatctcatcaagatcatagatgattccgacagcaacctgtcggtagtaaagaaactccctgttccacttgaaagcgtgaaggagatgttgaagagcgtgatgcaggagctggaagactacagcgagggcggacccctgtacaaaaatgggagcctgaggaacgccgacagtgagatcaaacacagcacaccttcacccactaagtactcactgtcacctagtaagagctacaaatattctccaaagacccctcccagatgggccgaggaccagaattctctgcggaagatgatctgccaggaagtgaaggctatcactaagttaaactcttcaaagtcggcctccaggcatcggtggcccactgagaactacggccccgattccgtccctgatggttaccagggcagccaaacttttcacggcgctcccttaacggtagccaccactggcccatcagtctactatagtcagtctccagcctacaattctcagtaccttctgaggccagccgccaatgttactccgaccaaaggaagctctaatactgagttcaagagcaccaaggagggcttttcaatcgccgtctcagcggacggattcaagttcggaattagcgaacctggcaaccaggagaaaaaatcggagaagcccttggagaacgacacaggattccaggcccaagacattagcggtcagaagaacggtcgcggggttatcttcgggcagacctcctctactttcacgttcgcagacgttgctaagagtactagcggagaggggtttcaattcggaaagaaggatcccaactttaagggatttagtggcgccggcgagaagcttttttcttctcagtgcgggaaaatggccaacaaggcgaacacttcaggcgatttcgaaaaggatgacgacgcctgtaaaacggaagacagtgacgacattcacttcgaacccgtggtgcagatgccggaaaaagtggagctcgtgacaggcgaagagggcgaaaaggtgttgtacagccagggtgtcaaactgtttcggttcgatgcagagatctcccagtggaaggagcgcggccttggcaacttgaagatcctgaagaacgaagtcaatggaaagccccggatgctgatgagaagggaccaggtgctgaaggtctgtgcaaaccattggatcacgaccactatgaacctcaagcctctgtccgggtccgatcgggcctggatgtggcttgcgagcgacttcagcgacggtgacgcaaaactggagcgtcttgccgcacagtttaaaacgcctgaacttgcggaggagttcaagcagaagtttgaagagtgccaacggctattgctagatattcctctgcaaaccccacataaacttgttgacactggacgcgcagctaagctgatacaaagagccgaagaaatgaagagcggtctcaaagatttcaaaacttttctcactaacgatcaaacgaaagttacagaagaggaaaacaaaggctccggaaccggggcagccggggcgagcgataccaccattaagcccaatccagaaaataccgggcctaccctggaatgggataattacgatctgagggaagatgcactggatgataacgttagttcatcaagtgtccatgacagccccttagcctccagccctgtgcggaaaaacatattccggttcgatgaatctactaccggcttcaatttttccttcaaatctgctttgtcgctctctaaaagccccgctaaactcaaccagtccggtacgtccgttggcacagacgaggagagtgatgtgacccaggaagaggagagagacggacaatattttgagcccgtggtcccacttcctgatctggtggaagtctcttccggggaagagaatgaacaggtggtttttagccacagagccgagctgtatcggtacgacaaggatgttggccagtggaaggaacgaggcatcggtgacattaaaatcctgcagaactatgataacaagcaagtgagaattgttatgaggcgcgatcaggtgctgaagctgtgcgccaatcacagaatcactccagacatgagtttacaaaacatgaaggggactgagcgagtatgggtatggactgcatgcgatttcgccgacggagaacgaaaagtggaacacctggccgtgaggttcaaacttcaagacgtcgcagattcctttaagaaaattttcgacgaggcgaaaaccgctcaggagaaggattccttaattaccccacacgtgtctagatcttccactccgcgtgagtctccctgcggaaaaatagctgtggcagtcttagaggagaccacacgcgagaggaccgatgtgattcagggggacgacgtcgcagacgcagcctccgaggtggaagtctctagcacttccgagactaccaccaaggcagtggttagcccccccaagtttgtcttcggctccgaatcagtcaagcgtatcttcagcagcgaaaagagcaacccgttcgcctttggtaattcctctgccacaggatccttgttcggcttttcattcaacgccccactgaaatcgaatgactctgaaacctccagtgtagcccagagcggatcagaatccaaggtggaaccgaaaaagtgcgaactgtcaaagaattctgatatcgagcagagttctgacagcaaggttaagaatctcagcgccagctttccaatggaggaaagtagcattaattacacctttaagactcccgagaaggagcctcctttgtggcacgctgaatttactaaggaggaactggtacagaaactttcttccaccaccaagagtgctgatcaactgaatggtctactgagagagactgaagccacttccgctgtactgatggaacagattaaacttttgaagagcgagatcaggaggctcgagaggaatcaggaggaatccgctgctaacgtcgagcatctgaaaaacgtgttgctccagttcatattcctgaaacctggctcagagcgtgagagtctgttgcccgtcatcaacacaatgctgcagctatcccccgaagagaaagggaagctcgcagccgtggcacagggactgcaggagacttccattcctaaaaagaaatag

SEQ ID NO: 35371 - DNA, 3042 bp, Artificial Sequence
  derived and/or modified sequence
atgctgaagagcgtgatgcaggagctggaggactacagcgagggcggccccctctataagaatggatcattgagaaacgctgacagcgagatcaagcacagcactccctctcccacaaagtattcgctgagtccctcaaagagctataaatattcacctaaaacaccaccgcggtgggccgaggatcagaattccttgcgcaaaatgatttgtcaggaggtgaaagctattacaaagctgaactcgagcaagtccgcatcaagacaccgctggcctactgagaactacgggccagactccgtacctgatggataccagggttctcagacttttcatggggctcctcttacagtggctaccacggggcccagcgtgtactattctcagagccctgcatataattctcaatatctgctgaggcctgcggctaatgttacacccaccaaaggatcctccaacacagagtttaagtctactaaggagggtttctctattgccgtgtccgccgacggcttcaaattcggtattagtgaacctggcaatcaagagaagaaatcagagaaacctctcgaaaacgacaccggcttccaggcgcaggacatttccggacagaagaatggccggggcgtcatcttcggccagacctccagcacttttacatttgctgatgttgctaagtcaactagcggcgagggcttccaattcgggaagaaagacccaaatttcaagggctttagtggggccggcgaaaaactgttttcatcccagtgcggcaagatggctaacaaagcaaacacaagtggggattttgagaaggacgacgatgcttgcaagacagaagactctgacgacatccattttgaacccgtggtgcaaatgccagaaaaggttgaattggtgaccggtgaggaaggagagaaggtcctctacagccagggtgtgaagttattccggttcgatgccgaaatttctcagtggaaggagagaggactggggaatctgaagatcctgaaaaacgaagtcaacggaaaacccaggatgttaatgcggagggatcaggtgcttaaggtttgcgccaaccactggattacaacgaccatgaacctgaagcctcttagcggtagcgatagggcttggatgtggttagcctcagatttctcggatggcgacgctaagctcgaaagactcgcggctcagttcaagaccccagagctcgcggaggaattcaaacagaaatttgaagaatgccaacgactgctgcttgacataccactgcagactccccacaagctggtcgacactgggagggctgccaagctgatccaaagggcggaggagatgaagagcggcttgaaagattttaaaacattcctgacgaatgatcaaaccaaggtgacggaagaggagaataagggctcgggcaccggagccgccggcgcctccgatacaaccatcaagcctaatcccgaaaacaccgggccaacgctggaatgggataattatgacctacgtgaagacgctttagacgataacgtttcctccagcagcgttcacgactccccccttgccagctctcccgtgaggaaaaatatctttagattcgatgaaagcacaacaggtttcaattttagttttaagtccgcactgtctcttagtaagagtccagcaaaactgaaccaatcaggcacgagtgtcggtaccgacgaggagtccgacgttacacaggaggaggaaagagacggccaatatttcgaacctgtagtgcccctgccagatctggtggaggtgtcatcaggcgaagaaaatgaacaggtggtcttttctcacatggcagaactgtatcgctacgataaggacgtggggcagtggaaggaacgcgggatcggggacataaagatcctgcaaaattacgacaataagcaagttcgcatcgtaatgcggagggatcaggtgctcaagctttgcgctaaccaccggatcacccccgacatgtctctccagaatatgaaaggcaccgaaagggtgtgggtctggacagcctgcgacttcgccgatggcgagcggaaagtcgagcaccttgctgtcaggttcaagctccaggacgtggccgatagctttaaaaagatcttcgacgaggctaagactgcccaggagaaagacagcctgatcacgccgcacgtgagtaggagttccacaccccgggaatccccgtgcggcaaaattgcggttgccgtgttagaagagaccaccagagagcgcacagatgtaatccagggagatgatgtggccgacgccgcctcagaggtggaggtgtcctctacctccgaaactacaacaaaagctgtggtcagtccccccaaatttgtctttgggtctgagtcggttaaaagaatattctcctctgagaagtccaatccattcgcctttggaaattcctctgcgaccggaagcttgtttgggttctcttttaatgcccctctcaaatcaaatgacagcgagacgagttcagttgcacaaagcgggagcgagagcaaagtggaacccaagaaatgtgagctctcaaaaaacagcgacatcgaacaaagctccgatagcaaagtaaaaaaccttagtgcatcatttccaatggaggagtctagcattaattatactttcaaaacccccgaaaaggagccccccctatggcacgccgaattcaccaaggaggagctcgtgcaaaaactgtcttctaccactaaaagcgccgatcagttgaacggactgctgcgagagaccgaggccactagcgccgtcctgatggagcagatcaagttgttgaagtccgagatcagaagattggagagaaaccaggaagagtccgctgccaatgttgaacatcttaagaatgttctgctgcagtttatcttcctcaaacccggctctgaacgtgagagcctactgcccgtgataaacaccatgctccaactctctccagaggagaagggaaagctggccgctgtcgcacaaggcctccaggagactagtatccctaagaaaaagtag

SEQ ID NO: 35372 - DNA, 5271 bp, Artificial Sequence
  derived and/or modified sequence
atgcggcggagcaaggcctacggcgagcggtacctggccagcgtgcaggggagcgccccaagtcccgggaaaaagctcaggggcttttatttcgccaaactctactatgaagccaaagagtacgatttggccaagaagtacgtgtgtacctacctgagtgtacaggaacgtgaccctagggcacacagatttctcggcctcctgtatgaactcgaagaaaataccgaaaaagcagtggagtgctatcggcgatcattagaactcaatcctccgcagaaggacctcgtgcttaaaatagctgagctcctttgtaaaaacgacgtaaccgacggacgagccaagtactgggtggagagagccgccaaactgttccccgggagtcctgccatatacaaacttaaggagcatttattggattgcgagggtgaggacggctggaacaagttgttcgattggatccaatctgagctgtatgtgcgaccagacgacgtgcacatgaatattagattggtggagttgtatcgttccaataagcggcttaaagatgccgtggccagatgccacgaggccgagcggaacatcgctctgcggtcgagtctcgagtggaacagctgcgtggtacagacactaaaagagtacctggaaagcctgcagtgcctggagagcgacaagtccgattggcgagccacaaatactgacctgttgctggcttatgctaacctcatgttgctgacacttagtacccgcgatgtccaggaaagccgggagcttctggagtcttttgattccgccctccagtctgccaagagctctctaggcggtaatgacgagctgtctgccacctttctggagatgaaggggcacttttacatgcacgcagggtccctcctactcaagatgggccagcatggcaacaatgtgcagtggcaggcactctcagagttggcagcgttatgctatgtgattgcgtttcaagtacctcgcccaaaaataaaacttatcaagggtgaggctggccagaacctgctggagatgatggcctgtgatagactgagtcagtcgggacacatgctgttaaacctttcacgagggaagcaggattttttgaaggaagttgtggagaccttcgccaacaagagcggacagtccgtcctttataacgccttgttcagctcccaatctagcaaggacacgagcttcctggggagcgacgacatcggcaatattgacgtccaggaaccagagctcgaggatctcgctcggtacgacgttggagctatacaggcccacaacgggtctctgcagcatctgacctggctgggcctccagtggaactccttacccgccctcccggggattagaaagtggctgaagcagctatttcaccatctcccccaggagacctctcgcttggaaaccaacgcccctgaaagcatctgcatcctggatctggaagtgtttttactgggagtggtgtacaccagccacctgcaactaaaggagaagtgtaacagccatcacagctcctaccagcctttgtgtctccctctgcctgtgtgtaagcgtctctgcactgagcgtcaaaagagctggtgggatgcagtctgcaccctgattcaccgaaaggcagtgcccggaaactctgccgaactcaggctcgtggtccagcacgagatcaataccctgagggcacaagaaaagcatggacttcagccagccttactggttcattgggccaagtgtctgcagaagatgggcagggggctcaactccagttacgatcagcaggaatacattggaagatctgtacactattggaagaaggtgctgcccctcctgaaaatcatcaaaaagaactccatccccgagcccatcgacccacttttcaagcactttcactctgtggatattcaggccagcgagatcgtcgagtatgaggaagatgctcacataacctttgcgatactggacgctgtgcacggtaacatcgaggacgccgtgacagccttcgaatctatcaaaagtgtcgtttcctactggaatcttgcattaatatttcatcgcaaggccgaggacatagaaaacgatgccgtgtttccagaagagcaggaagaatgcaagaattatctgagaaagaccagggactacctgatcaaaataatcgacgactctgactctaacctcagtgtcgtcaaaaagctgcccgtgcctctggaatctgtgaaggagatgctgaaatcagttatgcaagagctggaggattattctgagggagggcccctctacaaaaatggctctctgagaaacgctgatagcgaaattaagcattccacgcccagtcctactaaatacagtctgagtccctctaagtcttacaagtacagccccaaaactcccccccgatgggccgaggaccagaattccctcagaaagatgatctgtcaagaggtgaaagccattactaagctcaacagttccaagtcagcatcgagacaccggtggccaaccgagaactatgggccggatagcgtaccagatggataccaaggaagtcagacctttcatggcgccccactaactgtggcgacaactgggccttctgtgtattatagccagagtcccgcttacaattcccaatatcttctgcgcccggccgccaacgtcacccccacgaaaggctctagcaacaccgaatttaaatccactaaggaggggttttctatcgccgtgagcgccgacggctttaagttcggaatttccgagcccgggaatcaggagaagaaaagcgagaaacctctcgaaaacgataccggatttcaggctcaggatattagcggacagaaaaacggccgcggggtaattttcgggcagactagctccacttttactttcgctgatgtggccaagagcacaagcggagaagggttccagttcggtaagaaagatcccaactttaagggattctcaggggctggggaaaagctgttttcaagtcagtgtggaaaaatggcaaacaaagcaaacaccagtggcgacttcgagaaggacgacgacgcctgtaagaccgaggacagtgacgacattcattttgaacccgtggtgcagatgcctgagaaggtggagttagtgactggcgaggagggagagaaggtcctgtactcgcagggtgtgaaattgtttcggttcgacgctgagatctcccagtggaaggaacggggtctcggcaacctgaagatcctgaagaacgaagttaatggaaagcctcgcatgctcatgcgccgggaccaggtgttaaaggtgtgcgcaaaccactggatcaccaccaccatgaacttgaagcccctgagtggctcagatcgcgcatggatgtggttggcctccgacttcagtgatggcgatgccaagctggaacggctcgcggctcaatttaagacaccagaattagccgaggagttcaagcagaagttcgaggagtgccagcgcctgctgctggatatccctctgcaaactcctcataaactggtcgatactggacgggcagctaagcttatacaaagagcagaagagatgaaatcaggactcaaagacttcaagacctttctgaccaacgatcagaccaaagttactgaggaggagaataaagggagcggcactggggctgcgggtgcctccgacactacaataaaaccaaatccagagaataccggccccaccctagaatgggacaactacgacctccgggaagatgccctggacgacaacgtttcatcatcctccgttcacgactcccctctggcgagctccccagtgcgtaagaacatttttcgcttcgatgagagcaccaccgggtttaacttttcgtttaagagcgccctttccctctccaaatctcccgcaaagctgaaccagagtggtaccagcgttggcacagatgaagagagtgatgttactcaggaggaagagcgagatgggcagtacttcgaacccgtggtgccgctgcccgatctcgtggaggtaagttctggcgaagagaatgagcaggtggtattctcccacatggctgagctgtataggtacgacaaagacgtggggcaatggaaggaacgagggattggagatatcaaaattctgcaaaactatgacaacaagcaggtgcgcatcgtcatgagacgtgaccaagtgctgaagctgtgtgctaatcataggatcactcccgatatgtcactgcagaacatgaaaggcacagagcgcgtgtgggtttggacagcatgcgacttcgctgatggcgaacgcaaggtggagcacctcgccgtcaggtttaaactgcaagacgtggccgactcttttaagaaaatctttgatgaagccaaaaccgctcaagaaaaggactccctcataactcctcacgtatctaggtcgagcactcccagggagagcccttgcggtaagatagcggtagcggtgttggaggagacaaccagagaacgcaccgatgttatccagggagatgacgtggctgacgctgcctccgaggtcgaagtaagctcaactagcgaaactactactaaagctgtggtgagcccccccaagttcgtattcggctcggaaagcgtgaaaaggatttttagctctgaaaaaagcaaccccttcgcctttggaaatagttccgccacgggctccctgttcggattctctttcaacgcacctctgaagagtaatgattctgagaccagctccgtggcccaatcagggagtgagtctaaggtggaaccgaagaaatgtgaactcagtaaaaacagtgacattgaacaaagtagtgattccaaagtgaagaatctttccgcaagttttcctatggaggaaagttcaataaattacacatttaaaaccccggagaaagaacctcccctgtggcacgcagagtttacaaaggaggaactggtccagaagctatcctccaccacaaagagtgcggatcagcttaacggcttacttcgcgaaaccgaggctacctctgccgtgttaatggagcaaattaagctgctgaagtcagagattaggcggctggagcgcaaccaagaggaaagcgccgccaatgttgaacacctcaaaaacgtgctgcttcagttcatttttctgaagcctggatctgaacgagagagtctgttgccagtgataaatacaatgctgcagctctctccagaggagaagggcaaattagctgccgtggctcaaggactgcaagaaaccagtatcccaaaaaaaaaatag

SEQ ID NO: 35373 - DNA, 5270 bp, Artificial Sequence
  derived and/or modified sequence
atgcgacggtccaaggcttatggcgagcggtacttggctagtgttcagggatccgccccttcacctggcaaaaagttgcgcggattctacttcgcaaaactgtactacgaggctaaggaatatgaccttgctaagaaatatgtgtgcacctatctctccgttcaggaacgcgatccaagggctcatcgcttcctgggactgttgtacgagctggaggagaacaccgagaaggctgtggagtgctaccgccgaagtctggagcttaaccctcctcagaaggacctggtcctcaagatagcggaactgctgtgtaagaatgatgtgaccgatggacgtgccaagtactgggtggaaagggccgctaagctgttccccggatcgcccgctatctataagctcaaagaacatctgctcgactgtgagggcgaggatggctggaataagctgtttgattggattcagagtgagttgtacgtccggccagatgatgtacacatgaatatccgattggtggaactgtacaggtctaataaacgcttgaaagacgctgtagctagatgccatgaggcagagcgcaatatcgctctccgctccagcctagaatggaactcatgcgttgtccaaactttaaaggaatatctcgaatcactgcaatgtttagaatccgataagagtgattggcgggcaacaaatactgacttgctcttggcatacgccaacctaatgctgctcacgctgagtaccagggacgttcaggagtctcgggaattgctggagtcgttcgacagcgccttacaatctgcaaaatcctccctggggggaaacgacgagttgtcagctaccttcctggagatgaagggccacttctatatgcacgctggatctttattgctgaagatgggtcagcacggcaacaatgttcagtggcaggcattgtctgagttggccgcattgtgttatgtaattgcgttccaggtgcccagaccaaagatcaaactgattaaaggagaggccggacagaaccttctggaaatgatggcatgcgatcgcctttcacagtctggtcacatgctgttgaacttgtctagagggaagcaagattttctgaaagaagtggtggagacctttgccaacaaaagcgggcaatccgtgttgtacaatgctttgttttcctcacagagctccaaggatacatcttttctgggatctgacgatatagggaacatagatgtccaggagccagagttagaggatctggccaggtacgacgtgggcgctatccaggcgcacaacggttcccttcagcaccttacctggctcggcctccagtggaacagtctgcctgctctgcctggtatcagaaagtggctaaagcagttgttccatcacctgccacaagaaacgtctaggctcgaaacgaatgcccctgaatctatttgcatcttggacctggaagtgttccttctcggagtggtttacactagtcacctccagttgaaggaaaagtgcaattcacatcacagcagctaccagcccctatgcttacctcttcctgtctgtaagagactgtgcactgagaggcagaagtcctggtgggatgctgtgtgtaccctgatccaccgcaaagcagtacccggaaacagtgcggagcttcgtctggtagtgcaacacgaaatcaacactctgagagcccaagagaagcatgggctacagccagcactgctagtacattgggctaaatgcctgcaaaagatggggaggggcttaaactcttcttatgatcagcaggaatacattggacggtcagtgcactactggaaaaaagtgctccctctgctaaaaattatcaaaaagaattccataccagagcctatcgacccactgtttaagcacttccacagtgtagatatacaggcttccgaaatagttgaatatgaggaagacgcacatattacatttgcaatcttggatgccgtccacggcaacatcgaggatgccgtgacagcattcgaaagtataaagtctgtcgtttcctactggaacctggcactgatcttccaccgcaaggcggaagatattgagaacgacgccgtgttccctgaagaacaggaagagtgcaagaactatctgagaaaaacaagggattacttgatcaaaatcatcgacgattccgattctaacctatcggtggtgaaaaagctgccagtgccactggaatcggtgaaggaaatgctgaaatcagttatgcaagaactcgaggattattctgaaggtggcccactgtataaaaatggtagcttaagaaacgctgattcagaaatcaagcactcaaccccaagtcctactaagtacagcctcagtccttccaagtcatacaagtatagtccaaagacaccacctcggtgggccgaagatcaaaattcactgcgcaaaatgatctgtcaggaagtgaaagcaatcaccaagctaaattctagtaagtcagcaagcagacacagatggcctaccgaaaactatgggcctgacagtgtgcctgatggatatcaagggtctcagacatttcatggggcaccactcaccgttgcaactacaggtcccagcgtgtattactcccagtctcctgcctataactcacagtatctcctgaggcctgcagctaacgtgaccccaaccaaaggctcctccaatacagagtttaaatcaacaaaagagggcttttctatcgctgttagcgctgacggcttcaagttcggaatttcagagcccggaaaccaggagaaaaagtctgaaaagccacttgagaacgataccggcttccaggcacaggacatttccgggcagaaaaatggaagaggcgtgatctttggacagacctccagcacgtttacatttgccgacgtggccaagtccacttctggagaggggtttcagttcggcaaaaaggatcctaatttcaagggatttagcggggctggcgaaaagctgttttcttcgcagtgcggtaaaatggcaaataaggccaatacgagcggcgattttgagaaagatgacgatgcctgcaagacagaggatagtgatgacattcacttcgagccagtggtacagatgcccgaaaaggtggagctcgtcaccggggaagagggagagaaagtgctatactcacagggcgtgaagctgttcaggtttgatgccgaaattagccaatggaaggagcgcggactggggaacctgaaaattctaaagaacgaggtcaatggaaaaccccgtatgctgatgcggagggatcaggtcctgaaggtctgcgctaaccactggattacaacaacaatgaaccttaagcctttgtccggttccgacagggcttggatgtggttggcatccgacttttccgacggagacgctaagctcgaacgcctcgccgcacagtttaagacccctgagttggcggaggaattcaaacaaaaatttgaggaatgccagagactcttgttggatattccacttcagacacctcacaaactggtcgataccgggagagccgcaaagctgattcagcgggctgaggagatgaagtcggggctgaaggatttcaaaacgttcctgaccaacgaccagactaaggtcacggaggaggagaataagggatcaggcaccggagcagctggagcgagcgacacgaccatcaaacccaaccccgagaacacaggtccaaccttagaatgggacaattatgatctgagggaggatgcgcttgacgacaatgtaagcagttcctccgtgcacgattcgccactcgccagttcccctgttaggaagaacattttcagattcgacgaaagcaccactgggttcaatttttccttcaagtccgcactgtccctgagtaaatctcccgcaaaactaaatcaaagtggcacgtccgtgggcactgatgaagagagcgacgtaacacaggaagaagaacgcgacgggcagtactttgagcctgtcgtgcctctcccggaccttgttgaggttagcagcggggaggaaaatgaacaggtagtttttagtcaccgggctgaactgtaccgttatgataaagacgtgggccaatggaaggaacggggaattggggatataaagatccttcagaactacgataataagcaggtacgaatcgttatgaggagagatcaagtgctgaagctctgtgccaaccataggattaccccggacatgtctctgcagaacatgaaggggacagagagggtatgggtgtggaccgcatgtgactttgcagatggcgagcggaaagtggagcacttggccgtccggtttaagctgcaggacgttgccgacagcttcaaaaagatctttgacgaggccaaaacggcgcaagaaaaggactcgctgataacaccgcacgtgtccagatcaagcacgcctagagaatcaccatgcggaaaaatcgctgtcgccgtgctcgaagagactactagagagcgcacagacgtcatccaaggcgacgatgtggccgacgccgctagtgaagtggaggtgtcatcgacgagcgaaaccacgactaaggctgttgtctccccccctaagttcgtgtttgggtccgagtcagtcaaacgaatttttagctctgagaagagtaaccctttcgccttcggcaatagttcagctacagggagtctgtttgggttttcttttaacgccccactgaagtctaatgatagcgaaaccagcagcgtcgcacaaagtgggtcagaatcgaaagtggaacctaagaaatgtgaattatccaaaaacagtgacattgagcaatcatccgattcgaaagtgaagaacctttccgcctcatttcctatggaagagtctagcatcaactatacctttaagacccccgaaaaggaacctcctttgtggcatgccgagttcaccaaggaggaactggtgcagaagctctcctccaccaccaagagtgctgatcagttgaatggtctcctgagagagaccgaagctacaagtgcggttttgatggaacagataaagcttctgaagagtgaaatcagacgcctcgagaggaatcaggaagagagcgccgcaaatgtggaacacctgaaaaatgtccttttacagttcatcttcttgaaacccggatccgaaagagagtccctgctccccgtcattaacacgatgctgcagctgagtcctgaggagaaaggtaagttagcagccgtggcccaggggctccaggagacctcaatccctaaaaagaagta

SEQ ID NO: 35374 - DNA, 3042 bp, Artificial Sequence
  derived and/or modified sequence
atgctgaagtccgttatgcaagaactcgaggattattccgagggaggacctttgtacaaaaacggaagcctgagaaatgccgattctgaaattaaacattctactccgtctccaacgaagtatagcttatcaccaagcaaatcctacaagtatagtccaaaaactcccccacggtgggccgaggaccagaactccctgaggaagatgatttgtcaagaggtgaaggccataactaaactcaactcctcaaaaagcgcgagccgccacaggtggcccactgagaactatggcccagactccgttccggacggatatcaaggaagccagactttccacggcgctcctctcacagtcgccactacagggccttctgtgtactatagccagtcccctgcctataactcgcagtacctgctgcgacccgctgcaaacgttactccaacaaaaggcagtagcaacactgagttcaaatctaccaaagagggtttctccatcgccgtgtcagccgacggttttaaatttggcatatccgaacccggtaatcaagagaagaagagcgaaaagcccctggagaacgacaccgggttccaggctcaggatatcagcggacaaaagaacggcagaggggttatcttcggccagacgtcgagtactttcaccttcgcagacgtggcaaaaagtacgtctggggaaggtttccagttcggaaaaaaagacccaaatttcaaggggttttctggtgccggtgaaaaactgttttccagtcagtgtggcaagatggctaacaaagccaacacatccggcgatttcgagaaggatgatgacgcctgtaagaccgaggactccgatgacatccatttcgagcctgttgtacaaatgccggaaaaggtagaactggtgacaggcgaggagggagagaaggtgttgtacagccagggcgtcaagcttttccgtttcgatgccgaaatttcccagtggaaagagaggggcctggggaacctgaaaattctgaaaaacgaggttaacggcaaaccccgaatgctgatgagacgcgaccaggtactcaaagtgtgtgctaaccactggattaccacaactatgaatctgaagcctttgtctggatccgacagagcctggatgtggctcgccagtgatttctctgacggtgacgcaaagttagagcgattggccgctcagttcaagactcccgaactcgctgaagagttcaaacaaaaattcgaagagtgtcaacgcctactgttggatataccattgcaaactccccacaaactggtcgatactgggagagccgcaaagctcatccagagagctgaagagatgaagtcaggtcttaaagacttcaaaaccttcctcacaaacgatcaaactaaggtcaccgaagaagagaacaaaggctctggtactggcgctgccggagctagcgataccaccattaaaccaaacccagaaaacacaggcccaacccttgaatgggataattatgatctgcgagaggacgcccttgatgacaacgtgtcttcctcttcagtgcacgatagtccattagcctcctctcccgtgcggaagaacatcttcagattcgatgaaagcaccacaggattcaacttcagtttcaagtcagctctcagtttgtccaaaagtcctgctaagctgaaccagtccggaacatcagtgggtactgacgaggagagcgacgtgacgcaggaggaagagagagacggccagtacttcgagcctgttgtccctctccctgacctggtggaggtgagttccggtgaggagaacgaacaggtcgtcttctctcatatggcagaactctatcggtacgacaaggacgtaggacagtggaaggaaaggggcattggcgatatcaagatcttgcagaattacgataacaagcaggttagaattgtgatgaggcgtgaccaagtcttaaaactgtgcgcaaatcatcggataacgcccgacatgagtcttcagaatatgaaaggtacggagagggtgtgggtctggacggcttgtgattttgcggatggagagcggaaagtagagcatctagctgtacgcttcaagctgcaggacgttgccgacagctttaagaaaatcttcgacgaggctaagacagcccaagaaaaagatagccttattaccccccacgtgagccgctcaagtacccccagggagtctccctgtggaaaaatagccgtggccgtgcttgaggaaaccaccagagaacggactgacgtgatccaaggcgatgacgtagctgacgctgctagcgaggtggaggtgtcttcaaccagtgagacaacaacaaaggcagtggtctccccacctaaattcgttttcggcagcgagtccgttaaacggattttcagcagcgaaaaatccaatcccttcgccttcggcaacagctccgctaccggctccctgtttggattcagctttaacgctcctcttaaatcaaatgactccgaaacctccagcgtcgcacagtctgggtctgagagtaaagtcgaacctaaaaagtgtgagttgagtaagaacagtgatattgaacagtctagtgattccaaagttaagaacctgtctgccagcttccctatggaggaatcttcaattaattacacttttaaaacacctgaaaaggaacccccactgtggcacgcagaatttaccaaggaggagctcgtacaaaaactgagctccacgaccaagagtgctgaccagttgaacggtctgctgcgggagaccgaagcaacctcagccgtgcttatggagcagatcaagctgctgaagtcagagatcaggcgcttggaacggaatcaggaagaaagtgcagctaacgtggagcatctcaagaatgtgttgctgcagtttatctttctgaagcccggttcagagagggaaagcctcctgccagtcatcaataccatgttacagctttctccagaggaaaaggggaagctggccgctgtggcacagggattgcaggagaccagcatacccaaaaaaaagtag

SEQ ID NO: 35375 - DNA, 5270 bp, Artificial Sequence
  derived and/or modified sequence
atgagaaggagtaaggcttatggtgagaggtacctggccagcgtccagggtagtgctccatcccccggaaagaaactgcggggattttatttcgccaagctgtactacgaggccaaagagtatgatctcgccaaaaagtacgtgtgtacttatctatctgtgcaggagagagaccccagagcacatcgctttttggggctgctctatgagttggaagaaaatacagaaaaggctgtagagtgctatcggcgttctctggagttaaatcctccacagaaggatctggtgctgaagattgccgaactgttatgcaagaacgatgttactgatgggcgtgcaaaatactgggtcgaaagagcagccaaactctttcctggttctcccgctatatacaagttgaaggagcacctgctggactgcgagggcgaggacggatggaacaagctgtttgactggattcaaagcgagctatatgtgcggcctgacgacgtgcacatgaacattcgtctcgttgagttatatcgcagcaacaagcggctgaaggacgcggtggccaggtgccacgaagcagaacgcaatatagctcttcgctcctcccttgagtggaactcatgtgtcgtacaaactctcaaagagtaccttgaaagtctgcagtgtctggagagcgacaaaagcgactggcgcgctaccaacacagacctcttgttggcgtacgccaaccttatgcttttaaccttgtcaacaagagacgtgcaggagagccgggagttactggagtcttttgatagtgcattgcagtcggcaaaatcgtcgcttgggggtaatgacgagctcagcgctacattcctggagatgaagggccacttttatatgcatgcgggatccctgcttctgaagatggggcaacatgggaataacgtgcaatggcaagcactctcggagctagcagccctatgttacgtgattgcctttcaggttcccagacctaaaattaaactgatcaagggcgaggcgggacagaatctcctggaaatgatggcgtgtgataggctctcacagtccggacacatgctgttgaatctttccagggggaaacaggacttcttgaaagaggtggtggagacattcgccaataagtcgggacagagcgtcctctacaatgccctattttcatctcaatcctccaaagatacgtcatttctggggtcagacgacattgggaatattgatgtgcaagaaccggaactggaagatctcgccagatacgacgtgggtgctatccaggcccataatgggagcctccagcacctgacttggcttggcctacagtggaatagcttaccagctcttcctgggattcgaaagtggcttaaacaactctttcatcatctgccccaggagactagtcgtctcgaaacaaacgcaccagagtccatatgcattctggatctcgaagtgtttctgctgggcgtggtctacacgagccacctgcagttaaaggaaaaatgtaattctcaccattccagctaccagcccctctgcctgcccctgccagtgtgcaagcggctttgtacagagaggcagaaaagttggtgggatgcagtttgtactttgatacatagaaaggcagttcctggcaatagtgccgagttgagactggttgtacaacacgagattaataccctccgcgctcaggagaagcacggacttcagcctgccctgctcgtgcattgggcaaaatgcctccagaagatgggccgaggtctcaatagctcttacgatcagcaggagtacataggtcgctccgttcactactggaagaaggttttgcctttgttgaaaattattaaaaagaacagcatcccagagcctatcgaccccctatttaagcactttcactcagtcgacattcaagcctccgaaatcgtcgagtatgaagaggacgcgcacatcacttttgccatcctggacgccgtgcacggcaacattgaagatgccgtgaccgcttttgagtccataaagtcggtggtgagctattggaacttggccttaatctttcacaggaaagctgaagacattgaaaacgacgcagtatttcccgaggagcaggaagaatgcaagaattatcttcgcaaaacaagagactatcttattaaaataatagatgacagcgacagtaatctaagtgtggtgaaaaaactacctgttcctcttgagagcgttaaggaaatgctgaagagcgtaatgcaagagctagaggactacagcgagggagggccactctacaaaaatggctctttaagaaatgcggattcggagattaagcacagcactccctccccaacgaaatacagtctgagtccctcgaagtcttataagtatagccccaagactccacccaggtgggccgaggatcaaaattcacttaggaaaatgatctgccaagaagtgaaggcaatcacaaagctgaattcttccaaaagtgcatcccgccaccgttggcccaccgagaattacgggccagactcggtgcccgacggctaccaaggcagtcagacctttcatggtgcccctttgactgtggcgacgactggtccttctgtgtattatagtcagagcccggcttacaactctcaatatcttctacgcccagccgctaacgtcacccctacgaagggcagttcaaataccgagtttaaatcaaccaaggagggcttcagcatcgccgtaagcgccgacggcttcaagtttggaatctccgagccaggaaaccaagagaagaagtccgagaaaccattagagaacgataccggctttcaagcacaggacattagcggccaaaaaaacggtcgaggtgtgatttttggacagacttccagtacattcacatttgccgatgtagccaagagcacctcaggggagggatttcagtttgggaagaaggatcctaactttaagggctttagtggcgctggagaaaaacttttcagttctcagtgtgggaagatggctaacaaggctaacacatctggcgattttgaaaaggatgacgatgcttgtaagacggaagacagtgatgatatccatttcgagccggttgtacagatgcctgaaaaggttgagctagtgacaggcgaagaaggagagaaagttctctattctcaaggggtcaaactctttcggttcgatgcagaaattagccaatggaaggaacgaggcctgggtaacctcaaaattctgaaaaatgaagtaaatggaaagccgagaatgctgatgcggagggatcaagtactgaaggtttgtgcgaatcactggattaccaccaccatgaatcttaaaccactgagtggaagcgatcgcgcatggatgtggctggcgtccgacttttcagatggcgacgcaaagttagagaggcttgccgcacaatttaagacccctgagcttgccgaagaatttaagcagaagtttgaagagtgtcaacggcttcttctcgacatcccgctgcaaacccctcacaagttggtcgacaccggcagggcagccaagctgatccaaagggcagaggaaatgaaatccggattaaaggactttaagacctttctgaccaatgaccagacaaaggtgaccgaagaagagaataagggctccggtacaggggctgctggtgcctctgacaccacgatcaagcctaatcccgagaacactggccctaccttagagtgggacaattacgatttgcgcgaggacgcactggatgataacgtcagctctagctcagtgcatgattcccctctggcctcatcgcccgttcgcaagaacatattccggttcgacgagagcaccactggcttcaattttagctttaagtccgctttgagtctgtctaaaagtcctgccaagttgaatcagtctgggacgagtgtgggaacggatgaagagtcagacgtgacacaagaggaagaacgagacgggcagtactttgagccggtagtgcctctgccagacttggtagaagtgagctccggtgaagagaacgaacaggttgttttcagccacatggctgaactgtacagatatgacaaggacgtgggtcagtggaaggagcgaggcatcggggatatcaaaattctgcagaattacgataataaacaagttaggatcgttatgcgccgagatcaggtgctcaagctttgtgctaaccacaggattacccctgacatgtcattgcaaaacatgaagggtacagagcgcgtgtgggtgtggacggcatgtgatttcgcagacggcgaaaggaaagtggagcaccttgccgtcagatttaagctccaggacgttgcggattcttttaaaaaaatctttgacgaggcgaagaccgcccaggaaaaggactccctgataacaccccatgtctctagatcttctacaccccgtgaatccccctgtggcaaaattgcggttgccgtcctcgaggagacgacgagagaacgtactgatgtgatacagggggatgacgtcgctgacgccgcttctgaggtggaagtgagctctacgtccgaaacgaccacaaaggccgtggtgtcccctccaaaattcgtgtttggttctgagtccgtcaagaggatttttagttccgaaaaatccaatccctttgcctttgggaattcatcagcaacaggctcactgtttggctttagcttcaatgctccccttaagtccaacgacagtgaaacgtcatcagtggcccagagcgggtccgaatccaaggtggagcctaaaaaatgcgaactgagcaagaattccgacatcgaacagtcttcagacagcaaggttaagaatctcagcgcctcctttccgatggaggaatcctctattaattacaccttcaagacccccgagaaagaacctccgttgtggcacgcagagtttactaaagaggagctcgtccagaaactgtccagtacaaccaagagtgctgatcaactcaatggcttgctcagggagaccgaggccactagcgcagtcctcatggagcagatcaaactgctcaagtctgaaataagaaggctggagcgcaaccaggaggaatccgccgctaatgtagaacatctcaaaaatgttctgcttcagtttattttcctcaagccaggatccgaacgggaatccttgttgcccgtcatcaatactatgctgcagctatcacctgaagagaaggggaagctggcagctgtagcccagggtctgcaggaaacttccatcccaaaaaagaagta

SEQ ID NO: 35376 - DNA, 5498 bp, Artificial Sequence
  derived and/or modified sequence
ctggtttcacgcgtctcgggagccaggttggcggtgcgatgaggcgcagcaaggcctacggggagcggtacctcgcctcggtgcagggctccgccccgtcgcctggaaagaagttgagaggattctattttgcaaagctgtattatgaagctaaagaatatgatcttgctaaaaaatacgtatgtacttaccttagtgtgcaagagagggatcccagagctcacagatttctgggtcttctttatgaattggaagaaaacacagagaaagccgttgaatgttacaggcgttcactggaattaaacccaccacaaaaagatcttgtgttgaagattgcagaattgctttgtaaaaatgatgttactgatggaagagcaaaatactgggttgaaagggcagcgaaacttttcccaggaagtcctgcaatttataaactaaaggaacatcttctagattgtgaaggtgaagatggatggaataaactttttgactggattcagtcagaactttatgtaagacctgatgacgtccatatgaacatccggctagtggagttgtatcgctcaaataaaagattgaaggatgctgtggcccgctgccatgaggcagagaggaacatagctttgcgttcaagtttagagtggaattcgtgtgttgtacagacccttaaggaatatctggagtctttacagtgtttggagtctgataaaagtgactggcgagcaaccaatacagacttactgctggcctatgctaatcttatgcttcttacgctttccactagagatgtgcaggaaagtagagaattactggaaagttttgatagtgctcttcagtctgcaaaatcttctttgggtggaaatgatgaactgtcagctactttcttagaaatgaaaggacatttctacatgcatgctggttctctgctcttgaagatgggtcagcatggtaataatgttcaatggcaagctctttctgagctggctgcattgtgctatgtcatagcatttcaggttccaagaccaaagattaaattaataaaaggtgaagctggacaaaatctgctggaaatgatggcctgtgaccgactgagccaatcagggcatatgttgctaaacttaagtcgtggcaagcaagattttttaaaagaggttgttgaaacttttgccaacaaaagcgggcagtctgtgttatataatgctctgttttctagtcagtcatctaaggatacatcttttcttggtagcgatgatattggaaacattgatgtacaagaaccagagcttgaagatttggctagatacgatgttggtgctattcaagcacataatggtagtcttcagcaccttacttggcttggcttacagtggaattcattgcctgctttacctggaatccgaaaatggctaaaacagcttttccatcatttgccccaggaaacctcaaggcttgaaacaaatgcacctgaatcaatatgtattttagatcttgaagtatttctccttggagtagtatataccagccacttacaattaaaggagaaatgtaattctcaccacagctcctatcagccgttatgcctgccccttcctgtgtgtaaacggctttgtacagagagacaaaaatcttggtgggatgcggtttgtactctgattcacagaaaagcagtacctggaaactcagcagaattgagacttgtagttcagcatgaaataaacactctaagagcccaggaaaaacatggccttcaacctgctctgcttgtacattgggcaaaatgccttcagaaaatgggcaggggtcttaattcttcttatgatcaacaagaatacatagggagaagtgttcattattggaagaaagttttgccattgttgaagataataaagaagaacagtattcctgaacctattgatcctctgtttaaacattttcatagtgtagacattcaggcatcagaaattgttgagtatgaagaagatgcacacataacttttgctatattggatgcagtacatggaaatatagaagatgctgtgactgcttttgaatctataaaaagtgttgtttcttattggaatcttgcactgatttttcacaggaaagcagaagacattgaaaatgatgccgtttttcctgaagaacaagaagaatgcaaaaattatctgagaaagaccagggactacctaataaagattatagatgacagtgattcaaatctttcagtggtcaagaaattgcctgtgcccctggagtctgtaaaagagatgcttaagtcagtcatgcaggaactcgaagactatagtgaaggaggtcctctctataaaaatggttctttgcgaaatgcagattcagaaataaaacattctacaccatctcctaccaaatattcactatcaccaagtaaaagttacaagtattctcccaaaacaccacctcgatgggcagaagatcagaattctttacggaaaatgatttgccaagaagtaaaggccattacgaaactaaatagcagtaagtcagcatcccgtcatcgttggcccacagagaattatggaccagactcggtgcctgatggatatcaggggtcacagacatttcatggggctccactaacagttgcaactactggcccttcagtatattatagtcagtcaccagcatataattcccagtatcttctcagaccagcagctaatgttactcccacaaagggttcttctaatacagaatttaagtcaaccaaagaaggattttccatcgctgtgtctgctgatggatttaaatttggcatttcggaaccaggaaatcaagaaaagaaaagtgaaaagcctcttgaaaatgatactggcttccaggctcaggatattagtggccagaagaatggccgtggtgtgatttttggccaaacaagtagcacttttacatttgcagatgttgcaaaatcaacttcaggagaaggatttcagtttggcaaaaaagaccccaatttcaagggattttcaggtgctggagaaaaattattctcatcacaatgcggtaaaatggccaataaagcaaacacttccggtgactttgagaaagatgatgatgcctgtaagactgaggacagcgatgacatccattttgaaccagtagttcaaatgcctgaaaaagtagaacttgtaacaggagaagaaggtgaaaaagttctgtattcacagggggtaaaactatttagatttgatgctgagataagtcagtggaaagaaaggggcttggggaacttaaaaattctcaaaaatgaggtcaatggcaaaccaagaatgctgatgcgaagagaccaagtactaaaagtgtgtgctaatcattggataacaactacaatgaacctgaagcccctctctggatcagatagagcatggatgtggttagccagtgatttctctgatggtgatgccaaactagagcggttggcagcacaatttaaaacaccagagctggctgaagaattcaagcagaaatttgaggaatgccagcggcttctgttagacataccacttcaaactccccataaacttgtagatactggcagagctgccaagctaatacagagagctgaagaaatgaagagtggactgaaagatttcaaaacgtttttgacaaatgatcaaacaaaagtcactgaggaagaaaataagggttcaggtacaggtgcagccggtgcctcagacacaacaataaaacccaatcctgaaaacactgggcccacattagaatgggataactatgatttaagggaagatgctttggatgataatgttagtagtagctcagtacatgattctccgttggcaagtagccctgtgagaaaaaatattttccgctttgatgagtcaacaacaggatttaacttcagttttaaatctgctttgagtctatctaagtctcctgccaagttgaatcagagtgggacttcagttggcactgatgaagaatctgatgttactcaagaagaagagagagatggacagtactttgaacctgttgttcctttacctgatctagttgaagtatccagtggtgaggaaaatgaacaagttgtttttagtcacagggcagaactctacagatatgataaagatgttggtcaatggaaagaaaggggcattggtgatataaagattttacagaattatgataataagcaagttcgtatagtgatgagaagggaccaagtattaaaactttgtgccaatcacagaataactccagacatgagtttgcaaaatatgaaagggacagaaagagtatgggtgtggactgcatgtgattttgcagatggagaaagaaaagtagagcatttagctgttcgttttaaactacaggatgttgcagactcatttaagaaaatttttgatgaagcaaaaacagcccaggaaaaagattctttgataacacctcatgtttctcggtcaagcactcccagagagtcaccatgtggcaaaattgctgtagctgtattagaagaaaccacaagagagaggacagatgttattcagggtgatgatgtagcagatgcagcttcagaagttgaagtgtctagcacatctgaaacaacaacaaaagcagtggtttctcctccaaagtttgtatttggttcagagtctgttaaaagaatttttagtagtgaaaaatcaaacccatttgcatttggcaacagttctgccactgggtctttgtttggatttagttttaatgcacctttgaaaagtaacgatagtgaaactagttcagtagcccagagtggatctgaaagcaaagtggaacctaaaaaatgtgaactgtcaaagaactctgatatcgaacagtcttcagatagcaaagtcaaaaatctctctgcttcctttccaatggaagaatcttcaatcaactacacatttaaaacaccagaaaaggagcctccattatggcatgctgaatttaccaaagaagaattggttcagaagctcagttccaccacaaaaagtgcagatcagttaaacggcctgcttcgggaaacagaggcaaccagtgcagtccttatggagcaaattaagcttctcaaaagtgaaataagaagattggaaaggaatcaagaggagtctgcagctaacgtggaacacttgaagaacgtcttgctgcagttcattttcttgaagccaggtagtgagagagagagccttcttcctgttataaatacgatgttgcagctcagccctgaagaaaagggaaaacttgctgcggttgctcaaggtcttcaagaaacctccatacccaagaaaaaatagaaagcaaccatgttctactatggtgccaaaaatagttgaacatcgacatcaaaaagattctttctgtctgcttattcacatattctggtttgaattaaaagtgatgaaattatcctaaatacagttggccctctgtatccatgggttccacatccacaaattcaaccaactgtggatggaaaagacttg

SEQ ID NO: 35377 - DNA, 5498 bp, Artificial Sequence
  derived and/or modified sequence
ctggtttcacgcgtctcgggagccaggttggcggtgcgatgaggcgcagcaaagcctacggggagcggtacctcgcctcggtgcagggctccgccccgtcgcctggaaagaagttgagaggattctattttgcaaagctgtattatgaagctaaagaatatgatcttgctaaaaaatacgtatgtacttaccttagtgtgcaagagagggatcccagagctcacagatttctgggtcttctttatgaattggaagaaaacacagagaaagccgttgaatgttacaggcgttcactggaattaaacccaccacaaaaagatcttgtgttgaagattgcagaattgctttgtaaaaatgatgttactgatggaagagcaaaatactgggttgaaagggcagcgaaacttttcccaggaagtcctgcaatttataaactaaaggaacatcttctagattgtgaaggtgaagatggatggaataaactttttgactggattcagtcagaactttatgtaagacctgatgacgtccatatgaacatccggctagtggagttgtatcgctcaaataaaagattgaaggatgctgtggcccgctgccatgaggcagagaggaacatagctttgcgttcaagtttagagtggaattcgtgtgttgtacagacccttaaggaatatctggagtctttacagtgtttggagtctgataaaagtgactggcgagcaaccaatacagacttactgctggcctatgctaatcttatgcttcttacgctttccactagagatgtgcaggaaagtagagaattactggaaagttttgatagtgctcttcagtctgcaaaatcttctttgggtggaaatgatgaactgtcagctactttcttagaaatgaaaggacatttctacatgcatgctggttctctgctcttgaagatgggtcagcatggtaataatgttcaatggcaagctctttctgagctggctgcattgtgctatgtcatagcatttcaggttccaagaccaaagattaaattaataaaaggtgaagctggacaaaatctgctggaaatgatggcctgtgaccgactgagccaatcagggcatatgttgctaaacttaagtcgtggcaagcaagattttttaaaagaggttgttgaaacttttgccaacaaaagcgggcagtctgtgttatataatgctctgttttctagtcagtcatctaaggatacatcttttcttggtagcgatgatattggaaacattgatgtacaagaaccagagcttgaagatttggctagatacgatgttggtgctattcaagcacataatggtagtcttcagcaccttacttggcttggcttacagtggaattcattgcctgctttacctggaatccgaaaatggctaaaacagcttttccatcatttgccccaggaaacctcaaggcttgaaacaaatgcacctgaatcaatatgtattttagatcttgaagtatttctccttggagtagtatataccagccacttacaattaaaggagaaatgtaattctcaccacagctcctatcagccgttatgcctgccccttcctgtgtgtaaacggctttgtacagagagacaaaaatcttggtgggatgcggtttgtactctgattcacagaaaagcagtacctggaaactcagcagaattgagacttgtagttcagcatgaaataaacactctaagagcccaggaaaaacatggccttcaacctgctctgcttgtacattgggcaaaatgccttcagaaaatgggcaggggtcttaattcttcttatgatcaacaagaatacatagggagaagtgttcattattggaagaaagttttgccattgttgaagataataaagaagaacagtattcctgaacctattgatcctctgtttaaacattttcatagtgtagacattcaggcatcagaaattgttgagtatgaagaagatgcacacataacttttgctatattggatgcagtacatggaaatatagaagatgctgtgactgcttttgaatctataaaaagtgttgtttcttattggaatcttgcactgatttttcacaggaaagcagaagacattgaaaatgatgccgtttttcctgaagaacaagaagaatgcaaaaattatctgagaaagaccagggactacctaataaagattatagatgacagtgattcaaatctttcagtggtcaagaaattgcctgtgcccctggagtctgtaaaagagatgcttaagtcagtcatgcaggaactcgaagactatagtgaaggaggtcctctctataaaaatggttctttgcgaaatgcagattcagaaataaaacattctacaccatctcctaccaaatattcactatcaccaagtaaaagttacaagtattctcccaaaacaccacctcgatgggcagaagatcagaattctttacggaaaatgatttgccaagaagtaaaggccattacgaaactaaatagcagtaagtcagcatcccgtcatcgttggcccacagagaattatggaccagactcggtgcctgatggatatcaggggtcacagacatttcatggggctccactaacagttgcaactactggcccttcagtatattatagtcagtcaccagcatataattcccagtatcttctcagaccagcagctaatgttactcccacaaagggttcttctaatacagaatttaagtcaaccaaagaaggattttccatcgctgtgtctgctgatggatttaaatttggcatttcggaaccaggaaatcaagaaaagaaaagtgaaaagcctcttgaaaatgatactggcttccaggctcaggatattagtggccagaagaatggccgtggtgtgatttttggccaaacaagtagcacttttacatttgcagatgttgcaaaatcaacttcaggagaaggatttcagtttggcaaaaaagaccccaatttcaagggattttcaggtgctggagaaaaattattctcatcacaatgcggtaaaatggccaataaagcaaacacttccggtgactttgagaaagatgatgatgcctgtaagactgaggacagcgatgacatccattttgaaccagtagttcaaatgcctgaaaaagtagaacttgtaacaggagaagaaggtgaaaaagttctgtattcacagggggtaaaactatttagatttgatgctgagataagtcagtggaaagaaaggggcttggggaacttaaaaattctcaaaaatgaggtcaatggcaaaccaagaatgctgatgcgaagagaccaagtactaaaagtgtgtgctaatcattggataacaactacaatgaacctgaagcccctctctggatcagatagagcatggatgtggttagccagtgatttctctgatggtgatgccaaactagagcggttggcagcacaatttaaaacaccagagctggctgaagaattcaagcagaaatttgaggaatgccagcggcttctgttagacataccacttcaaactccccataaacttgtagatactggcagagctgccaagctaatacagagagctgaagaaatgaagagtggactgaaagatttcaaaacgtttttgacaaatgatcaaacaaaagtcactgaggaagaaaataagggttcaggtacaggtgcagccggtgcctcagacacaacaataaaacccaatcctgaaaacactgggcccacattagaatgggataactatgatttaagggaagatgctttggatgataatgttagtagtagctcagtacatgattctccgttggcaagtagccctgtgagaaaaaatattttccgctttgatgagtcaacaacaggatttaacttcagttttaaatctgctttgagtctatctaagtctcctgccaagttgaatcagagtgggacttcagttggcactgatgaagaatctgatgttactcaagaagaagagagagatggacagtactttgaacctgttgttcctttacctgatctagttgaagtatccagtggtgaggaaaatgaacaagttgtttttagtcacatggcagaactctacagatatgataaagatgttggtcaatggaaagaaaggggcattggtgatataaagattttacagaattatgataataagcaagttcgtatagtgatgagaagggaccaagtattaaaactttgtgccaatcacagaataactccagacatgagtttgcaaaatatgaaagggacagaaagagtatgggtgtggactgcatgtgattttgcagatggagaaagaaaagtagagcatttagctgttcgttttaaactacaggatgttgcagactcatttaagaaaatttttgatgaagcaaaaacagcccaggaaaaagattctttgataacacctcatgtttctcggtcaagcactcccagagagtcaccatgtggcaaaattgctgtagctgtattagaagaaaccacaagagagaggacagatgttattcagggtgatgatgtagcagatgcagcttcagaagttgaagtgtctagcacatctgaaacaacaacaaaagcagtggtttctcctccaaagtttgtatttggttcagagtctgttaaaagaatttttagtagtgaaaaatcaaacccatttgcatttggcaacagttctgccactgggtctttgtttggatttagttttaatgcacctttgaaaagtaacgatagtgaaactagttcagtagcccagagtggatctgaaagcaaagtggaacctaaaaaatgtgaactgtcaaagaactctgatatcgaacagtcttcagatagcaaagtcaaaaatctctctgcttcctttccaatggaagaatcttcaatcaactacacatttaaaacaccagaaaaggagcctccattatggcatgctgaatttaccaaagaagaattggttcagaagctcagttccaccacaaaaagtgcagatcagttaaacggcctgcttcgggaaacagaggcaaccagtgcagtccttatggagcaaattaagcttctcaaaagtgaaataagaagattggaaaggaatcaagaggagtctgcagctaacgtggaacacttgaagaacgtcttgctgcagttcattttcttgaagccaggtagtgagagagagagccttcttcctgttataaatacgatgttgcagctcagccctgaagaaaagggaaaacttgctgcggttgctcaaggtcttcaagaaacctccatacccaagaaaaaatagaaagcaaccatgttctactatggtgccaaaaatagttgaacatcgacatcaaaaagattctttctgtctgcttattcacatattctggtttgaattaaaagtgatgaaattatcctaaatacagttggccctctgtatccatgggttccacatccacaaattcaaccaactgtggatggaaaagacttg

SEQ ID NO: 35378 - DNA, 6931 bp, Artificial Sequence
  derived and/or modified sequence
caagacaccctcagagcacagggtgctgccaagagcccggccgagtgcagctcgagcgccgacgtcgccaaggatacacagtgctgacgcagtacacaagtgcgtcacagtggtcctccgccggctacgtcagtggctttcaggcgctttcctgttggaattggcgactgctgcggggctgagcgctggtttcacgcgtctcgggagccaggttggcggtgcgatgaggcgcagcaaagcctacggggagcggtacctcgcctcggtgcagggctccgccccgtcgcctggaaagaagttgagaggattctattttgcaaagctgtattatgaagctaaagaatatgatcttgctaaaaaatacgtatgtacttaccttagtgtgcaagagagggatcccagagctcacagatttctgggtcttctttatgaattggaagaaaacacagagaaagccgttgaatgttacaggcgttcactggaattaaacccaccacaaaaagatcttgtgttgaagattgcagaattgctttgtaaaaatgatgttactgatggaagagcaaaatactgggttgaaagggcagcgaaacttttcccaggaagtcctgcaatttataaactaaaggaacatcttctagattgtgaaggtgaagatggatggaataaactttttgactggattcagtcagaactttatgtaagacctgatgacgtccatatgaacatccggctagtggagttgtatcgctcaaataaaagattgaaggatgctgtggcccgctgccatgaggcagagaggaacatagctttgcgttcaagtttagagtggaattcgtgtgttgtacagacccttaaggaatatctggagtctttacagtgtttggagtctgataaaagtgactggcgagcaaccaatacagacttactgctggcctatgctaatcttatgcttcttacgctttccactagagatgtgcaggaaagtagagaattactggaaagttttgatagtgctcttcagtctgcaaaatcttctttgggtggaaatgatgaactgtcagctactttcttagaaatgaaaggacatttctacatgcatgctggttctctgctcttgaagatgggtcagcatggtaataatgttcaatggcaagctctttctgagctggctgcattgtgctatgtcatagcatttcaggttccaagaccaaagattaaattaataaaaggtgaagctggacaaaatctgctggaaatgatggcctgtgaccgactgagccaatcagggcatatgttgctaaacttaagtcgtggcaagcaagattttttaaaagaggttgttgaaacttttgccaacaaaagcgggcagtctgtgttatataatgctctgttttctagtcagtcatctaaggatacatcttttcttggtagcgatgatattggaaacattgatgtacaagaaccagagcttgaagatttggctagatacgatgttggtgctattcaagcacataatggtagtcttcagcaccttacttggcttggcttacagtggaattcattgcctgctttacctggaatccgaaaatggctaaaacagcttttccatcatttgccccaggaaacctcaaggcttgaaacaaatgcacctgaatcaatatgtattttagatcttgaagtatttctccttggagtagtatataccagccacttacaattaaaggagaaatgtaattctcaccacagctcctatcagccgttatgcctgccccttcctgtgtgtaaacggctttgtacagagagacaaaaatcttggtgggatgcggtttgtactctgattcacagaaaagcagtacctggaaactcagcagaattgagacttgtagttcagcatgaaataaacactctaagagcccaggaaaaacatggccttcaacctgctctgcttgtacattgggcaaaatgccttcagaaaatgggcaggggtcttaattcttcttatgatcaacaagaatacatagggagaagtgttcattattggaagaaagttttgccattgttgaagataataaagaagaacagtattcctgaacctattgatcctctgtttaaacattttcatagtgtagacattcaggcatcagaaattgttgagtatgaagaagatgcacacataacttttgctatattggatgcagtacatggaaatatagaagatgctgtgactgcttttgaatctataaaaagtgttgtttcttattggaatcttgcactgatttttcacaggaaagcagaagacattgaaaatgatgccgtttttcctgaagaacaagaagaatgcaaaaattatctgagaaagaccagggactacctaataaagattatagatgacagtgattcaaatctttcagtggtcaagaaattgcctgtgcccctggagtctgtaaaagagatgcttaagtcagtcatgcaggaactcgaagactatagtgaaggaggtcctctctataaaaatggttctttgcgaaatgcagattcagaaataaaacattctacaccatctcctaccaaatattcactatcaccaagtaaaagttacaagtattctcccaaaacaccacctcgatgggcagaagatcagaattctttacggaaaatgatttgccaagaagtaaaggccattacgaaactaaatagcagtaagtcagcatcccgtcatcgttggcccacagagaattatggaccagactcggtgcctgatggatatcaggggtcacagacatttcatggggctccactaacagttgcaactactggcccttcagtatattatagtcagtcaccagcatataattcccagtatcttctcagaccagcagctaatgttactcccacaaagggttcttctaatacagaatttaagtcaaccaaagaaggattttccatcgctgtgtctgctgatggatttaaatttggcatttcggaaccaggaaatcaagaaaagaaaagtgaaaagcctcttgaaaatgatactggcttccaggctcaggatattagtggccagaagaatggccgtggtgtgatttttggccaaacaagtagcacttttacatttgcagatgttgcaaaatcaacttcaggagaaggatttcagtttggcaaaaaagaccccaatttcaagggattttcaggtgctggagaaaaattattctcatcacaatgcggtaaaatggccaataaagcaaacacttccggtgactttgagaaagatgatgatgcctgtaagactgaggacagcgatgacatccattttgaaccagtagttcaaatgcctgaaaaagtagaacttgtaacaggagaagaaggtgaaaaagttctgtattcacagggggtaaaactatttagatttgatgctgagataagtcagtggaaagaaaggggcttggggaacttaaaaattctcaaaaatgaggtcaatggcaaaccaagaatgctgatgcgaagagaccaagtactaaaagtgtgtgctaatcattggataacaactacaatgaacctgaagcccctctctggatcagatagagcatggatgtggttagccagtgatttctctgatggtgatgccaaactagagcggttggcagcacaatttaaaacaccagagctggctgaagaattcaagcagaaatttgaggaatgccagcggcttctgttagacataccacttcaaactccccataaacttgtagatactggcagagctgccaagctaatacagagagctgaagaaatgaagagtggactgaaagatttcaaaacgtttttgacaaatgatcaaacaaaagtcactgaggaagaaaataagggttcaggtacaggtgcagccggtgcctcagacacaacaataaaacccaatcctgaaaacactgggcccacattagaatgggataactatgatttaagggaagatgctttggatgataatgttagtagtagctcagtacatgattctccgttggcaagtagccctgtgagaaaaaatattttccgctttgatgagtcaacaacaggatttaacttcagttttaaatctgctttgagtctatctaagtctcctgccaagttgaatcagagtgggacttcagttggcactgatgaagaatctgatgttactcaagaagaagagagagatggacagtactttgaacctgttgttcctttacctgatctagttgaagtatccagtggtgaggaaaatgaacaagttgtttttagtcacatggcagaactctacagatatgataaagatgttggtcaatggaaagaaaggggcattggtgatataaagattttacagaattatgataataagcaagttcgtatagtgatgagaagggaccaagtattaaaactttgtgccaatcacagaataactccagacatgagtttgcaaaatatgaaagggacagaaagagtatgggtgtggactgcatgtgattttgcagatggagaaagaaaagtagagcatttagctgttcgttttaaactacaggatgttgcagactcatttaagaaaatttttgatgaagcaaaaacagcccaggaaaaagattctttgataacacctcatgtttctcggtcaagcactcccagagagtcaccatgtggcaaaattgctgtagctgtattagaagaaaccacaagagagaggacagatgttattcagggtgatgatgtagcagatgcagcttcagaagttgaagtgtctagcacatctgaaacaacaacaaaagcagtggtttctcctccaaagtttgtatttggttcagagtctgttaaaagaatttttagtagtgaaaaatcaaacccatttgcatttggcaacagttctgccactgggtctttgtttggatttagttttaatgcacctttgaaaagtaacgatagtgaaactagttcagtagcccagagtggatctgaaagcaaagtggaacctaaaaaatgtgaactgtcaaagaactctgatatcgaacagtcttcagatagcaaagtcaaaaatctctctgcttcctttccaatggaagaatcttcaatcaactacacatttaaaacaccagaaaaggagcctccattatggcatgctgaatttaccaaagaagaattggttcagaagctcagttccaccacaaaaagtgcagatcagttaaacggcctgcttcgggaaacagaggcaaccagtgcagtccttatggagcaaattaagcttctcaaaagtgaaataagaagattggaaaggaatcaagaggagtctgcagctaacgtggaacacttgaagaacgtcttgctgcagttcattttcttgaagccaggtagtgagagagagagccttcttcctgttataaatacgatgttgcagctcagccctgaagaaaagggaaaacttgctgcggttgctcaaggtcttcaagaaacctccatacccaagaaaaaatagaaagcaaccatgttctactatggtgccaaaaatagttgaacatcgacatcaaaaagattctttctgtctgcttattcacatattctggtttgaattaaaagtgatgaaattatcctaaatacagttggccctctgtatccatgggttccacatccacaaattcaaccaactgtggatggaaaagacttgaaaaagatgagagaaaataacaatatgacaataaaacataatacaaataaaaacaatacagtataacaacgattacatagcatttacattatattagggattgcacaagagaaggtatgtaggttatatgcaaatactgcaccattttacataagggacttgagaagcatggattttggtagccacaggggtcctggaaccaatccctcacagacacagacggacactttacagtagatgaacacaaagatgaaaggaaaagtctgacctaggtctgcggggagaagtggaactccatttttgacaggtgatgccattttttgttttggacatcgtccctctgtagttctttccattcccagtcttgcactctgaaagatacactgaaggaaagtccacacagtggtcaaagtctttcacaagacaccacgtgaaggtctgcacagcacagtcacattgagaaaaagatctcatgcaccagaccccctgtttctgctttctaaaagatcatcttttgcacctgcaaaaaggctgcagtaaactgggccattccatactttgattcatgtattcaaatgctacttatgagctctctgtgtattgagccccaccaggatgctggggacacacggggcacagtgcagccagaggcttggccatcatagagctcacattctagtggaatcagacaggggggttacaggaaatattcaagtaaacaatataaaatgagatcacttaatgatgatacatggatacatgttacatacatgatgagacagagtaagagaatggggaaagggtttttagatgggggaatggcaggcttttccgaggctgaaagagatccaacccacttctatttcttcaggctcccagtgatatgaaaaagtgccaaacaggactataaaattgtggtctactgtaaatggtttgcagtaaaagttctcaaccagcttccactcaaccaactcaccagttagacaatgggccctctcctgtgtttaaaacagtccggtgcccacctgggtccacatgcagctggcaggtgtttgctagtgtgcccacccatgtctgttccccccacgtgagttatgtgcttacaacgagtcgtttctttgcattttccaactttcttacatttatatttaattaaagatgatctaaactgagaaatgaatgtgaaaagaaacaaagctcttttttgtttggtttttaactaaattaaatgtttttaacaagttgaaa

SEQ ID NO: 35379 - DNA, 5271 bp, Artificial Sequence
  derived and/or modified sequence
atgagaagaagcaaggcctacggcgagagatacctggccagcgtgcagggcagcgcccccagccccggcaagaagctgagaggcttctacttcgccaagctgtactacgaggccaaggagtacgacctggccaagaagtacgtgtgcacctacctgagcgtgcaggagagagaccccagagcccacagattcctgggcctgctgtacgagctggaggagaacaccgagaaggccgtggagtgctacagaagaagcctggagctgaaccccccccagaaggacctggtgctgaagatcgccgagctgctgtgcaagaacgacgtgaccgacggcagagccaagtactgggtggagagagccgccaagctgttccccggcagccccgccatctacaagctgaaggagcacctgctggactgcgagggcgaggacggctggaacaagctgttcgactggatccagagcgagctgtacgtgagacccgacgacgtgcacatgaacatcagactggtggagctgtacagaagcaacaagagactgaaggacgccgtggccagatgccacgaggccgagagaaacatcgccctgagaagcagcctggagtggaacagctgcgtggtgcagaccctgaaggagtacctggagagcctgcagtgcctggagagcgacaagagcgactggagagccaccaacaccgacctgctgctggcctacgccaacctgatgctgctgaccctgagcaccagagacgtgcaggagagcagagagctgctggagagcttcgacagcgccctgcagagcgccaagagcagcctgggcggcaacgacgagctgagcgccaccttcctggagatgaagggccacttctacatgcacgccggcagcctgctgctgaagatgggccagcacggcaacaacgtgcagtggcaggccctgagcgagctggccgccctgtgctacgtgatcgccttccaggtgcccagacccaagatcaagctgatcaagggcgaggccggccagaacctgctggagatgatggcctgcgacagactgagccagagcggccacatgctgctgaacctgagcagaggcaagcaggacttcctgaaggaggtggtggagaccttcgccaacaagagcggccagagcgtgctgtacaacgccctgttcagcagccagagcagcaaggacaccagcttcctgggcagcgacgacatcggcaacatcgacgtgcaggagcccgagctggaggacctggccagatacgacgtgggcgccatccaggcccacaacggcagcctgcagcacctgacctggctgggcctgcagtggaacagcctgcccgccctgcccggcatcagaaagtggctgaagcagctgttccaccacctgccccaggagaccagcagactggagaccaacgcccccgagagcatctgcatcctggacctggaggtgttcctgctgggcgtggtgtacaccagccacctgcagctgaaggagaagtgcaacagccaccacagcagctaccagcccctgtgcctgcccctgcccgtgtgcaagagactgtgcaccgagagacagaagagctggtgggacgccgtgtgcaccctgatccacagaaaggccgtgcccggcaacagcgccgagctgagactggtggtgcagcacgagatcaacaccctgagagcccaggagaagcacggcctgcagcccgccctgctggtgcactgggccaagtgcctgcagaagatgggcagaggcctgaacagcagctacgaccagcaggagtacatcggcagaagcgtgcactactggaagaaggtgctgcccctgctgaagatcatcaagaagaacagcatccccgagcccatcgaccccctgttcaagcacttccacagcgtggacatccaggccagcgagatcgtggagtacgaggaggacgcccacatcaccttcgccatcctggacgccgtgcacggcaacatcgaggacgccgtgaccgccttcgagagcatcaagagcgtggtgagctactggaacctggccctgatcttccacagaaaggccgaggacatcgagaacgacgccgtgttccccgaggagcaggaggagtgcaagaactacctgagaaagaccagagactacctgatcaagatcatcgacgacagcgacagcaacctgagcgtggtgaagaagctgcccgtgcccctggagagcgtgaaggagatgctgaagagcgtgatgcaggagctggaggactacagcgagggcggccccctgtacaagaacggcagcctgagaaacgccgacagcgagatcaagcacagcacccccagccccaccaagtacagcctgagccccagcaagagctacaagtacagccccaagaccccccccagatgggccgaggaccagaacagcctgagaaagatgatctgccaggaggtgaaggccatcaccaagctgaacagcagcaagagcgccagcagacacagatggcccaccgagaactacggccccgacagcgtgcccgacggctaccagggcagccagaccttccacggcgcccccctgaccgtggccaccaccggccccagcgtgtactacagccagagccccgcctacaacagccagtacctgctgagacccgccgccaacgtgacccccaccaagggcagcagcaacaccgagttcaagagcaccaaggagggcttcagcatcgccgtgagcgccgacggcttcaagttcggcatcagcgagcccggcaaccaggagaagaagagcgagaagcccctggagaacgacaccggcttccaggcccaggacatcagcggccagaagaacggcagaggcgtgatcttcggccagaccagcagcaccttcaccttcgccgacgtggccaagagcaccagcggcgagggcttccagttcggcaagaaggaccccaacttcaagggcttcagcggcgccggcgagaagctgttcagcagccagtgcggcaagatggccaacaaggccaacaccagcggcgacttcgagaaggacgacgacgcctgcaagaccgaggacagcgacgacatccacttcgagcccgtggtgcagatgcccgagaaggtggagctggtgaccggcgaggagggcgagaaggtgctgtacagccagggcgtgaagctgttcagattcgacgccgagatcagccagtggaaggagagaggcctgggcaacctgaagatcctgaagaacgaggtgaacggcaagcccagaatgctgatgagaagagaccaggtgctgaaggtgtgcgccaaccactggatcaccaccaccatgaacctgaagcccctgagcggcagcgacagagcctggatgtggctggccagcgacttcagcgacggcgacgccaagctggagagactggccgcccagttcaagacccccgagctggccgaggagttcaagcagaagttcgaggagtgccagagactgctgctggacatccccctgcagaccccccacaagctggtggacaccggcagagccgccaagctgatccagagagccgaggagatgaagagcggcctgaaggacttcaagaccttcctgaccaacgaccagaccaaggtgaccgaggaggagaacaagggcagcggcaccggcgccgccggcgccagcgacaccaccatcaagcccaaccccgagaacaccggccccaccctggagtgggacaactacgacctgagagaggacgccctggacgacaacgtgagcagcagcagcgtgcacgacagccccctggccagcagccccgtgagaaagaacatcttcagattcgacgagagcaccaccggcttcaacttcagcttcaagagcgccctgagcctgagcaagagccccgccaagctgaaccagagcggcaccagcgtgggcaccgacgaggagagcgacgtgacccaggaggaggagagagacggccagtacttcgagcccgtggtgcccctgcccgacctggtggaggtgagcagcggcgaggagaacgagcaggtggtgttcagccacagagccgagctgtacagatacgacaaggacgtgggccagtggaaggagagaggcatcggcgacatcaagatcctgcagaactacgacaacaagcaggtgagaatcgtgatgagaagagaccaggtgctgaagctgtgcgccaaccacagaatcacccccgacatgagcctgcagaacatgaagggcaccgagagagtgtgggtgtggaccgcctgcgacttcgccgacggcgagagaaaggtggagcacctggccgtgagattcaagctgcaggacgtggccgacagcttcaagaagatcttcgacgaggccaagaccgcccaggagaaggacagcctgatcaccccccacgtgagcagaagcagcacccccagagagagcccctgcggcaagatcgccgtggccgtgctggaggagaccaccagagagagaaccgacgtgatccagggcgacgacgtggccgacgccgccagcgaggtggaggtgagcagcaccagcgagaccaccaccaaggccgtggtgagcccccccaagttcgtgttcggcagcgagagcgtgaagagaatcttcagcagcgagaagagcaaccccttcgccttcggcaacagcagcgccaccggcagcctgttcggcttcagcttcaacgcccccctgaagagcaacgacagcgagaccagcagcgtggcccagagcggcagcgagagcaaggtggagcccaagaagtgcgagctgagcaagaacagcgacatcgagcagagcagcgacagcaaggtgaagaacctgagcgccagcttccccatggaggagagcagcatcaactacaccttcaagacccccgagaaggagccccccctgtggcacgccgagttcaccaaggaggagctggtgcagaagctgagcagcaccaccaagagcgccgaccagctgaacggcctgctgagagagaccgaggccaccagcgccgtgctgatggagcagatcaagctgctgaagagcgagatcagaagactggagagaaaccaggaggagagcgccgccaacgtggagcacctgaagaacgtgctgctgcagttcatcttcctgaagcccggcagcgagagagagagcctgctgcccgtgatcaacaccatgctgcagctgagccccgaggagaagggcaagctggccgccgtggcccagggcctgcaggagaccagcatccccaagaagaagtag

SEQ ID NO: 35380 - DNA, 3042 bp, Artificial Sequence
  derived and/or modified sequence
atgctgaagagcgtgatgcaggagctggaggactacagcgagggcggccccctgtacaagaacggcagcctgagaaacgccgacagcgagatcaagcacagcacccccagccccaccaagtacagcctgagccccagcaagagctacaagtacagccccaagaccccccccagatgggccgaggaccagaacagcctgagaaagatgatctgccaggaggtgaaggccatcaccaagctgaacagcagcaagagcgccagcagacacagatggcccaccgagaactacggccccgacagcgtgcccgacggctaccagggcagccagaccttccacggcgcccccctgaccgtggccaccaccggccccagcgtgtactacagccagagccccgcctacaacagccagtacctgctgagacccgccgccaacgtgacccccaccaagggcagcagcaacaccgagttcaagagcaccaaggagggcttcagcatcgccgtgagcgccgacggcttcaagttcggcatcagcgagcccggcaaccaggagaagaagagcgagaagcccctggagaacgacaccggcttccaggcccaggacatcagcggccagaagaacggcagaggcgtgatcttcggccagaccagcagcaccttcaccttcgccgacgtggccaagagcaccagcggcgagggcttccagttcggcaagaaggaccccaacttcaagggcttcagcggcgccggcgagaagctgttcagcagccagtgcggcaagatggccaacaaggccaacaccagcggcgacttcgagaaggacgacgacgcctgcaagaccgaggacagcgacgacatccacttcgagcccgtggtgcagatgcccgagaaggtggagctggtgaccggcgaggagggcgagaaggtgctgtacagccagggcgtgaagctgttcagattcgacgccgagatcagccagtggaaggagagaggcctgggcaacctgaagatcctgaagaacgaggtgaacggcaagcccagaatgctgatgagaagagaccaggtgctgaaggtgtgcgccaaccactggatcaccaccaccatgaacctgaagcccctgagcggcagcgacagagcctggatgtggctggccagcgacttcagcgacggcgacgccaagctggagagactggccgcccagttcaagacccccgagctggccgaggagttcaagcagaagttcgaggagtgccagagactgctgctggacatccccctgcagaccccccacaagctggtggacaccggcagagccgccaagctgatccagagagccgaggagatgaagagcggcctgaaggacttcaagaccttcctgaccaacgaccagaccaaggtgaccgaggaggagaacaagggcagcggcaccggcgccgccggcgccagcgacaccaccatcaagcccaaccccgagaacaccggccccaccctggagtgggacaactacgacctgagagaggacgccctggacgacaacgtgagcagcagcagcgtgcacgacagccccctggccagcagccccgtgagaaagaacatcttcagattcgacgagagcaccaccggcttcaacttcagcttcaagagcgccctgagcctgagcaagagccccgccaagctgaaccagagcggcaccagcgtgggcaccgacgaggagagcgacgtgacccaggaggaggagagagacggccagtacttcgagcccgtggtgcccctgcccgacctggtggaggtgagcagcggcgaggagaacgagcaggtggtgttcagccacatggccgagctgtacagatacgacaaggacgtgggccagtggaaggagagaggcatcggcgacatcaagatcctgcagaactacgacaacaagcaggtgagaatcgtgatgagaagagaccaggtgctgaagctgtgcgccaaccacagaatcacccccgacatgagcctgcagaacatgaagggcaccgagagagtgtgggtgtggaccgcctgcgacttcgccgacggcgagagaaaggtggagcacctggccgtgagattcaagctgcaggacgtggccgacagcttcaagaagatcttcgacgaggccaagaccgcccaggagaaggacagcctgatcaccccccacgtgagcagaagcagcacccccagagagagcccctgcggcaagatcgccgtggccgtgctggaggagaccaccagagagagaaccgacgtgatccagggcgacgacgtggccgacgccgccagcgaggtggaggtgagcagcaccagcgagaccaccaccaaggccgtggtgagcccccccaagttcgtgttcggcagcgagagcgtgaagagaatcttcagcagcgagaagagcaaccccttcgccttcggcaacagcagcgccaccggcagcctgttcggcttcagcttcaacgcccccctgaagagcaacgacagcgagaccagcagcgtggcccagagcggcagcgagagcaaggtggagcccaagaagtgcgagctgagcaagaacagcgacatcgagcagagcagcgacagcaaggtgaagaacctgagcgccagcttccccatggaggagagcagcatcaactacaccttcaagacccccgagaaggagccccccctgtggcacgccgagttcaccaaggaggagctggtgcagaagctgagcagcaccaccaagagcgccgaccagctgaacggcctgctgagagagaccgaggccaccagcgccgtgctgatggagcagatcaagctgctgaagagcgagatcagaagactggagagaaaccaggaggagagcgccgccaacgtggagcacctgaagaacgtgctgctgcagttcatcttcctgaagcccggcagcgagagagagagcctgctgcccgtgatcaacaccatgctgcagctgagccccgaggagaagggcaagctggccgccgtggcccagggcctgcaggagaccagcatccccaagaagaagtag

SEQ ID NO: 35381 - DNA, 5271 bp, Artificial Sequence
  derived and/or modified sequence
atgagaagaagcaaggcctacggcgagagatacctggccagcgtgcagggcagcgcccccagccccggcaagaagctgagaggcttctacttcgccaagctgtactacgaggccaaggagtacgacctggccaagaagtacgtgtgcacctacctgagcgtgcaggagagagaccccagagcccacagattcctgggcctgctgtacgagctggaggagaacaccgagaaggccgtggagtgctacagaagaagcctggagctgaaccccccccagaaggacctggtgctgaagatcgccgagctgctgtgcaagaacgacgtgaccgacggcagagccaagtactgggtggagagagccgccaagctgttccccggcagccccgccatctacaagctgaaggagcacctgctggactgcgagggcgaggacggctggaacaagctgttcgactggatccagagcgagctgtacgtgagacccgacgacgtgcacatgaacatcagactggtggagctgtacagaagcaacaagagactgaaggacgccgtggccagatgccacgaggccgagagaaacatcgccctgagaagcagcctggagtggaacagctgcgtggtgcagaccctgaaggagtacctggagagcctgcagtgcctggagagcgacaagagcgactggagagccaccaacaccgacctgctgctggcctacgccaacctgatgctgctgaccctgagcaccagagacgtgcaggagagcagagagctgctggagagcttcgacagcgccctgcagagcgccaagagcagcctgggcggcaacgacgagctgagcgccaccttcctggagatgaagggccacttctacatgcacgccggcagcctgctgctgaagatgggccagcacggcaacaacgtgcagtggcaggccctgagcgagctggccgccctgtgctacgtgatcgccttccaggtgcccagacccaagatcaagctgatcaagggcgaggccggccagaacctgctggagatgatggcctgcgacagactgagccagagcggccacatgctgctgaacctgagcagaggcaagcaggacttcctgaaggaggtggtggagaccttcgccaacaagagcggccagagcgtgctgtacaacgccctgttcagcagccagagcagcaaggacaccagcttcctgggcagcgacgacatcggcaacatcgacgtgcaggagcccgagctggaggacctggccagatacgacgtgggcgccatccaggcccacaacggcagcctgcagcacctgacctggctgggcctgcagtggaacagcctgcccgccctgcccggcatcagaaagtggctgaagcagctgttccaccacctgccccaggagaccagcagactggagaccaacgcccccgagagcatctgcatcctggacctggaggtgttcctgctgggcgtggtgtacaccagccacctgcagctgaaggagaagtgcaacagccaccacagcagctaccagcccctgtgcctgcccctgcccgtgtgcaagagactgtgcaccgagagacagaagagctggtgggacgccgtgtgcaccctgatccacagaaaggccgtgcccggcaacagcgccgagctgagactggtggtgcagcacgagatcaacaccctgagagcccaggagaagcacggcctgcagcccgccctgctggtgcactgggccaagtgcctgcagaagatgggcagaggcctgaacagcagctacgaccagcaggagtacatcggcagaagcgtgcactactggaagaaggtgctgcccctgctgaagatcatcaagaagaacagcatccccgagcccatcgaccccctgttcaagcacttccacagcgtggacatccaggccagcgagatcgtggagtacgaggaggacgcccacatcaccttcgccatcctggacgccgtgcacggcaacatcgaggacgccgtgaccgccttcgagagcatcaagagcgtggtgagctactggaacctggccctgatcttccacagaaaggccgaggacatcgagaacgacgccgtgttccccgaggagcaggaggagtgcaagaactacctgagaaagaccagagactacctgatcaagatcatcgacgacagcgacagcaacctgagcgtggtgaagaagctgcccgtgcccctggagagcgtgaaggagatgctgaagagcgtgatgcaggagctggaggactacagcgagggcggccccctgtacaagaacggcagcctgagaaacgccgacagcgagatcaagcacagcacccccagccccaccaagtacagcctgagccccagcaagagctacaagtacagccccaagaccccccccagatgggccgaggaccagaacagcctgagaaagatgatctgccaggaggtgaaggccatcaccaagctgaacagcagcaagagcgccagcagacacagatggcccaccgagaactacggccccgacagcgtgcccgacggctaccagggcagccagaccttccacggcgcccccctgaccgtggccaccaccggccccagcgtgtactacagccagagccccgcctacaacagccagtacctgctgagacccgccgccaacgtgacccccaccaagggcagcagcaacaccgagttcaagagcaccaaggagggcttcagcatcgccgtgagcgccgacggcttcaagttcggcatcagcgagcccggcaaccaggagaagaagagcgagaagcccctggagaacgacaccggcttccaggcccaggacatcagcggccagaagaacggcagaggcgtgatcttcggccagaccagcagcaccttcaccttcgccgacgtggccaagagcaccagcggcgagggcttccagttcggcaagaaggaccccaacttcaagggcttcagcggcgccggcgagaagctgttcagcagccagtgcggcaagatggccaacaaggccaacaccagcggcgacttcgagaaggacgacgacgcctgcaagaccgaggacagcgacgacatccacttcgagcccgtggtgcagatgcccgagaaggtggagctggtgaccggcgaggagggcgagaaggtgctgtacagccagggcgtgaagctgttcagattcgacgccgagatcagccagtggaaggagagaggcctgggcaacctgaagatcctgaagaacgaggtgaacggcaagcccagaatgctgatgagaagagaccaggtgctgaaggtgtgcgccaaccactggatcaccaccaccatgaacctgaagcccctgagcggcagcgacagagcctggatgtggctggccagcgacttcagcgacggcgacgccaagctggagagactggccgcccagttcaagacccccgagctggccgaggagttcaagcagaagttcgaggagtgccagagactgctgctggacatccccctgcagaccccccacaagctggtggacaccggcagagccgccaagctgatccagagagccgaggagatgaagagcggcctgaaggacttcaagaccttcctgaccaacgaccagaccaaggtgaccgaggaggagaacaagggcagcggcaccggcgccgccggcgccagcgacaccaccatcaagcccaaccccgagaacaccggccccaccctggagtgggacaactacgacctgagagaggacgccctggacgacaacgtgagcagcagcagcgtgcacgacagccccctggccagcagccccgtgagaaagaacatcttcagattcgacgagagcaccaccggcttcaacttcagcttcaagagcgccctgagcctgagcaagagccccgccaagctgaaccagagcggcaccagcgtgggcaccgacgaggagagcgacgtgacccaggaggaggagagagacggccagtacttcgagcccgtggtgcccctgcccgacctggtggaggtgagcagcggcgaggagaacgagcaggtggtgttcagccacatggccgagctgtacagatacgacaaggacgtgggccagtggaaggagagaggcatcggcgacatcaagatcctgcagaactacgacaacaagcaggtgagaatcgtgatgagaagagaccaggtgctgaagctgtgcgccaaccacagaatcacccccgacatgagcctgcagaacatgaagggcaccgagagagtgtgggtgtggaccgcctgcgacttcgccgacggcgagagaaaggtggagcacctggccgtgagattcaagctgcaggacgtggccgacagcttcaagaagatcttcgacgaggccaagaccgcccaggagaaggacagcctgatcaccccccacgtgagcagaagcagcacccccagagagagcccctgcggcaagatcgccgtggccgtgctggaggagaccaccagagagagaaccgacgtgatccagggcgacgacgtggccgacgccgccagcgaggtggaggtgagcagcaccagcgagaccaccaccaaggccgtggtgagcccccccaagttcgtgttcggcagcgagagcgtgaagagaatcttcagcagcgagaagagcaaccccttcgccttcggcaacagcagcgccaccggcagcctgttcggcttcagcttcaacgcccccctgaagagcaacgacagcgagaccagcagcgtggcccagagcggcagcgagagcaaggtggagcccaagaagtgcgagctgagcaagaacagcgacatcgagcagagcagcgacagcaaggtgaagaacctgagcgccagcttccccatggaggagagcagcatcaactacaccttcaagacccccgagaaggagccccccctgtggcacgccgagttcaccaaggaggagctggtgcagaagctgagcagcaccaccaagagcgccgaccagctgaacggcctgctgagagagaccgaggccaccagcgccgtgctgatggagcagatcaagctgctgaagagcgagatcagaagactggagagaaaccaggaggagagcgccgccaacgtggagcacctgaagaacgtgctgctgcagttcatcttcctgaagcccggcagcgagagagagagcctgctgcccgtgatcaacaccatgctgcagctgagccccgaggagaagggcaagctggccgccgtggcccagggcctgcaggagaccagcatccccaagaagaagtag

SEQ ID NO: 35382 - DNA, 1371 bp, Artificial Sequence
  derived and/or modified sequence
atgaccacatcccatcagcctcaagatcggtacaaagccgtctggttgatttttttcatgcttggattgggcaccttgctcccctggaacttttttatgacagctacccagtatttcaccaatagattagatatgtctcaaaatgtcagcctcgtgaccgcagagctctccaaggatgcccaggcctctgcggccccagcggccccacttcctgagagaaattccctgtcggcaatctttaacaatgtcatgactttatgcgctatgctgccactgctcttgttcacatacctaaattcattcctccatcagaggatcccccagtcagtgcggatactaggctccttagttgccatcctattggtgttcctcatcacagctatcctcgtgaaggtgcaactcgatgctctgcctttctttgtgataacaatgataaagattgttttgataaattccttcggcgctattctgcagggcagcttattcggcctggcgggtctactgcccgcttcgtacactgccccaatcatgtctggacagggactcgcaggatttttcgccagcgtggctatgatatgtgcaatagccagcggaagcgagctcagcgaatcagccttcggctactttattactgcttgcgcagtcatcattctcacaattatttgctacttgggcctcccccggcttgaattttataggtactatcagcagctcaagttagagggacctggagagcaggaaaccaaactggatttgatttctaagggggaggaaccccgcgccggaaaggaggagtccggcgtgagtgtgagcaactcacagcccaccaatgagtcccattcaattaaggcgattctcaaaaatatctccgttcttgcatttagcgtttgttttattttcaccatcaccatcggcatgtttcctgcggtgactgtcgaggtgaagagttcaatcgccggttcaagcacatgggaaagatattttatccctgtctcatgttttctgacattcaatatcttcgattggctgggacggagtttgacagcagtgttcatgtggcctgggaaagactctcggtggctgccttctctagtgctcgcaagactagtcttcgtgccattattgctcctgtgcaacataaaacccagaagatatctgacagtggtgttcgagcacgatgcctggttcatttttttcatggctgctttcgcttttagcaatggctaccttgcgtcactgtgcatgtgcttcggcccaaagaaggtcaaacctgctgaggccgagactgcaggggccattatggccttctttttatgtctcggcttggcgttgggggctgtattcagtttccttttcagagctatcgtgtag

SEQ ID NO: 35383 - DNA, 1371 bp, Artificial Sequence
  derived and/or modified sequence
atgacgacttcacaccagcctcaagatcggtacaaggcagtgtggctgatctttttcatgctgggcctcggaaccttactgccgtggaacttttttatgaccgccacgcagtactttacaaacagactggacatgtcccaaaatgtctctctggttacagcagagctgtctaaagacgcccaagctagtgccgcccctgcagctccactgcccgagcgaaattccttaagcgcaatatttaataacgtgatgactctctgcgcaatgctcccactcctcctatttacgtacttaaactcatttctgcatcagaggatcccacagtcagtgcgcattcttggctcgctcgtggccattttactggtgttcctaatcacagcgatccttgtcaaggtgcagttggatgccctgccattttttgtcattaccatgatcaaaattgtgcttataaattcattcggagccatcctgcagggctccctcttcggtctggccggactcctgcccgccagctatactgccccaatcatgagtggacaggggttggcgggcttttttgcatccgtggcaatgatatgtgcgatagccagtggcagtgagctgagtgaatccgcttttggctatttcataactgcatgcgctgtgataatactgactatcatctgttatctgggactgcctagactggaattctatcggtattatcaacagttgaaactagaggggcccggtgagcaggaaaccaaactggatctgatctccaaaggagaggagccgcgggcaggcaaggaagaatcaggggtcagtgtgtctaattcgcagccaacaaacgaaagccactcgattaaagccatcctcaaaaatatctccgttctcgcattcagcgtttgtttcatcttcacgatcacgatcggcatgttccctgcggtcacagtggaggtgaaaagcagcattgcagggagctctacctgggaacggtacttcatcccggtgtcttgttttctcacgttcaacatcttcgattggctcggacgctcactgaccgcagtcttcatgtggccgggaaaagatagtcggtggctgccaagcctggttctggcaaggctggtcttcgtgcctcttctgctgttgtgcaacatcaagccccgccgttaccttacagtggtgttcgaacatgacgcatggttcatcttctttatggccgcctttgcattcagcaacggttatctggcctctctctgtatgtgcttcggccctaaaaaagtgaaaccagcagaggcggagaccgccggcgccatcatggccttctttctgtgcctgggcctggctctgggagcagtgttttctttcctgtttagggccatcgtctag

SEQ ID NO: 35384 - DNA, 1371 bp, Artificial Sequence
  derived and/or modified sequence
atgaccacctcccatcagccccaagataggtataaagccgtatggctaattttctttatgttaggactggggactcttctgccttggaactttttcatgacggccacccagtattttacaaatcggttagacatgtcccagaatgtgtctctcgtgaccgctgagcttagtaaggatgcccaggcctccgctgctcccgctgctccactgccagagcgaaattcactgagtgccatttttaataacgtcatgaccctatgtgcaatgttacccctgttactgtttacctaccttaactcttttctgcatcaacgaattcctcagtccgtcaggattttggggagtttagtagcgattttgttagtcttcctgataacagcgatactcgtgaaggtgcagctggatgctttgccttttttcgttataacgatgattaaaattgtcttaatcaacagtttcggcgcaattttacaggggtcccttttcggacttgcgggccttctgccagcttcctacacagcacccattatgtccggacaaggccttgccgggtttttcgcctctgtggccatgatctgtgcgatagctagcggtagtgaattgagcgaatctgccttcgggtactttatcactgcctgcgctgtgatcattttgacgattatctgttatctgggacttccccggctagaattttatcgttattaccagcagctgaaattggagggaccaggcgaacaggagactaaactggatctgattagtaagggagaggagccacgcgctgggaaagaggagtctggagtgagtgtgagtaacagccagccaactaatgaaagtcatagtatcaaggccatactcaagaatattagcgtcttagcttttagcgtgtgtttcattttcaccatcacaatcggtatgtttcccgcagtaactgtagaggtcaagtcatctattgccggatcctccacttgggagcggtactttatccctgtaagctgtttcctcacatttaatatcttcgattggttggggagatccttgactgcggtgtttatgtggcctggtaaagactctcgctggctcccatctctagttctggcacgtctggtgttcgtccccttattactcctgtgtaacatcaaacccagacgctacctgacagtggtgtttgagcatgatgcctggttcattttttttatggccgctttcgcctttagcaatggatacctggcaagcttgtgtatgtgctttgggcctaagaaagttaagcccgccgaggccgagactgcaggggccattatggcatttttcttgtgcttgggactggcgcttggtgccgtctttagttttctcttcagagccatcgtgtag

SEQ ID NO: 35385 - DNA, 1371 bp, Artificial Sequence
  derived and/or modified sequence
atgactacgtctcatcagccacaggatagatataaggccgtgtggctaattttttttatgctcggtttggggacactgttaccatggaattttttcatgaccgccacacaatattttaccaatcgtttggatatgagtcagaatgtttccctcgtgaccgccgagctttccaaagatgctcaggccagtgccgctcctgctgcccctttacctgaacgtaactcactgagcgcaatcttcaacaatgtgatgactctatgcgcaatgctgcccctgcttctctttacttatttaaatagctttttacaccaacggatccctcagagcgtacgcatcctaggttcactggtcgccatcctgcttgtattccttatcaccgctatcctggtgaaggtgcagctggatgcattaccatttttcgtgatcactatgatcaaaattgtcctgatcaattcatttggcgccattctgcaagggtcgctattcggcctggccggcctcctccctgcttcctacaccgcccctatcatgagtggacaggggctggccggcttttttgctagtgttgccatgatttgcgctatcgcctcaggatctgagcttagcgaatccgcatttggatacttcattactgcgtgtgctgtaataattctgactatcatttgttatctcggcctacccaggttggaattttaccgatattaccagcaactcaagcttgagggtcctggtgaacaggagactaagttagatctgatcagtaaaggggaagagcctcgcgcggggaaggaggagagtggggtgagcgtcagtaactcacagccaaccaatgaatcacactctattaaggccatactgaagaatatcagcgtgctagcattcagcgtgtgctttatttttacaattacgattgggatgttccccgccgtgacggtggaagtaaaatcatctatcgccggctccagcacctgggaacggtactttatcccggtgtcttgtttcctaacattcaatatcttcgattggctcggacggagcctcaccgcagtgttcatgtggcccggcaaggactctcgatggctgccgagcctcgtgcttgccaggctggtgttcgttcccctgcttctgctgtgcaacattaagccgcgccggtatttgactgttgtctttgagcacgatgcatggttcattttcttcatggcagcctttgcattcagtaatgggtacctcgctagcctttgtatgtgctttggcccaaagaaagtcaagcctgccgaggctgaaaccgcaggtgcaattatggcatttttcctctgtctgggcttagctctgggtgctgttttctccttcttgttccgcgctatcgtctag

SEQ ID NO: 35386 - DNA, 1371 bp, Artificial Sequence
  derived and/or modified sequence
atgactacaagccaccagccccaggacagatataaggccgtatggctgattttttttatgctggggctagggacactgctcccttggaatttcttcatgacagcaacccagtactttaccaaccgcctggacatgtcccagaacgtatcactggtaaccgcagaactttcaaaggatgcccaggcttctgccgcacctgccgcccccctgcccgagcggaattcactgtccgcaatcttcaataacgtgatgacactctgtgctatgctgcctctcctgctctttacctatctcaattcatttctgcatcaacgcattccccagtccgttcgaatcttaggcagcctcgtggctatcctcctggtcttcctcataacggctatcctcgtgaaggtgcagctggacgccctgccgttttttgtcattaccatgatcaaaattgtcctgatcaatagctttggagctatccttcagggctccctctttgggcttgctgggttgcttccagcaagctacaccgcgccaatcatgagcgggcaggggcttgccggattttttgctagcgtggcaatgatttgcgccattgcctcaggaagcgagttaagcgagtccgcttttggctattttattactgcttgcgccgtgattattctcacaatcatttgttatctggggctgccaaggctggagttttacaggtattatcaacagctgaagttggagggacccggcgagcaagaaaccaagctggacctgatctctaaaggggaggagccacgagcaggcaaggaagagagcggggtttctgtgtctaactctcaaccgaccaacgagtcgcattccattaaagccatactcaagaatatctccgtgcttgctttttcagtgtgctttatttttaccataactattgggatgtttccagctgtcaccgtcgaggtaaaaagttccattgctgggagctccacatgggagaggtacttcatacccgtatcttgtttcttaacctttaatattttcgactggctgggacgctcactgacagcagtctttatgtggcccgggaaggattcccgctggctcccttctcttgttctcgctcggttggtcttcgtacctttactattgctgtgcaatataaagcctaggaggtatcttacagtggtgtttgagcacgatgcctggtttatttttttcatggctgctttcgccttctcgaatggttatcttgcttccctgtgcatgtgctttggcccaaaaaaagtcaagccagctgaggcggaaacggctggcgctattatggcttttttcctatgtctgggtctggccttgggtgccgtgttttccttcctatttagggccatagtgtag

SEQ ID NO: 35387 - DNA, 1371 bp, Artificial Sequence
  derived and/or modified sequence
atgaccactagccaccagccccaggatcgctacaaggcggtctggctgatcttttttatgctgggactcggcactctgctgccgtggaatttctttatgacagccacacagtactttacaaacagacttgatatgagtcagaatgtgtcactggtcactgccgagctgtctaaagatgcccaggccagcgccgccccagccgctcccctccccgagcgcaatagcctcagtgccatctttaataacgtcatgacactgtgcgcgatgttgcctctcctgctgttcacctatctcaatagtttcctccaccaaagaatcccccaaagcgtccgtatcctcgggtcactcgtggctatcttgttggtgttcctcatcactgcaatcctagtgaaggtgcagctggatgccctccctttctttgtgattaccatgataaaaatcgtgctaattaactcgttcggagctattctgcagggctccttgttcggcctagctgggctgttgcccgcttcctacacagctcctattatgtctggacagggattggccggtttttttgccagtgttgccatgatttgtgcaattgcctccggttccgagctgtctgagtctgctttcggctactttataacagcatgtgcggtgatcatcctaacgatcatctgttatcttggactgcccagacttgagttttacaggtactaccagcagcttaagctggaagggcccggtgagcaagaaaccaaactggaccttatcagcaagggagaagagccccgagctggcaaggaggaatccggcgtatcggtgtccaatagtcaaccgaccaacgaatcacactccattaaagcgatactgaagaacattagcgtcctagccttctctgtgtgcttcattttcactatcacaataggaatgttccctgcagtgaccgtagaggtgaagagcagtattgccggtagttctacatgggaaagatactttattccagtaagctgctttctgactttcaacatcttcgattggctgggccgctccctcactgcagtattcatgtggcctggcaaggattctcggtggctaccatctctggtattggcgaggctcgtgtttgtccccctgcttttactctgcaatatcaagccacgcagatatctaactgtggtgttcgaacacgacgcctggttcattttttttatggctgccttcgccttctcaaacggatacttagccagcctttgtatgtgttttggaccgaagaaggtgaagccggctgaggccgaaacagctggagccatcatggccttttttctgtgtctggggctggccctaggtgcagttttcagtttccttttcagggcaatcgtctag

SEQ ID NO: 35388 - DNA, 1371 bp, Artificial Sequence
  derived and/or modified sequence
atgaccacgtcacaccaaccccaagatcgctataaggccgtttggctgatcttctttatgctcgggcttgggacactcctgccttggaactttttcatgaccgcgactcagtatttcactaatcgactggatatgtcgcaaaatgtgtctttagtgactgccgaattgtctaaggatgctcaggcttccgcggccccggccgctcccctgccagaaaggaatagccttagcgcaatctttaataacgtcatgaccttgtgcgcaatgctgccactcctcctgttcacctatctgaactctttcttacaccagcgcattcctcagtcagttcgcatactaggaagtctagtggccattctccttgtgtttctcatcaccgcaatcttagtcaaggttcaactggatgccctgcccttctttgtgatcaccatgatcaagatagtcctgataaacagctttggagccattcttcagggtagtctcttcgggctcgcaggcctccttccagcctcttataccgctcctatcatgtccggccaggggcttgccggtttttttgcctcagtggcaatgatctgtgccatcgcctcaggcagcgagctatcagagtccgcattcggctattttataacagcatgtgccgtcatcattttaacgatcatctgctatctgggcctcccacggctggagttctatagatactaccagcagctgaaactggaggggcccggggagcaggagactaagctggaccttatttctaaaggcgaagaaccccgggccggcaaggaagaatctggggtgtcagtatcaaatagccagccgacgaatgaaagtcacagcatcaaagccattctcaaaaatatcagtgtgctggccttcagcgtgtgttttatcttcaccattacgattggaatgtttccagccgtcacagtggaggttaaatccagcattgccggaagctccacttgggagcgctattttataccagtgagctgtttcctgacgttcaatatatttgattggctcggacgctctctcaccgccgtattcatgtggcccggcaaggatagtagatggctacccagcctggtgcttgctcgtctggtgttcgtacctcttctacttctgtgtaatatcaagccaaggcggtaccttacagtcgtatttgaacacgatgcctggttcattttctttatggctgcttttgcctttagcaatgggtacctagccagcctctgtatgtgttttggaccaaagaaagttaaaccagcagaggctgagaccgcaggggctatcatggcctttttcctgtgtctaggactcgcgctgggggccgttttctcctttctctttcgcgccatcgtgtag

SEQ ID NO: 35389 - DNA, 1371 bp, Artificial Sequence
  derived and/or modified sequence
atgacaacctctcaccaaccccaggatcggtataaagccgtgtggctaatcttttttatgctagggctagggactctcctgccttggaactttttcatgaccgcaacccagtactttaccaatcgcctggatatgtcgcaaaacgtttcgctggttacagccgagttgagcaaagacgcgcaggcctctgccgccccagcggcacccctcccagagagaaactccctctccgcgatcttcaacaacgtgatgacactgtgcgctatgttacctctcctgctttttacctatttaaattctttcctgcatcaacgtattccacagtcggtgcggatactaggtagtcttgtggcaatcctcctcgtcttcctgattaccgccatactggtcaaagtgcaactggacgcactgccattttttgtgatcacaatgataaagatcgtgctaattaattcatttggcgccatattgcaggggtcactcttcgggctcgccgggctccttcctgccagttacacagctccgattatgtcaggccaagggctggctgggttctttgccagcgtcgccatgatttgtgccattgctagcgggtcagagctctcagaatcagcctttgggtattttatcaccgcttgcgcggtgatcatcttgactatcatctgttatctgggtctgccccgcctcgaattctaccgctattaccagcaattgaagctggaggggcccggggaacaggagacaaaactcgatctgattagcaagggggaagaacccagagccggaaaggaggagtcaggtgtgtccgttagcaatagtcagccaacaaacgaatcacacagcatcaaggccattctgaagaatatttccgtgctagcatttagtgtctgctttattttcaccatcacaattggtatgtttcccgccgtaaccgtcgaggttaaatctagcatcgctggctcctctacatgggagagatactttatccccgtcagttgcttcctgactttcaacatctttgactggttgggccgcagcttaacagccgtgtttatgtggcccggcaaagattccaggtggctgccttccctggtgttggcacgcttggtgttcgtgcctctgctgctgctgtgcaatatcaaacctcgtcgctatctcacagtagtgtttgagcacgatgcctggttcatcttctttatggccgctttcgcctttagcaacggttacctagcctccctttgtatgtgttttggcccgaaaaaggtgaaacctgctgaggccgagactgctggagcaatcatggccttttttctgtgtctggggttagccctcggggctgttttctcatttcttttccgggccatcgtatag

SEQ ID NO: 35390 - DNA, 1371 bp, Artificial Sequence
  derived and/or modified sequence
atgaccacctcacatcaacctcaggaccggtataaggccgtatggctaatcttttttatgctgggcctcgggaccctgctcccatggaacttcttcatgaccgcaacacagtattttacaaacaggctcgatatgtctcaaaatgttagtctggtgacagctgaacttagcaaagacgctcaggcttcggcagccccagcggcccccctcccggaacgcaattcactatcagctatttttaacaatgtaatgacactctgtgcgatgctgccactgctgttattcacgtatcttaactcctttctgcatcaacgtatcccgcagtcggttcgcatcctgggcagcctcgtggccatcctgcttgtgttcctgattacagcaatcctagttaaagtgcagctcgatgctctgccattttttgttatcaccatgatcaaaatagtgctgattaattccttcggggctattcttcaaggctccctttttggcctcgccggactattgcccgcatcctatactgcccccatcatgagcggccaggggctggccggtttcttcgcttctgtcgcaatgatttgtgccatagcttctgggtctgaactatcggagagcgcttttggatactttattactgcgtgcgccgtgattatactaaccattatttgttatctggggctgccgcggttggaattttaccgatactatcagcagttgaagctcgaaggacctggcgaacaggaaactaagttagacctgatcagcaagggcgaggagccccgggccggaaaggaggagtcaggggtgtcagtaagtaattctcaaccaactaacgagtcacactccattaaggcaattcttaagaatatcagtgtgcttgccttcagcgtatgttttatttttaccatcactatcggcatgttcccagctgtaaccgtggaggttaagagctctatagcgggatccagcacctgggagaggtatttcattcctgtcagctgcttcctgacctttaacatattcgactggctgggccgtagccttactgcagtgtttatgtggcccggaaaggattctaggtggcttccgagcctggtgcttgctaggctagtcttcgtcccgttgctgttgctgtgcaacatcaagcctagacgctatctgactgtagtcttcgaacatgacgcatggtttatcttctttatggcggccttcgccttcagcaacggctatctggcttctctttgcatgtgctttggtcccaaaaaggtgaaacccgctgaagcagagactgcaggagctattatggctttcttcctatgcctgggcctggcccttggcgccgtatttagctttcttttccgcgcaatcgtctag

SEQ ID NO: 35391 - DNA, 510 bp, Artificial Sequence
  derived and/or modified sequence
atgcggcgcgaacgtacacggggtccacaggcatgggagttccccagccctaccaaaagtggatgctcactccagagccttagtcgctacaaggccgtatggcttatttttttcatgctggggttgggtacccttctgccctggaacttctttatgactgctacacagtattttacaaatcggctcgacatgagccaaaacgtcagtcttgtgacagcagagttgtctaaggatgcccaggcttcagctgctccagcggcccctctccccgagcgaaacagcttaagcgccatctttaacaatgtgatgaccctgtgcgcaatgctaccactgttgctctttacttacctaaatagctttttacatcagagaatcccccaatctgttaggatcctgggctccctggtggccatattgcttgtgtttctgataaccgccattttggtgaaggtgcagttagacgccctgccattcttcgtgatcaccatgatcaagatcgtcctgatttag

SEQ ID NO: 35392 - DNA, 1371 bp, Artificial Sequence
  derived and/or modified sequence
atgaccaccagccaccagccccaggaccgctacaaggctgtgtggctgatcttcttcatgctgggcctgggcaccctgctgccctggaacttcttcatgacagccacccagtacttcaccaaccggctggacatgagccagaatgtgtccctggtgacagctgagctgagcaaggatgcccaggccagcgctgccccagctgcccccctgcctgagaggaacagcctgagcgccatcttcaacaacgtgatgaccctgtgtgccatgctgcccctgctgctcttcacctacctgaacagcttcctgcaccagaggatcccccagagcgtgcgcatcctgggcagcctggtggccatcctgctggtgttcctgatcacagccatcctggtgaaggtgcagctggatgccctgcccttcttcgtcatcaccatgatcaagatcgtgctgatcaacagctttggagccatcctgcagggcagcctgtttggcctggccggcctgctgcctgccagctacacagcccccatcatgagcggccagggcctggccggcttctttgcctctgtggccatgatctgtgccatcgccagcggcagcgagctgtctgagagcgccttcggctacttcatcacagcctgtgccgtcatcatcctgaccatcatctgctacctgggcctgccccggctggagttctaccgctactaccagcagctgaagctggagggccctggagagcaggagaccaagctggacctgatcagcaaaggagaggagcccagggctgggaaggaggagagcggcgtgtctgtgagcaacagccagcccaccaatgaaagccacagcatcaaggccatcctgaagaacatctctgtgctggccttctctgtgtgcttcatcttcaccatcaccatcggcatgtttcctgctgtgacagtggaggtgaagagcagcattgctggcagcagcacctgggagcgctacttcatccctgtgtcctgcttcctgaccttcaacatctttgactggctgggccgcagcctgacagctgtgttcatgtggccaggcaaggacagccgctggctgcccagcctggtgctggcccggctggtgtttgtgcccctgctgctgctgtgcaacatcaagccccggcgctacctgactgtggtgtttgaacatgatgcctggttcatcttcttcatggccgcctttgccttcagcaatggctacctggccagcctgtgcatgtgcttcggccccaagaaggtgaagccagctgaggccgagacagctggggccatcatggccttcttcctgtgcctgggcctggccctgggcgctgtgttctccttcctgttccgggccatcgtgtag

SEQ ID NO: 35393 - DNA, 510 bp, Artificial Sequence
  derived and/or modified sequence
atgaggcgggagaggacccggggcccccaggcctgggagttccccagccccaccaagagcggctgcagcctgcagagcctgagccgctacaaggctgtgtggctgatcttcttcatgctgggcctgggcaccctgctgccctggaacttcttcatgacagccacccagtacttcaccaaccggctggacatgagccagaatgtgtccctggtgacagctgagctgagcaaggatgcccaggccagcgctgccccagctgcccccctgcctgagaggaacagcctgagcgccatcttcaacaacgtgatgaccctgtgtgccatgctgcccctgctgctcttcacctacctgaacagcttcctgcaccagaggatcccccagagcgtgcgcatcctgggcagcctggtggccatcctgctggtgttcctgatcacagccatcctggtgaaggtgcagctggatgccctgcccttctttgtgatcaccatgatcaagatcgtgctgatctag

SEQ ID NO: 35394 - DNA, 1371 bp, Artificial Sequence
  derived and/or modified sequence
atgaccaccagccaccagccccaggaccggtacaaggccgtgtggctcatcttcttcatgctcggtctagggacactcttaccctggaacttctttatgaccgccacacaatactttacaaataggcttgacatgagtcagaacgtgtccctagtgactgctgaactctcgaaagatgcacaggccagcgctgctcccgctgcccctctaccagaacgtaactcattgagcgccattttcaataacgttatgaccctgtgcgctatgcttccgctgctgctgtttacatatcttaatagcttcctccaccaacggattccccaatctgttagaatcctgggctccctagtggccatattacttgtgtttctcattacggctattttagtgaaggtccagctcgacgctttgcctttcttcgttatcactatgattaaaatagtgctgattaattcctttggggccattctgcaagggagtctgttcgggttagcagggttgctccccgcgagctataccgctcccattatgagcggacaagggttggctggttttttcgccagcgtcgccatgatatgcgcaatcgcatcaggctcggaactcagcgagagcgcatttggatattttattaccgcatgtgccgtaataattctcactatcatttgctatttagggctcccccgcctcgaattttaccgttattaccagcagctaaagttggaagggcctggggagcaagagactaagctcgacttgatcagcaagggagaggagcccagggcagggaaagaagagagcggcgtatccgtctcaaacagccagccaacgaacgagtcacattctattaaggccattctgaagaacatctctgtcctggctttctcagtctgtttcatctttacaattacgataggcatgttcccagctgtaaccgtggaggtaaagagttctatcgccgggagctctacctgggagaggtatttcatacctgtgtcttgcttcttaacatttaatatcttcgactggcttgggaggtctttaactgctgtgttcatgtggccaggcaaagacagcagatggctgccatcactcgttctggctcggctggtgttcgtcccccttttactcttgtgtaacatcaagccaagaaggtatctgactgtggtctttgaacacgacgcctggtttatttttttcatggccgcatttgccttctccaacggctatctcgcttcgctatgcatgtgtttcggccccaagaaagtcaagccagcagaagcagagacagctggtgcaattatggcattcttcctctgtttgggactagcactgggtgctgtctttagtttcttgttcagagcaattgtctag

SEQ ID NO: 35395 - DNA, 1371 bp, Artificial Sequence
  derived and/or modified sequence
atgaccaccagccaccagccccaggaccggtacaaggccgtgtggctgatttttttcatgctcggactggggacgctgttgccttggaactttttcatgaccgccacacagtacttcacaaatagattggacatgagccagaacgtgtccctggtgaccgctgaactgtcaaaggatgcacaagccagcgccgctcctgcggccccgttacctgagcggaattccctcagtgccatttttaataatgttatgaccctttgcgctatgttgcctctgcttttatttacctacctgaacagctttctgcatcagcgcattcctcagtctgtgaggatccttggatcgctggtcgccattctcctcgtatttcttatcaccgcgatcctggttaaggtccagctggacgcattgcctttctttgtgattacaatgattaaaatagtactgattaacagcttcggagccattttgcagggatctcttttcgggctggccggcctgctgcctgcgagctatactgctccaataatgagcgggcaaggcttggccggattctttgccagcgtcgctatgatctgcgccattgcctccggatctgaactgagcgagtctgcttttggctacttcatcactgcatgtgccgtaatcattctgactataatttgttacctcgggctgcctcggttggagttctaccgttactatcagcagttgaagctggaaggacccggcgagcaggagactaagctggatctcatttcaaagggggaagagccacgcgctggcaaagaggagtccggggtgtccgtgtcgaactcccaaccaaccaacgaatcccacagcatcaaggccatcttgaagaacatcagtgttctcgcattttccgtctgctttatttttacaataacaattggaatgttccccgccgtaacagtcgaggtgaagtcatctatcgctgggtcttccacatgggagcggtattttatccccgtctcttgttttctgacttttaatatttttgactggctgggcaggtcgctgaccgcggttttcatgtggcccggcaaggacagtcgatggttgcccagtctagtcctggcacgactggttttcgtgccacttctcctgttgtgcaacataaagccccgccgctacctgacggtagtgttcgagcacgatgcgtggttcatcttcttcatggccgcctttgcattctccaacggctaccttgcctccctttgcatgtgcttcggtcccaagaaggtcaagccagccgaggcggagacagcaggagccattatggcattttttctgtgccttggccttgctttgggcgcggtcttttcgtttctgtttcgggccattgtctag

SEQ ID NO: 35396 - DNA, 1371 bp, Artificial Sequence
  derived and/or modified sequence
atgaccaccagccaccagccccaggaccggtacaaggccgtgtggctgatcttttttatgctgggtttgggtacactgctgccttggaatttttttatgacagctacacagtacttcaccaacaggcttgacatgagccagaacgtgtccctggtaacagccgagctttccaaggatgcacaggcgagtgccgctccagcggccccattacctgagaggaactccctgagcgcgatcttcaacaacgtcatgactctttgcgccatgcttccattgttgctctttacatatttgaactcattcttacatcaaaggattcctcagtccgtccgcatcctgggtagccttgtggcaattctgttggtgtttctgattaccgctatattggtgaaagtgcagctagatgcccttcctttcttcgtgattaccatgatcaagatcgtgctgatcaactcttttggcgcaattcttcagggcagcctgttcggccttgccggcctgctgcctgcaagctatactgcccccataatgtcaggccaaggcctggccgggtttttcgccagtgtcgccatgatttgtgctatcgcttctggtagtgagctttcggagagtgcatttggttatttcattaccgcttgtgcagtgatcatcctaacaatcatatgctacctcggcctgccaaggctcgagttctatagatactaccaacagctcaaactggagggccctggagaacaggagactaaactcgacctgattagtaagggggaagaacctcgggcgggaaaggaagagtccggagtcagcgtgtccaattcccagcccaccaacgaaagtcactcaatcaaggcaatccttaaaaacatcagcgtcctggcgttctctgtgtgctttatcttcaccattactattggtatgtttccagccgtgacggtggaggtaaagtcctcaatcgccggctctagtacctgggagcgctattttatcccagtgtcatgcttccttacattcaatatcttcgactggctaggccggtcacttaccgctgttttcatgtggcctggcaaagactctcgctggctccccagtctggttttggccagattggtatttgtgcccttgctactcctgtgtaatataaaaccccgccggtacctcacggtcgtgtttgagcacgacgcctggttcatattcttcatggctgctttcgcctttagcaacgggtacctcgcaagtctgtgtatgtgtttcgggcccaagaaggtcaagcccgcagaagccgagacagccggtgccatcatggctttcttcctatgcctcggactagccctgggggccgtcttctcgtttctgtttcgtgctatagtgtag

SEQ ID NO: 35397 - DNA, 1371 bp, Artificial Sequence
  derived and/or modified sequence
atgaccaccagccaccagccccaggaccggtacaaggccgtgtggcttatctttttcatgctagggcttggtaccctccttccctggaatttttttatgaccgcaacgcagtatttcaccaatagacttgacatgtcacaaaatgtttcattggtgactgcggagctgagcaaggacgctcaagcatccgcagctccagcagcaccgctacccgaacggaattcactgtctgcgatcttcaataacgtgatgaccctgtgcgccatgcttccgctgctcctgtttacctacttaaactcctttcttcatcaaagaatcccccagagcgtgaggattttgggcagtctagtcgctattctcttggtgttcctcatcacagccatcctcgtcaaggtgcagctggacgccctaccttttttcgtcatcactatgataaagatcgtgttaataaactctttcggcgctattctgcagggaagtctcttcggcttggccggcctgctaccagcgtcatacactgcgcctataatgtctggacaggggctggcgggtttttttgctagtgtagccatgatttgtgcaatagctagtgggtcggagttatctgaatcagctttcggttactttatcactgcttgtgctgtcatcattcttacaattatctgctatctcggtttgcctcggctagaattctaccggtattatcagcagttgaaactggaggggcctggagagcaggaaacaaaactggacctgatttccaagggagaagaaccccgtgctggaaaggaggagtctggagttagcgtgtccaatagtcaacctaccaacgagtctcacagcatcaaggccatcttgaagaacatttcggtgctggcattctccgtctgtttcatcttcactatcacaatcggaatgttccccgcagtcaccgttgaagtgaaaagctcaattgccgggagtagcacatgggagcgctattttatccccgtgtcctgtttcctgacatttaatatattcgactggctagggaggtcactgaccgctgtgtttatgtggcccggaaaggattccaggtggctgcctagtctggtgctggctcgcttggtttttgtgccacttttattgctgtgtaatattaaacctcgccggtatctgactgtggtttttgaacacgacgcatggttcattttttttatggccgcatttgccttcagtaatggatatctggcttccctgtgcatgtgcttcggacctaagaaggtcaagccagccgaggctgagactgcgggagccattatggccttttttctctgtttgggtctggctttgggggcggtcttctcatttttgttccgtgccattgtctag

SEQ ID NO: 35398 - DNA, 1371 bp, Artificial Sequence
  derived and/or modified sequence
atgaccaccagccaccagccccaggaccggtacaaggccgtgtggctcatattcttcatgcttggtctggggacactccttccttggaacttctttatgacggcaacccaatacttcaccaatagattagatatgagccaaaatgtcagtctcgttacggccgaattgagcaaggatgcacaagcgtccgcggcaccagccgcccctctcccagagaggaacagcttaagcgcaatctttaataacgttatgaccctctgcgccatgcttccacttctattatttacttacctcaatagctttctgcatcagaggatcccacaatccgtgcgtatccttggctcactagtggcaatcctcctggtgtttctgattaccgcaattctggttaaggtccagctggacgcactacccttctttgtgatcacgatgattaaaatcgttctgattaacagtttcggtgctattctgcaaggttccctgtttgggcttgccggactgctgcccgcctcctataccgcccctattatgtcaggacaggggttggccgggttctttgcttccgtagccatgatctgtgcaatcgccagcgggtccgagttatcagagagcgcttttgggtatttcatcactgcatgtgccgtgattattctcaccattatttgctatctgggacttcccagactagaattctatcggtactatcagcagttgaaactcgagggacccggcgagcaggagactaaactggatttgatcagtaagggagaggagccacgagccggaaaggaagaaagtggagtaagcgttagtaactcgcagcctacaaatgagagtcactctattaaggcgatcttgaagaatatcagcgtgctggcattctccgtttgcttcatcttcacaatcaccattgggatgttcccagcagtcacagtggaggtcaaaagctcaatcgcgggctccagcacatgggagcggtatttcatccctgtgagttgcttcctgacgttcaatattttcgactggctgggacgctctctgactgccgttttcatgtggcctgggaaggactctcgatggctgcctagcctggtactagcacggttggtgtttgtgcccctgttgttgctctgcaacatcaaacctcgtaggtacttaactgtcgtgttcgaacatgatgcctggtttatcttttttatggccgcctttgccttctcaaatggttacctggctagcctgtgtatgtgttttggccctaagaaagtgaaaccggcagaggcggagactgctggggcaatcatggcatttttcctatgcttgggactggctctgggtgctgtcttctcttttctgtttcgagccattgtctag

SEQ ID NO: 35399 - DNA, 1371 bp, Artificial Sequence
  derived and/or modified sequence
atgaccaccagccaccagccccaggaccggtacaaggccgtgtggctgatcttttttatgcttggcttgggcactttgcttccttggaacttctttatgacggccacacagtacttcactaatcgacttgatatgtcacagaatgtctcgctggtaaccgcagaactcagcaaagatgcacaagcgtccgcagccccagccgcaccactccctgagcgcaactctctgtccgcaatattcaacaatgtgatgacactgtgcgctatgctgcccctgctgctgtttacatatctgaactctttcctccaccaacgcataccccagagcgtgagaattctggggagcctcgttgctattctgcttgtatttctgatcacagccatcctggtaaaagtgcagctggacgctttaccattcttcgtgattacaatgatcaagattgtcttgataaatagtttcggcgctattcttcaaggatccctgttcggcctggccgggctgcttccagcctcatacactgcgccaatcatgtccggtcaggggttggcaggcttcttcgcatccgtggccatgatttgcgccatcgcatccggaagcgaactttccgaatccgccttcggatattttatcacggcctgtgccgtgataatactcacaattatctgttacctgggtcttcctaggcttgagttttaccgctactatcagcagctgaagttggagggaccaggtgagcaggagaccaagctggatctgatcagcaaaggggaggagcctagagccgggaaggaagagtctggggtgagtgtaagtaacagccagccaacgaatgagtcgcattcaattaaagccatcttgaaaaacatttccgttctggctttttcggtgtgcttcatttttactatcacaattgggatgttccccgccgtgacagtggaagtcaaatcctccatagccggcagttccacctgggaaagatactttatacccgtgtcatgctttctgacatttaacatattcgattggcttgggaggtcgctgacagctgtgtttatgtggcccgggaaagattctagatggctgccttcccttgtcctggcccggctcgtgttcgttccactcctgctgttgtgtaacattaagccccgacggtatctcacagtggtcttcgaacatgatgcatggtttatcttctttatggcggcttttgccttttctaatggatacctcgcctccctttgcatgtgctttggcccgaaaaaggtcaagcccgccgaggctgagacagccggggccataatggccttttttctttgtctgggacttgccctgggcgccgtgttttcctttctgttccgtgccatcgtttag

SEQ ID NO: 35400 - DNA, 1371 bp, Artificial Sequence
  derived and/or modified sequence
atgaccaccagccaccagccccaggaccggtacaaggccgtgtggctcatcttcttcatgcttgggcttggaactctgctcccatggaatttcttcatgacagccacgcagtatttcacaaacagactcgatatgtcccagaatgtgtccctggttaccgccgaactgtctaaggacgcgcaggcttcagcggctccagccgctccgctacctgagaggaatagcctgagcgctatatttaacaacgtgatgacactgtgtgctatgctgccgttgctgctgttcacatatctcaactcattcctgcaccaacgcatcccacagtcagtgcggatcctgggttcactggtcgcaattttgctcgtttttctgatcacagccatccttgtgaaggtgcagcttgatgctctgcccttctttgtcattacaatgatcaaaatagtactgatcaactcctttggcgccatccttcaaggatccctattcggactggcgggcctgctgcctgcctcctatacagctccaattatgtcaggccagggtctggctggtttttttgcctccgtggccatgatatgtgcaatcgcatcaggatcggagctcagtgaatctgcattcggctacttcatcaccgcatgcgctgttataatcctgactatcatttgttacctcggcctgcctagactggagttttatagatattaccaacagctcaaacttgaaggtcctggggagcaggagacaaagttggatctgatctcgaaaggcgaggagccccgcgccgggaaagaagagtccggcgtgagcgtatctaacagtcaacccacgaacgagtcccatagtatcaaggcgatactaaaaaatatttccgtgctagcattcagcgtatgctttatctttaccatcaccatcggcatgttcccggccgtaacagtggaggtcaagagctccattgccggatcctctacctgggaaagatactttattccagttagctgttttctaacttttaacatattcgactggcttggccggagcctaaccgcagtgtttatgtggcctggaaaagattcccgctggttaccttccctcgtgctcgctcggttagtgtttgtgcctctcctgctgctttgcaacattaagccacgccggtatcttactgttgttttcgaacatgacgcttggttcatcttctttatggcagcgtttgccttcagcaacggctatttggcctccctgtgcatgtgctttggccctaaaaaagtgaaacccgctgaggctgagaccgctggcgcaattatggctttctttctctgtctgggcttggcactgggtgctgtcttcagcttcctttttagagccatcgtctag

SEQ ID NO: 35401 - DNA, 1371 bp, Artificial Sequence
  derived and/or modified sequence
atgaccaccagccaccagccccaggaccggtacaaggccgtgtggttgatctttttcatgctgggactgggaaccctgctgccttggaatttctttatgactgctacccagtattttacgaaccgccttgacatgtcacagaacgttagtctggtcaccgcggagctgagcaaggacgcccaggcttccgccgctccagccgccccactaccagagaggaattcactaagtgcaatctttaataatgtgatgacactttgcgcgatgctcccactgctcttatttacctatctcaactcgtttttgcaccaacggatcccccaatcagtccgcattctcggcagcctcgtcgccattctgctagtcttccttatcactgcaatcctggtcaaggtacaattggatgccttgccattctttgttatcacaatgataaaaatcgtgctcatcaatagttttggtgctattcttcagggaagcctatttggcttggcaggcctcctccctgcctcctacactgcccccataatgtccggccagggccttgccggcttttttgcctcggtggccatgatctgcgccattgcaagcggctctgagctgtccgaaagtgcatttggttatttcatcactgcctgtgctgtaattatattaactatcatctgctacctgggactgccgaggctagagttttataggtactatcagcagctgaagctcgaggggcctggggagcaggagaccaagctggacttgataagcaagggcgaagaaccgcgcgcgggcaaggaggagtccggcgtgtctgtttccaacagccagcccacaaatgagagtcattccatcaaggcaattcttaagaacatctcagttctggcattctcagtctgttttatatttacgatcactattggaatgttccctgcagtcacggtggaagtaaagagctctatcgcagggagctctacatgggaacgctatttcattcccgtctcctgctttctgactttcaatatcttcgattggcttggaagatcgctgacagccgtttttatgtggcccggcaaggatagtcggtggctaccttcgctcgtgctggcccgtttagtattcgtgcccttgttgcttctctgtaacattaagcccaggaggtatctgaccgtcgtgtttgaacatgacgcttggttcatctttttcatggcagcattcgccttttctaatggatatttagctagcctttgtatgtgttttggtcctaaaaaggtgaaaccggcagaggccgagacagccggggcaataatggctttctttttgtgcttgggcctggcactgggagcagtattctctttcctcttccgggctattgtttag

SEQ ID NO: 35402 - DNA, 1371 bp, Artificial Sequence
  derived and/or modified sequence
atgaccaccagccaccagccccaggaccggtacaaggccgtgtggcttatttttttcatgttaggtcttggcaccttgctcccgtggaacttcttcatgactgcaacccaatacttcaccaaccgtctagacatgtctcagaacgtcagccttgtgaccgcagagttaagcaaggatgctcaagccagtgccgctcccgccgcccctctgcccgagcggaattccttatcagccattttcaataatgtcatgaccctatgcgcgatgctcccactgctgctgtttacatacctgaactcctttcttcaccagaggattccacaatcagtgcggatcctgggctctctcgtggcaatcctgttggtgtttcttatcacagccatcctggtaaaggtccagctggacgcattgccatttttcgtgatcactatgatcaagatcgtccttattaattctttcggtgccatccttcagggtagtctgttcgggttagctggcctgctccccgcgtcgtacactgcccctataatgtccgggcaaggactggcaggtttcttcgcctccgtagctatgatctgcgctattgcaagcggcagcgaactgtccgagtccgcctttggctacttcattaccgcatgtgctgtgatcatcctcacgatcatctgctatctggggttaccacgactggagttctacaggtattaccaacagctgaaactcgaaggccccggcgagcaggaaacaaaactggacttgatctctaagggcgaggaaccacgagcaggcaaagaagaaagcggagtatccgttagcaacagccagccaactaatgaatctcacagcatcaaggcgatcctcaaaaatatctcggtgttagccttctctgtctgttttatcttcacaatcactataggtatgtttccagctgtcactgtggaggtcaaatcctctatcgccggaagtagcacatgggagcggtacttcatccctgtgagctgttttctgacatttaatatcttcgactggctcggccgttcactgacggccgtgttcatgtggcctgggaaggattcgagatggcttccctccttagtgttggcgagacttgttttcgtgcccctcctcctgctatgtaatattaaacctagacgttatcttaccgttgtcttcgaacatgatgcctggttcatcttctttatggctgcctttgccttcagcaatgggtacttggcgtcattatgtatgtgttttggtccaaagaaagtcaaacccgctgaggccgagaccgccggcgcgatcatggccttcttcttgtgcttagggctggccctgggggcagtattcagctttctgttccgggcgattgtgtag

SEQ ID NO: 35403 - DNA, 510 bp, Artificial Sequence
  derived and/or modified sequence
atgcggcgggagcggacccggggcccccaggcctgggagttcccctcaccgaccaaatccggctgctcgcttcagtcactatccaggtacaaagctgtgtggttgatcttctttatgctgggactcggcacgctccttccttggaatttctttatgactgccacacagtattttactaaccgcctcgatatgtctcagaacgtgtcactcgtcacagccgagctgtccaaggacgctcaggcttctgcagctccggccgcacccctgccggagagaaactccctatctgctatttttaacaacgtgatgaccctgtgcgctatgttgcctctactgcttttcacttatttaaactcttttcttcaccagcgtatcccccagtctgtgcggatcctagggtcgcttgtggcaattttgctagtgtttttgattacagcaattctcgtcaaggtgcagctggatgctctgcctttctttgttatcacaatgataaagatcgtgctgatctag

SEQ ID NO: 35404 - DNA, 1371 bp, Artificial Sequence
  derived and/or modified sequence
atgaccacgtctcaccagccccaggacagatataaagctgtgtggcttatcttttttatgcttggcctgggtaccctgttgccttggaatttcttcatgaccgcaacacagtacttcaccaataggctggacatgagccaaaatgtcagcttggtgaccgccgaactgtccaaagacgcacaggcttcagccgctcccgcagccccattgcccgagcgtaactcactgtctgccattttcaacaacgtgatgaccctctgtgccatgctgccccttctgctgttcacttatttaaacagtttcttgcaccaacgtatcccacaatccgttaggatactgggtagcctcgtggcgatcctgctggtgtttcttatcactgccattcttgtgaaagtgcagcttgacgctcttccattctttgtaattaccatgataaagatagtcttgatcaacagcttcggtgctatcctgcaaggatctctgtttgggctggcaggcctgctgcccgcatcatatactgccccaataatgtctggccagggcctcgccggttttttcgcctccgtcgcaatgatctgtgcgattgcctcaggctccgaactgagcgagagcgcctttggttactttatcactgcgtgcgcagtgattatactgaccattatatgctatttaggcctgccacgattagaattctatcggtattaccagcagctaaaactcgaaggcccaggtgaacaggagactaaactggacctgatctccaaaggcgaagagccgagggccggtaaagaggaaagcggagtgtctgttagcaatagccagccaactaacgaatctcatagtataaaggccattctcaagaatatcagcgtcctggcgtttagtgtatgcttcatcttcaccattactataggtatgttccccgcagttaccgtggaagtgaaatcctcaattgccggttccagtacttgggagcggtacttcatcccagtttcatgcttcctgacatttaacatattcgattggctgggccgaagcttgactgcagtgtttatgtggccagggaaagatagccgatggctccccagtctcgtgttagcaaggctcgtgtttgtgccactgctgctgctctgcaatataaagcctcgacgataccttacagtggtgttcgaacatgatgcctggtttatcttttttatggctgcctttgctttttccaacggctatctggcttctttatgcatgtgtttcggcccaaaaaaggtcaagcccgcagaagccgagaccgctggggcaattatggcgttctttctatgtctcggcctggcactcggtgcggtgttctccttcctctttagggccatcgtgtag

SEQ ID NO: 35405 - DNA, 1371 bp, Artificial Sequence
  derived and/or modified sequence
atgacaacaagccaccagcctcaggatcggtataaggctgtgtggcttattttcttcatgcttggacttggaaccctgctgccttggaatttttttatgactgcgacacaatacttcactaatcggctggacatgtcccagaatgtaagtttggtaacagcagagctgtcaaaagacgcgcaggcctcagccgcacccgcagcaccgctccccgagcggaattccctcagcgccatctttaataatgtgatgaccttatgcgctatgctgcctcttttgctgttcacctacctgaatagcttcctgcaccaacgcatcccccagagcgtcagaatcctgggctcattagtcgccattttgttggtcttcctgatcactgccatcctcgtgaaggtacagctggacgcacttccgttctttgtgatcactatgattaagatcgtgcttattaacagtttcggcgcaatcctgcagggaagcttatttggactggcaggactgttgcctgcctcttacaccgctccaattatgtcagggcaaggcttggctggtttcttcgcctccgtggcaatgatttgcgcgatcgccagcggatccgaactatccgaatccgccttcggctacttcatcacggcctgcgctgtaattatcctgacaattatttgttatctcggacttcctaggttagagttctaccgctattatcaacagctaaagcttgagggcccaggagagcaggagaccaagctggatttgatcagtaagggagaggaacctagggctggtaaagaagagtctggtgtgagtgtttccaactctcagcccaccaatgagagtcattcaatcaaggctattttgaaaaatatctcagtgctggccttttcagtctgtttcatcttcactatcactatcgggatgtttcccgcagtcaccgtagaggtcaagagcagcattgctgggagcagtacatgggagcgctactttattcccgtctcatgttttcttaccttcaacatttttgactggcttggtcggtccctgacagctgtattcatgtggccaggaaaggatagtaggtggctgccctctctggtgctggcacggttggtctttgtacctctgttgctgctctgcaatatcaagccccgacgatatcttacagtcgtattcgaacatgacgcttggtttatttttttcatggcagcattcgccttcagcaatggctatctcgcatccctctgtatgtgttttgggcctaagaaggtgaaacctgccgaagccgagactgccggtgcgattatggcattctttttgtgccttggtttggcacttggtgcagtattcagctttctgttccgggcaatagtgtag

SEQ ID NO: 35406 - DNA, 1371 bp, Artificial Sequence
  derived and/or modified sequence
atgacaacctctcatcaacctcaggaccgatataaggcagtctggctgattttcttcatgctggggctcgggactctgctcccttggaacttcttcatgaccgccacccaatactttactaacaggctggatatgtcccagaacgtgtccctggtcacggcagagttaagtaaagatgctcaggcaagcgctgcccctgcagccccactaccagagcgcaacagcctttctgcgattttcaataatgtgatgacactttgcgcgatgctcccgctgctcctgttcacctatctgaactcattcctgcaccagaggatccctcagtcagtaaggatcttgggcagcttagtagcaatcctgctggtatttctcatcaccgctatcttggtcaaggtgcagctggacgccctcccctttttcgtgatcacgatgattaagatagttttaatcaacagcttcggtgcaatacttcagggtagcctcttcggcctggccggtctcctgccagctagctacaccgcacccatcatgtcagggcaaggtctggccggattctttgccagcgtagctatgatctgtgccattgcgtctggatctgaactgtcagagagcgcgttcgggtattttatcacagcttgcgcagtgattattctgacgatcatatgttacttgggactgccacgcctggaattttataggtactatcagcaattaaagctggagggtcccggagaacaggaaactaaactcgatctgattagcaaaggcgaagaaccaagagccggaaaggaggagagcggagtgtctgtatctaattctcaacctaccaacgaaagtcattctatcaaggccatcctcaagaacatttctgtcctcgcctttagcgtgtgttttatcttcaccataactattgggatgtttcccgctgtcaccgttgaggtcaagtcttccatcgccggaagctccacctgggagcgatattttattccggtaagttgctttctcacattcaatatattcgactggttgggccgtagtctgaccgccgtgttcatgtggcccggtaaggacagccggtggctcccttctcttgtactggccagattggtgttcgtgcctctgctgctgctgtgtaatatcaagccacgcagatacctgactgtggtctttgagcacgacgcctggtttatattctttatggccgctttcgctttctcaaacgggtaccttgcatctctctgcatgtgtttcggtcctaagaaagtgaaaccagctgaagctgagacagcgggagctattatggccttctttctatgcctcggactggcactcggggctgtgttcagtttcctttttcgtgccatcgtgtag

SEQ ID NO: 35407 - DNA, 1371 bp, Artificial Sequence
  derived and/or modified sequence
atgacgacatcccaccaaccgcaggaccgctacaaagctgtatggctaatctttttcatgctgggtctggggaccttgcttccatggaatttcttcatgacggcgacccaatacttcacaaatcgtctcgacatgtcacagaacgtttcactcgtcacggctgaacttagtaaagatgcgcaggccagcgccgcacctgctgcacccttgccggagaggaactcattgagtgctatcttcaacaacgtgatgacgctgtgtgccatgttgcccctgctactatttacctatctcaacagtttcctccaccagagaatcccccagtccgtgaggatcttgggaagcctggtggccattttgctcgtgtttctgatcaccgctattctggtgaaagtgcagctggatgcactcccatttttcgtgatcaccatgattaagatcgtgcttattaattctttcggtgcgatcctccaggggtctctgtttggactggctggacttctgccagcctcttacacagcaccaattatgtccggccagggcttagccggttttttcgcctccgtagccatgatctgtgccattgcaagtggctccgaactatcggagtcagcctttggatattttattacggcctgtgccgtcataattctaactatcatctgctaccttggtctccccagactggagttctaccgttattaccagcaactgaagcttgagggccctggtgagcaagagacgaagctggatttgatctccaagggagaagagccccgagccggaaaagaggaatctggggtgtcggtgagcaatagtcagcctacgaacgaaagtcacagtattaaggccatactgaagaacatctctgtcctggcctttagcgtctgtttcatttttaccattacaataggcatgtttcccgctgtgacagtcgaagtgaaaagctcaatcgctgggtcgtccacctgggaacgctatttcatccccgtgagctgtttcctgacctttaacattttcgactggctgggacgatcattaacagccgtcttcatgtggccaggaaaggacagtaggtggctgcccagccttgtgcttgcaagactggtttttgtacccctgctgcttctttgtaatatcaagcctaggaggtatcttacagtcgtttttgagcacgatgcatggttcatctttttcatggccgctttcgccttcagcaatgggtacctcgcctctctgtgcatgtgttttggtcctaaaaaggttaagcccgctgaggctgagacggccggtgctatcatggcgttcttcctgtgtttgggattagcccttggtgccgtctttagctttctgtttagagccatagtttag

SEQ ID NO: 35408 - DNA, 1371 bp, Artificial Sequence
  derived and/or modified sequence
atgaccaccagccaccagcctcaagaccggtacaaagctgtgtggctgatctttttcatgcttggacttggtactctgcttccctggaactttttcatgaccgccacccagtacttcactaataggttagatatgagccagaatgtgagcctggtgacggcggaactgtccaaggacgcacaggcatccgccgcacctgcagcgcctctgcctgagagaaactcactgtccgccatctttaacaacgtgatgaccctctgtgctatgctgcccttactgttgttcacatacctaaactctttcctccaccaacggattccccagagtgtccgcatcctggggtcgttagtggctattctcctggtcttcctgattaccgctatactcgttaaagttcagcttgacgcgctcccatttttcgtcataaccatgatcaagattgtgctgattaattcttttggggctattctccagggtagcttattcggactagccggtctgttgcccgcatcttataccgcacccatcatgtctggacaaggtctcgccggatttttcgctagcgtagccatgatttgtgccatagcatcaggctccgaactcagcgagtcagccttcgggtacttcataactgcctgtgcagtgattatcctgactatcatctgctatctgggcttgcccaggctggagttctatcggtattaccagcagttgaaactcgaagggccaggggagcaggaaaccaaattggaccttatctccaagggtgaagaaccaagggccggaaaggaggaatcgggggtctctgtgtcaaattctcagccaactaatgagtcacattccataaaagcaatactcaaaaatatcagtgtgctcgccttttcagtgtgttttatcttcaccattaccatcggcatgttccccgctgtgactgtcgaggtgaaaagctccatagcaggctcaagtacctgggagcggtattttatccccgtgtcttgtttcttgacatttaacatcttcgactggctcggccgatcacttacagccgtgtttatgtggcccggtaaagacagccgctggctcccatctctcgtccttgctcgccttgtttttgttcccctgttgctgctctgcaatatcaaaccacgtagatatttaacagtggtcttcgaacacgatgcctggttcattttcttcatggcggcatttgctttttcgaacggttatttagcctccctgtgcatgtgtttcggccctaagaaggtaaagcccgcagaggccgagaccgccggagccattatggccttttttctctgtctcggtctggctctgggcgcagtcttcagcttcctctttagagctatagtgtag

SEQ ID NO: 35409 - DNA, 1371 bp, Artificial Sequence
  derived and/or modified sequence
atgacaacttcccaccaacctcaggacagatacaaggcagtttggctgatcttttttatgctcggtctgggtaccctgcttccatggaacttcttcatgaccgccactcagtacttcacaaatcgactcgacatgtcacagaacgttagtttggtgactgcagagctgagtaaagatgctcaggcatcagcagccccagctgccccattgccagaacggaattccctgagcgccattttcaacaacgtaatgacactttgtgcgatgctgcccttactcctgtttacatacctgaattcgttcctgcaccagcgtatcccccagagtgtcagaatattaggatccctcgtggccatactgctcgttttcctgatcactgctattctggtgaaggtgcaactggacgcgctacccttttttgtgatcaccatgataaagatcgtcctgatcaacagcttcggtgccatcctccaaggcagcctgttcggactggccggactgctcccagctagttacactgcacctatcatgagcggacagggtctggctggctttttcgcctctgtggccatgatatgtgctatcgcctcagggtccgagctgtctgagagtgcttttggttattttatcactgcttgtgctgtgattattctgaccattatttgttatcttggcctacctcggctggagttctaccggtattaccagcaactgaaactggaaggtcctggtgagcaggagacgaaactggaccttatcagcaagggtgaagaacccagagcaggcaaggaggagtctggcgtctcagttagcaactcgcaacccacaaacgaaagccattccattaaagccattttaaaaaatatctccgtgctggcattcagtgtgtgttttatctttacaattaccattggcatgtttcctgcagtcactgtcgaggtgaagtcctcaatcgctggctccagtacttgggagcggtattttatacctgtatcgtgctttctgaccttcaacatatttgattggttagggcgatcacttaccgccgtgtttatgtggcctggcaaggacagccgttggctcccgtccctggtgctggccaggctagtgttcgtcccactcctgctgttgtgtaatatcaagcccagaaggtacttaacagtcgtattcgaacatgacgcatggtttatattcttcatggctgccttcgccttcagcaacgggtatcttgcaagcctgtgtatgtgctttggccctaagaaagtaaagcccgctgaagcagagacagctggagccataatggccttctttttatgtttgggcctcgctttgggggcagttttttcttttttatttcgggcaattgtgtag

SEQ ID NO: 35410 - DNA, 1371 bp, Artificial Sequence
  derived and/or modified sequence
atgacgacctcccaccagcctcaggacaggtataaggccgtttggctgatattttttatgcttggactgggaacgctcttaccatggaacttctttatgacagcaactcagtatttcactaataggttggatatgagccagaacgtgtcactggtcaccgctgaactgtctaaggacgcccaggccagcgctgctccagccgcaccactacctgaaagaaactctttgagcgccatctttaataacgtgatgacactttgtgcaatgctccccctgctgctgtttacctacctgaatagcttcctgcaccagcgcataccccaatccgtcagaatcctcggcagtctggtggcaatcctcttagtgtttctgattaccgccatcctggtgaaagtccagttggatgccttacccttcttcgtgattacaatgatcaagattgtgctgatcaattcgttcggcgcaatacttcaaggtagcctattcggcctggccggattactcccggctagttatactgccccaatcatgagtggccaaggtctcgcgggatttttcgcctcagtggccatgatatgtgcaatagcaagcgggagtgagctgtcagagtccgcattcgggtatttcatcactgcatgcgcagtgatcatacttactattatttgttatctgggtcttccacgcttggagttctataggtattatcagcaactgaaactcgaggggccaggtgagcaagagactaagctagacctcatatctaagggtgaggaaccacgagctgggaaggaagagtcaggagtcagtgtctctaatagtcaaccaactaatgagagccacagcattaaggctatcttgaagaacataagcgtgctggccttttcagtctgttttatcttcacaattacgattggcatgttcccagcggttacggtagaagtgaaatcaagcatcgccggaagttccacttgggagaggtactttattccagtctcctgttttctaacattcaacatctttgattggctgggcaggagcctcacagcggttttcatgtggcctggcaaggactccagatggctgccaagcctggtcctggcaagactggtctttgtgcccctcctcctcctgtgcaacatcaagccgcgacggtacctgaccgttgtgttcgagcatgatgcctggtttatatttttcatggctgctttcgccttcagcaatggatatctcgcctccctctgcatgtgcttcggcccaaaaaaggtcaaacccgctgaagctgagacggccggagccataatggcctttttcctttgcttgggcctggccttaggtgctgtcttttccttcctgttcagggcaatcgtctag

SEQ ID NO: 35411 - DNA, 1371 bp, Artificial Sequence
  derived and/or modified sequence
atgaccacgtctcatcagccacaagaccggtataaagctgtgtggctgatcttcttcatgctgggactgggaaccctcctaccctggaattttttcatgactgcgactcagtatttcaccaatcgcctggacatgagccagaacgtgagcttggtgactgcagaactgagcaaggatgcccaggcgtcagccgctccagctgctcctctgccggaacgcaactcactgtcagccatctttaataacgtcatgaccctgtgcgctatgctgcccctgctgctctttacgtatctgaattcttttttgcatcagcgtataccccagagcgtacgaattctcggcagcctggtcgcaatattgctggtctttctgattacagctatcctagttaaggtacagttagatgctctgcccttctttgtgatcacaatgatcaaaatagtgctgatcaactctttcggtgctatacttcaggggtcactgtttggcctcgcgggactgctgcctgctagctacactgccccaattatgtcaggccagggtctggccggtttctttgccagcgtggcaatgatctgtgccatagcttccgggagtgagctgagtgagtccgcgttcggatattttataaccgcgtgcgccgtgatcatcctgactatcatttgttacctgggcctgccaaggcttgaattttataggtactatcagcagctgaagttggagggcccaggcgaacaggaaactaaactcgacttaatatcaaagggggaggagcctcgagccggtaaagaggagtccggcgtttcagtatcaaatagccagcccaccaatgagtcccactccatcaaagccatcctgaagaatataagcgttcttgcattctccgtctgcttcattttcaccatcaccatcgggatgtttcccgctgtcactgtggaagtgaagtcctcaattgcaggatcgagtacctgggaacgttatttcatccccgttagttgtttcctcacctttaacatattcgactggcttggcaggtctcttaccgccgtgtttatgtggcccggaaaggactcacggtggctcccttccctagtcctcgcacggcttgtattcgtgccactgctgctgctctgcaacattaagcccagaagatatctgaccgtagtgtttgaacacgacgcgtggtttatttttttcatggccgcttttgcctttagtaacgggtacctcgcttcactgtgcatgtgtttcggacccaagaaagtaaaacccgctgaggcggagacggccggtgccattatggctttcttcctctgcttggggctggccctgggggctgtgttcagcttcctgttccgtgcaatcgtgtag

SEQ ID NO: 35412 - DNA, 1371 bp, Artificial Sequence
  derived and/or modified sequence
atgactacctcgcaccagccgcaagatagatacaaagcagtctggctgatcttttttatgctaggcctgggaaccctcctcccctggaatttctttatgacagctacgcagtactttaccaatagacttgatatgtcacagaatgtgtccttggtgaccgctgagctttctaaagatgcccaggcctctgcggctcccgctgcacccctgccagagcgcaattccctctccgccattttcaacaacgtcatgacactttgcgctatgctgcctctgctcctgttcacttatttgaatagctttctgcatcagcggatcccccaatccgtccggatcctgggcagcctggttgctattttattggtgtttctaatcactgctatcctggtaaaggtacagcttgatgctctgccatttttcgtgatcacgatgatcaagattgtgctcatcaactcattcggggctatcctgcaggggagtttattcggtttagcgggactgttgcccgcatcctacacagccccaattatgtctgggcaggggttggccggattttttgcgtccgtggctatgatttgcgcaattgcctcagggagcgagctatcagagtcagcgtttggctacttcatcaccgcctgtgccgttatcattttgactattatctgctacttgggcctccccagactggaattttacaggtattatcagcagcttaagttagagggtccgggagaacaggagactaagctggatctgatttctaaaggagaggaaccaagggccggtaaagaggagtcaggggtcagtgtgtcaaattcacaacccacaaatgagtcacactctatcaaagcgatacttaagaacatcagtgtgctcgcgttctcagtttgttttatctttactatcacaatcggaatgtttcctgctgtcactgtggaggtgaaaagctctatcgccggttccagtacatgggaaagatactttatccctgtttcttgctttctaaccttcaatatttttgattggctggggagatccctgactgctgtctttatgtggcccggaaaggactcaagatggttacctagtctcgtcctagcgaggttagtctttgtgccactcttgctactatgcaatatcaaaccacggaggtatttgaccgtcgtcttcgagcacgatgcatggttcatctttttcatggctgcctttgcgttctctaatggctacctggcgagtctgtgcatgtgcttcggaccaaagaaagtcaaaccagcagaagcggagaccgctggcgctatcatggcattctttctgtgcttggggctcgctctgggcgcagttttctctttccttttcagagctattgtgtag

SEQ ID NO: 35413 - DNA, 510 bp, Artificial Sequence
  derived and/or modified sequence
atgagaagagaaaggacccgtggccctcaggcctgggaattcccaagtcctactaagagcggttgctcactgcagagcctcagccgatacaaggcggtgtggctgatcttttttatgctgggactcggcacgctcctcccctggaatttttttatgactgccacacagtatttcaccaaccggctggacatgtcccagaatgtttctttagtcaccgcagagcttagcaaggatgcgcaggcctctgcggctcccgctgcacccctgcccgaacgcaatagcctctctgctatattcaacaatgtgatgactctctgcgccatgctgcccctgctattgtttacttacttgaactctttcctacaccaaaggatcccccagagtgtgcggatactcggctccctagtggctattctcctggtgtttcttattactgcaatcctggtcaaagtacagctggacgctcttccttttttcgtgattactatgattaagattgtgctgatatag

SEQ ID NO: 35414 - DNA, 846 bp, Artificial Sequence
  derived and/or modified sequence
gaagggcccctcccactgagtcggctctggtctccccgcccctgagccgcgaggactggacgcagctggctgcggagctctgggcgggcgctggggtcgcctgttgcagcctctcttccgcccggcggcccacaccggtcaggcccggcgcgggctgcgctctccagctgtggctatggccccagccccgagatgaggagggagagaactaggggcccgcaggcctgggaatttccgtcccccaccaagtccggatgctcactccaaagtctcagcagatacaaagctgtctggcttatcttcttcatgctgggtctgggaacgctgctcccgtggaattttttcatgacggccactcagtatttcacaaaccgcctggacatgtcccagaatgtgtccttggtcactgctgaactgagcaaggacgcccaggcgtcagccgcccctgcagcacccttgcctgagcggaactctctcagtgccatcttcaacaatgtcatgaccctatgtgccatgctgcccctgctgttattcacctacctcaactccttcctgcatcagaggatcccccagtccgtacggatcctgggcagcctggtggccatcctgctggtgtttctgatcactgccatcctggtgaaggtgcagctggatgctctgcccttctttgtcatcaccatgatcaagatcgtgctcattaattgtaagctgggccaggagggggcctatgggaggaggcatgcccaactacccccactcttttttgacccagcgttagccagagagaagcccagcctccgcctggagggagtggatgctgtgagcagctgggattcagaggcctga

SEQ ID NO: 35415 - DNA, 1371 bp, Artificial Sequence
  derived and/or modified sequence
atgaccaccagccaccagccccaggacagatacaaggccgtgtggctgatcttcttcatgctgggcctgggcaccctgctgccctggaacttcttcatgaccgccacccagtacttcaccaacagactggacatgagccagaacgtgagcctggtgaccgccgagctgagcaaggacgcccaggccagcgccgcccccgccgcccccctgcccgagagaaacagcctgagcgccatcttcaacaacgtgatgaccctgtgcgccatgctgcccctgctgctgttcacctacctgaacagcttcctgcaccagagaatcccccagagcgtgagaatcctgggcagcctggtggccatcctgctggtgttcctgatcaccgccatcctggtgaaggtgcagctggacgccctgcccttcttcgtgatcaccatgatcaagatcgtgctgatcaacagcttcggcgccatcctgcagggcagcctgttcggcctggccggcctgctgcccgccagctacaccgcccccatcatgagcggccagggcctggccggcttcttcgccagcgtggccatgatctgcgccatcgccagcggcagcgagctgagcgagagcgccttcggctacttcatcaccgcctgcgccgtgatcatcctgaccatcatctgctacctgggcctgcccagactggagttctacagatactaccagcagctgaagctggagggccccggcgagcaggagaccaagctggacctgatcagcaagggcgaggagcccagagccggcaaggaggagagcggcgtgagcgtgagcaacagccagcccaccaacgagagccacagcatcaaggccatcctgaagaacatcagcgtgctggccttcagcgtgtgcttcatcttcaccatcaccatcggcatgttccccgccgtgaccgtggaggtgaagagcagcatcgccggcagcagcacctgggagagatacttcatccccgtgagctgcttcctgaccttcaacatcttcgactggctgggcagaagcctgaccgccgtgttcatgtggcccggcaaggacagcagatggctgcccagcctggtgctggccagactggtgttcgtgcccctgctgctgctgtgcaacatcaagcccagaagatacctgaccgtggtgttcgagcacgacgcctggttcatcttcttcatggccgccttcgccttcagcaacggctacctggccagcctgtgcatgtgcttcggccccaagaaggtgaagcccgccgaggccgagaccgccggcgccatcatggccttcttcctgtgcctgggcctggccctgggcgccgtgttcagcttcctgttcagagccatcgtgtag

SEQ ID NO: 35416 - DNA, 510 bp, Artificial Sequence
  derived and/or modified sequence
atgagaagagagagaaccagaggcccccaggcctgggagttccccagccccaccaagagcggctgcagcctgcagagcctgagcagatacaaggccgtgtggctgatcttcttcatgctgggcctgggcaccctgctgccctggaacttcttcatgaccgccacccagtacttcaccaacagactggacatgagccagaacgtgagcctggtgaccgccgagctgagcaaggacgcccaggccagcgccgcccccgccgcccccctgcccgagagaaacagcctgagcgccatcttcaacaacgtgatgaccctgtgcgccatgctgcccctgctgctgttcacctacctgaacagcttcctgcaccagagaatcccccagagcgtgagaatcctgggcagcctggtggccatcctgctggtgttcctgatcaccgccatcctggtgaaggtgcagctggacgccctgcccttcttcgtgatcaccatgatcaagatcgtgctgatctag

SEQ ID NO: 35417 - protein, 180 aa, Artificial Sequence
  derived and/or modified sequence
MSAARPQFSIDDAFELSLEDGGPGPESSGVARFGPLHFERRARFEVADEDKQSRLRYQNLENDEDGAQASPEPDGGVGTRDSSRTSIRSSQWSFSTISSSTQRSYNTCCSWTQHPLIQKNRRVVLASFLLLLLGLGVSSAIFFVPGFLLLVPGVYHVIFIYCAVKGHRGFQFFYLPYFEK

SEQ ID NO: 35418 - DNA, 543 bp, Artificial Sequence
  derived and/or modified sequence
atgagcgccgccagaccccagttcagcatcgacgacgccttcgagctgagcctggaggacggcggccccggccccgagagcagcggcgtggccagattcggccccctgcacttcgagagaagagccagattcgaggtggccgacgaggacaagcagagcagactgagataccagaacctggagaacgacgaggacggcgcccaggccagccccgagcccgacggcggcgtgggcaccagagacagcagcagaaccagcatcagaagcagccagtggagcttcagcaccatcagcagcagcacccagagaagctacaacacctgctgcagctggacccagcaccccctgatccagaagaacagaagagtggtgctggccagcttcctgctgctgctgctgggcctgggcgtgagcagcgccatcttcttcgtgcccggcttcctgctgctggtgcccggcgtgtaccacgtgatcttcatctactgcgccgtgaagggccacagaggcttccagttcttctacctgccctacttcgagaagtag

SEQ ID NO: 35419 - DNA, 543 bp, Artificial Sequence
  derived and/or modified sequence
atgagcgcagctagaccccagttctctattgatgacgcattcgagctgtctctcgaggacggcggcccaggcccagaatcctctggggttgccagatttggacccctccatttcgagaggcgtgcacggttcgaagtagctgacgaggataaacagagccgactgaggtaccagaacctggaaaacgacgaagatggtgcgcaagcctcccccgagccagacggaggtgtcgggacaagggatagttcacggacgagtataagaagctctcagtggtccttctccactatttcctcctccacacaacgaagctacaatacttgttgtagctggacccaacaccctctgatccaaaaaaacagaagggtggttctagcctctttccttttgctactgcttgggctgggggtgagctctgcgatctttttcgttcctgggtttcttctcttggtgcctggagtgtatcacgtcatctttatctactgtgccgtgaagggccacaggggctttcaattcttctacctgccgtacttcgaaaagtag

SEQ ID NO: 35420 - DNA, 543 bp, Artificial Sequence
  derived and/or modified sequence
atgtctgctgcccggccccagttcagcattgatgatgcctttgagctgagcctggaggatggcggccctggccctgagagcagcggcgtggccaggtttggccccctgcactttgagcggcgggccaggtttgaggtggctgatgaggacaagcagagccggctgcgctaccagaacctggagaatgatgaagatggagcccaggccagccctgagccagatggcggcgtgggcacccgggacagcagcaggaccagcatccgcagcagccagtggagcttcagcaccatcagcagcagcacccagaggagctacaacacctgctgctcctggacccagcaccccctcatccagaagaacagaagagtggtgctggccagcttcctgctgctgctgctgggcctgggcgtgtcctctgccatcttctttgtgcccggcttcctgctgctggtgcctggggtgtaccacgtgatcttcatctactgtgctgtgaagggccaccggggcttccagttcttctacctgccctactttgagaagtag

SEQ ID NO: 35421 - DNA, 543 bp, Artificial Sequence
  derived and/or modified sequence
atgagcgccgcccggccccagttcagcatcgacgacgccttcgagctgtccttggaggatgggggccccggacctgagagctctggtgtcgcacggtttggcccgttgcattttgagcgaagagcaaggtttgaggtggcagacgaagataaacagagccgactcagatatcaaaatctggagaatgatgaagacggagcccaagcgagtcctgaaccagacggcggcgtcggtaccagagacagctctagaacctcaatacggtcttcacagtggtccttctctactattagctcatcaacccagcgcagctataatacttgctgctcgtggacacagcatccccttatccaaaagaatcggagagttgttctggcctcattcctcctcctgttgcttggccttggggtgtcctccgcgatatttttcgtgccaggtttcctgctgcttgtccccggcgtgtaccacgtaatctttatttattgtgctgtgaagggccatcgtgggtttcaatttttttatctgccatacttcgaaaaatag

SEQ ID NO: 35422 - DNA, 543 bp, Artificial Sequence
  derived and/or modified sequence
atgtctgccgctagaccccagttctctattgatgatgccttcgagctctcattggaggatgggggaccaggccctgagagtagcggagtcgccagattcggccctttacattttgaacgtagggcaagattcgaagtggccgatgaagacaaacagagccggctgcgctaccagaacttggagaacgacgaagacggggcacaggcaagcccagagccggatggtggtgttggtacccgggattcctcccgcacatccatccgtagttcccagtggagcttttccactatttccagcagtacccagcgaagctacaatacatgctgtagttggacccagcacccgctgattcagaaaaaccgcagggtggttctggccagcttcctcctgcttttgttgggtttgggcgtttcaagcgctatttttttcgtacctggcttcctgctactggtgccaggggtgtatcacgtgatctttatatactgtgccgtgaagggacatagaggatttcagtttttctacctcccttacttcgagaaatag

SEQ ID NO: 35423 - DNA, 823 bp, Artificial Sequence
  derived and/or modified sequence
acgctgggtgtgtgggcgcagatggcggcggcgcacggcgcctgagcgggccggggccatgagcgccgcccggccccagttcagcattgatgatgccttcgagctgtccctggaggacgggggccctgggcccgagtccagcggggtcgcgcgctttgggccgctgcacttcgagcgtcgggcccggttcgaggtggctgacgaggacaagcagtcccggctgcgctaccagaacctggagaacgatgaggatggagcccaggcctctccggagccggatgggggagtcggcaccagggattccagccgaacttccatccgcagctcccagtggtccttcagcaccatcagcagcagcacccagcgctcctacaacacctgctgcagctggacccaacaccctttgatccagaagaaccgccgagtggtgctggcctccttcctgctcctgctgctggggctgggtgtctccagcgccatcttcttcgtgccgggcttcctgttgttggtgcctggagtctatcacgtgatcttcatctactgcgcggtcaagggccaccggggcttccagttcttctacctgccctacttcgagaagtgatcgcggcgcagcgtggaccccttgcgcccatgggggcgcccctcttgccctgttccgttcccctcatctcaagggaagaggccctccaggaccctcgaaaccccagcccctagggagtttgctcaggaagttcggggcatgcaggcctggccctgggaaagccgcccgtcgcctgctctgtgccttaacttattctcgggccgtgcggctgctaggttgctg

SEQ ID NO: 35424 - protein, 1134 aa, Artificial Sequence
  derived and/or modified sequence
MSEPHRVQFTSLPGSLNPAFLKKSRKEEAGAGEQHQDCEPAAAAVRITLTLFEPDHKRCPEFFYPELVKNIRGKVKGLQPGDKKKDLSDPFNDEEKERHKVEALARKFEEKYGGKKRRKDRIQDLIDMGYGYDESDSFIDNSEAYDELVPASLTTKYGGFYINSGTLQFRQASESEDDFIKEKKKKSPKKRKLKEGGEKIKKKKKDDTYDKEKKSKKSKFSKAGFTALNASKEKKKKKYSGALSVKEMLKKFQKEKEAQKKREEEHKPVAVPSAEAQGLRELEGASDPLLSLFGSTSDNDLLQAATAMDSLTDLDLEHLLSESPEGSPFRDMDDGSDSLGVGLDQEFRQPSSLPEGLPAPLEKRVKELAQAARAAEGESRQKFFTQDINGILLDIEAQTRELSSQVRSGVYAYLASFLPCSKDALLKRARKLHLYEQGGRLKEPLQKLKEAIGRAMPEQMAKYQDECQAHTQAKVAKMLEEEKDKEQRDRICSDEEEDEEKGGRRIMGPRKKFQWNDEIRELLCQVVKIKLESQDLERNNKAQAWEDCVKGFLDAEVKPLWPKGWMQARTLFKESRRGHGHLTSILAKKKVMAPSKIKVKESSTKPDKKVSVPSGQIGGPIALPSDHQTGGLSIGASSRELPSQASGGLANPPPVNLEDSLDEDLIRNPASSVEAVSKELAALNSRAAGNSEFTLPAPSKAPAEKVGGVLCTEEKRNFAKPSPSAPPPASSLQSPLNFLAEQALALGQSSQEKKPESSGYKELSCQAPLNKGLPEVHQSKAKHHSLPRTSHGPQVAVPVPGPQVKVFHAGTQQQKNFTPPSPFANKLQGPKASPTQCHRSLLQLVKTAAKGQGFHPSAPATSGGLSASSSSSHKTPASSSSALSHPAKPHSVSSAGSSYKNNPFASSISKHGVSSGSSSSGGTPVQSSVSGSLVPGIQPPSVGQATSRPVPSSAGKKMPVSQKLTLVAPPGGPNGDSSGGTQGVAKLLTSPSLKPSAVSSVTSSTSLSKGASGTVLLAGSSLMASPYKSSSPKLSGAMSSNSLGIITPVPIPVHVLSFSADSSAKAGVSKDAIVTGPAPGSFHHGLGHSLLAGLHSSPPHAAPLPHAAVPTHIPQSLPGASQLHGKGPAVPRKL

SEQ ID NO: 35425 - DNA, 3405 bp, Artificial Sequence
  derived and/or modified sequence
atgagcgagccccacagagtgcagttcaccagcctgcccggcagcctgaaccccgccttcctgaagaagagcagaaaggaggaggccggcgccggcgagcagcaccaggactgcgagcccgccgccgccgccgtgagaatcaccctgaccctgttcgagcccgaccacaagagatgccccgagttcttctaccccgagctggtgaagaacatcagaggcaaggtgaagggcctgcagcccggcgacaagaagaaggacctgagcgaccccttcaacgacgaggagaaggagagacacaaggtggaggccctggccagaaagttcgaggagaagtacggcggcaagaagagaagaaaggacagaatccaggacctgatcgacatgggctacggctacgacgagagcgacagcttcatcgacaacagcgaggcctacgacgagctggtgcccgccagcctgaccaccaagtacggcggcttctacatcaacagcggcaccctgcagttcagacaggccagcgagagcgaggacgacttcatcaaggagaagaagaagaagagccccaagaagagaaagctgaaggagggcggcgagaagatcaagaagaagaagaaggacgacacctacgacaaggagaagaagagcaagaagagcaagttcagcaaggccggcttcaccgccctgaacgccagcaaggagaagaagaagaagaagtacagcggcgccctgagcgtgaaggagatgctgaagaagttccagaaggagaaggaggcccagaagaagagagaggaggagcacaagcccgtggccgtgcccagcgccgaggcccagggcctgagagagctggagggcgccagcgaccccctgctgagcctgttcggcagcaccagcgacaacgacctgctgcaggccgccaccgccatggacagcctgaccgacctggacctggagcacctgctgagcgagagccccgagggcagccccttcagagacatggacgacggcagcgacagcctgggcgtgggcctggaccaggagttcagacagcccagcagcctgcccgagggcctgcccgcccccctggagaagagagtgaaggagctggcccaggccgccagagccgccgagggcgagagcagacagaagttcttcacccaggacatcaacggcatcctgctggacatcgaggcccagaccagagagctgagcagccaggtgagaagcggcgtgtacgcctacctggccagcttcctgccctgcagcaaggacgccctgctgaagagagccagaaagctgcacctgtacgagcagggcggcagactgaaggagcccctgcagaagctgaaggaggccatcggcagagccatgcccgagcagatggccaagtaccaggacgagtgccaggcccacacccaggccaaggtggccaagatgctggaggaggagaaggacaaggagcagagagacagaatctgcagcgacgaggaggaggacgaggagaagggcggcagaagaatcatgggccccagaaagaagttccagtggaacgacgagatcagagagctgctgtgccaggtggtgaagatcaagctggagagccaggacctggagagaaacaacaaggcccaggcctgggaggactgcgtgaagggcttcctggacgccgaggtgaagcccctgtggcccaagggctggatgcaggccagaaccctgttcaaggagagcagaagaggccacggccacctgaccagcatcctggccaagaagaaggtgatggcccccagcaagatcaaggtgaaggagagcagcaccaagcccgacaagaaggtgagcgtgcccagcggccagatcggcggccccatcgccctgcccagcgaccaccagaccggcggcctgagcatcggcgccagcagcagagagctgcccagccaggccagcggcggcctggccaaccccccccccgtgaacctggaggacagcctggacgaggacctgatcagaaaccccgccagcagcgtggaggccgtgagcaaggagctggccgccctgaacagcagagccgccggcaacagcgagttcaccctgcccgcccccagcaaggcccccgccgagaaggtgggcggcgtgctgtgcaccgaggagaagagaaacttcgccaagcccagccccagcgcccccccccccgccagcagcctgcagagccccctgaacttcctggccgagcaggccctggccctgggccagagcagccaggagaagaagcccgagagcagcggctacaaggagctgagctgccaggcccccctgaacaagggcctgcccgaggtgcaccagagcaaggccaagcaccacagcctgcccagaaccagccacggcccccaggtggccgtgcccgtgcccggcccccaggtgaaggtgttccacgccggcacccagcagcagaagaacttcaccccccccagccccttcgccaacaagctgcagggccccaaggccagccccacccagtgccacagaagcctgctgcagctggtgaagaccgccgccaagggccagggcttccaccccagcgcccccgccaccagcggcggcctgagcgccagcagcagcagcagccacaagacccccgccagcagcagcagcgccctgagccaccccgccaagccccacagcgtgagcagcgccggcagcagctacaagaacaaccccttcgccagcagcatcagcaagcacggcgtgagcagcggcagcagcagcagcggcggcacccccgtgcagagcagcgtgagcggcagcctggtgcccggcatccagccccccagcgtgggccaggccaccagcagacccgtgcccagcagcgccggcaagaagatgcccgtgagccagaagctgaccctggtggccccccccggcggccccaacggcgacagcagcggcggcacccagggcgtggccaagctgctgaccagccccagcctgaagcccagcgccgtgagcagcgtgaccagcagcaccagcctgagcaagggcgccagcggcaccgtgctgctggccggcagcagcctgatggccagcccctacaagagcagcagccccaagctgagcggcgccatgagcagcaacagcctgggcatcatcacccccgtgcccatccccgtgcacgtgctgagcttcagcgccgacagcagcgccaaggccggcgtgagcaaggacgccatcgtgaccggccccgcccccggcagcttccaccacggcctgggccacagcctgctggccggcctgcacagcagccccccccacgccgcccccctgccccacgccgccgtgcccacccacatcccccagagcctgcccggcgccagccagctgcacggcaagggccccgccgtgcccagaaagctgtag

SEQ ID NO: 35426 - DNA, 3405 bp, Artificial Sequence
  derived and/or modified sequence
atgtcagaaccccaccgcgttcaatttaccagcctccctgggagcctcaacccagctttcctcaagaagtcccgaaaggaggaagcgggcgccggagagcagcaccaggactgtgagcctgccgctgcagctgttaggatcaccctcactctgttcgagcccgatcataagcggtgtcccgaattcttttatccagagctggtgaagaacattagaggcaaggtcaagggactccagccaggtgataaaaagaaagatctaagcgatccttttaatgatgaagaaaaggagaggcataaagtcgaagccctggctagaaaattcgaggagaaatatggagggaagaaacgccgcaaggatcggatccaagaccttatagacatgggctatggctacgacgagtcagattctttcatcgataactccgaggcatatgatgaattagtccccgcgtcactcacaactaagtacggggggttttatattaactccggtacgctgcagtttagacaggcttcagagtcggaggacgatttcattaaggaaaagaagaagaagtcccctaaaaagcgcaaactaaaggaaggaggtgaaaaaatcaagaagaaaaaaaaagatgatacttatgataaagagaagaaatcaaagaaaagcaaattcagtaaggcgggttttacagctttgaacgcctcaaaagaaaaaaagaagaagaagtatagcggagccttgtcggttaaagaaatgctgaagaagttccaaaaagagaaagaggcacaaaaaaaacgggaagaagagcataaacctgtcgcggtcccatctgcagaggctcagggattgcgagagctggagggagcaagcgacccgctgctgagcctgtttggctctacgtccgacaatgacctcttgcaggcggccactgccatggatagcctgacggatttagatctagagcacctcctctctgaatcgcccgagggctccccgttccgggacatggatgacggttccgactctttgggcgtcggcctggaccaggaatttcgccagcccagtagtctccccgagggactgcccgcccccctggaaaaacgggtgaaggagctggcacaggctgcccgggcagccgaaggagaatctaggcagaaattcttcacacaggatatcaacggcatccttctggatattgaagcccagactagagagttgtccagccaggttcgctccggcgtgtacgcttacttggctagctttctaccttgctcgaaggacgccctgctcaagcgagccagaaagttgcacctttacgaacagggcgggcgactcaaggagcctctccaaaagcttaaagaagctatcggccgcgcaatgccagaacagatggctaaatatcaagatgaatgtcaggcgcacacacaggctaaggtggctaagatgttagaggaggagaaggacaaagagcagagggatcgcatatgttccgacgaagaagaagacgaagaaaagggagggagaaggatcatggggcctaggaagaagttccagtggaatgacgaaattagagaattgctgtgtcaggtcgtcaaaatcaagctggaatcccaggaccttgagagaaataacaaagcacaggcctgggaagactgcgtgaagggattcctggacgctgaagttaaaccactctggccgaagggatggatgcaggcacggacattgtttaaggagagccgccggggacatggacacctgacatccatcctggccaagaagaaagtcatggccccaagtaagattaaagtgaaggagtcttccacaaagcccgacaagaaagtaagcgtgcccagcgggcagattggtggacccatagctcttcctagtgatcaccagacaggcgggctttctattggagcttccagtcgggagctcccctcacaggctagcggcggcctggctaacccccctcccgtgaacctggaggattccctcgacgaggaccttatacgaaaccctgcttctagtgtggaagctgtaagcaaagagctcgctgccctgaattcacgagccgcaggaaacagcgagttcacgctgcctgcaccatcaaaggctcccgccgaaaaagtgggaggtgtcttgtgcacggaagagaagcggaacttcgctaagccctccccctctgcacctccaccagccagcagcctgcaatcccctctcaactttctcgccgagcaagcgctggcgctcggacaatccagtcaagagaagaagcccgagagctccggctacaaggagctgtcgtgccaggccccactcaataaaggcctccccgaagtacaccagagcaaggccaaacaccactcgctgccgcgcacctctcacggtccacaggttgccgtgccagtgcctggcccgcaggtgaaggtttttcacgctggtacacagcagcagaagaatttcacccccccttctccattcgcaaataagctgcaagggccgaaggccagtccaactcaatgccaccgatccttactgcaactggtcaaaacagccgctaagggccagggtttccacccgtccgccccagcgacatccggaggcttatccgcttcctcatcctcaagccacaaaacccctgcgagctccagcagcgccctcagtcaccccgcaaaaccccacagtgtttcgtccgccggtagttcatacaagaacaatcctttcgcatcttccatctctaagcatggggtcagtagcggtagttccagttctgggggtacacctgtgcagagctcagtgtcaggctcactggtccctggtatccagccaccttctgttggccaagccaccagcaggccagtcccaagttccgctgggaaaaaaatgcccgtgtctcagaagctgacacttgttgcccccccaggaggtcccaatggagacagctccggtggaactcagggagtagctaaactcttgacttcccctagcctgaagcccagcgcagtttcatctgtgacctcttccacctctctcagcaaaggagcctccggtactgtgctcttggccggttctagtttgatggcctcaccttataagtcctcctcaccgaaactgagcggggcaatgtcctccaacagtttgggaattatcaccccagtgcccattcctgtgcatgtgctgtctttttctgcagactcgagtgccaaagcgggagtttctaaggatgcaattgtaacaggtccagccccaggcagtttccaccatggactgggacacagcctgctcgctggtctgcattcttcacctccacacgctgcccctctgccccacgcggccgtccctactcatattcctcaatccctacctggtgccagtcagctgcatggtaagggacccgccgtacctcggaagctctag

SEQ ID NO: 35427 - DNA, 3405 bp, Artificial Sequence
  derived and/or modified sequence
atgtccgagccacaccgcgtacagttcacaagtttgcccggaagtctgaatccagcgtttctaaagaaatctaggaaggaagaggctggggccggcgaacagcatcaagactgcgagcccgctgcggccgcagtccgcatcaccctgacattgtttgagccagaccataagcggtgccctgaatttttctacccagaactagtcaaaaacatcaggggtaaggtaaaaggacttcagcctggcgacaagaagaaagatttgtccgacccattcaatgacgaggagaaagagcggcataaggtggaggccttggccagaaagttcgaagaaaaatatggcgggaagaagaggcgtaaagacaggatccaggacttaatagatatgggctacggctacgacgagtctgactccttcattgacaactctgaagcctacgatgaattggtgcccgctagccttacaactaagtacggtggtttctacataaatagcggcacgctccaatttcgccaggcatccgagagtgaagacgattttattaaggagaagaaaaaaaagtcgcctaaaaagcgaaagttgaaggaaggcggcgaaaaaataaaaaaaaagaaaaaggatgatacgtacgacaaagagaagaagtcaaagaaaagcaaatttagcaaagctggattcacagccttaaacgcctccaaagagaagaagaaaaagaaatattcaggggccttgtcagtcaaggagatgcttaagaaattccagaaggaaaaggaagctcagaaaaaacgtgaggaggaacataagccggtcgccgtgccaagcgccgaggcccagggccttcgtgagctcgaaggcgcatcagaccctctcctttccctttttggaagtacatccgataacgacctactccaggctgcaaccgccatggactctctgacggatctcgatttggagcacctgctcagtgaaagcccagagggatcaccttttcgtgacatggatgatggatccgattcactgggcgtcgggctggatcaggagttccgccagccatcctcactgcccgaagggctgcctgctccgctcgagaaacgagtgaaggagcttgcgcaggctgcccgcgccgccgagggagagtctcgccagaaatttttcacgcaggacattaacggaatcctgttagatattgaggctcagaccagagaactcagttcccaggttcggagtggcgtgtacgcctacttagctagctttctgccctgttccaaggatgcattactgaagagggcgcgtaagctgcacctgtacgagcagggcgggagactgaaggagccactgcaaaagttaaaggaagcgatcggacgcgccatgcctgaacagatggctaaatatcaggatgagtgccaggcgcatacacaagccaaagtggccaagatgttagaagaagagaaagacaaggagcaacgcgataggatctgctctgacgaggaggaggacgaggagaagggggggaggagaatcatgggtccaagaaagaagtttcaatggaacgacgagattagggagctgctatgtcaggtcgtgaaaattaaactcgaatcacaggacctcgagcgcaataataaagcacaggcctgggaggactgtgttaaaggctttcttgacgctgaagtaaagccactgtggcctaaggggtggatgcaggcgcgaacactttttaaggagagtaggcgcggccatggccatctgacatccatcttggcaaagaagaaagtgatggcccctagcaagattaaagttaaagaatcttctacgaagccagacaagaaggtctcagtgccctcagggcagataggaggtcctatcgccctgcctagtgatcaccagaccggcggcctgtccattggtgcgtcatcacgtgaactgcctagccaggcctccggcggtctcgcgaacccccctccagtgaacttagaggattccctggacgaggacctgatcaggaaccctgcctcttcggtcgaggccgtcagcaaggagcttgctgccctgaattccagagcagccgggaatagtgagtttacactgcctgcgccttctaaggctcccgccgagaaagtggggggagtactgtgtacagaggaaaagaggaactttgcaaagccatctccaagcgcgcccccacccgccagcagcctccagtcacctctcaattttctcgcagagcaggccctggctttgggtcagtcatcgcaggagaagaaacctgaatcctcaggctataaagagctgagttgccaggctcctctgaacaagggtctccctgaggttcatcagtccaaagctaagcaccatagcctaccacgcaccagtcatggacctcaagtagctgttcctgtgcccggaccgcaggtcaaggtgtttcatgccgggactcagcagcagaaaaactttactcctccttctccatttgccaacaagctgcaaggtcctaaggcaagtccaacacagtgccatcggagtttgctccagttagtgaaaaccgctgcaaaagggcaggggttccacccatcagctccagctactagtggaggactctccgcttcatcttcaagcagccacaaaacccccgcctcctcctcttccgccctctctcatcctgctaagcctcactctgttagctccgcaggatcttcatacaaaaacaatccttttgcatcaagcatatctaagcacggcgtatcttccggatcctccagcagtggcgggacaccagttcaaagcagtgttagcggctctctcgtacccggcatccagccgccttcagtcgggcaggccacttcccgacccgtacccagttccgctgggaagaagatgccggtcagccagaaacttactctggtcgctccccctggcggacctaatggcgacagcagcggtggaacacagggagtggccaagttgctcacttctccttcactgaagcccagcgcagtgagctctgtgacaagctccacttcgttatcaaagggcgcatccggcaccgtgcttctcgccggaagcagccttatggcctcaccgtacaagtcctccagccccaagctgagcggggcaatgtcgagcaactctctgggcatcattactcccgtgcctattcctgtgcacgtattatccttcagtgcagattcttccgcaaaagcaggtgttagtaaggacgcaatcgtgacaggacctgcgccagggtcatttcaccatggcctaggtcatagcttgctggctggcctacatagctccccaccccatgcagcacccctgcctcatgcagcagttccgacccacatccctcagtcacttcctggtgccagtcagcttcacggcaagggccctgcagtgccgagaaagctatag

SEQ ID NO: 35428 - DNA, 3405 bp, Artificial Sequence
  derived and/or modified sequence
atgtctgagccccaccgggtgcagttcaccagcctgcccggcagcctgaacccagccttcctgaagaagagcaggaaggaggaggccggggccggggagcagcaccaggactgtgagcctgctgctgctgctgtgcgcatcaccctgaccctgtttgagccagaccacaagcgctgcccagagttcttctacccagagctggtgaagaacatccggggcaaggtgaagggcctgcagcccggggacaagaagaaggacctgagtgaccccttcaatgatgaggagaaggagcggcacaaggtggaggccctggccaggaagtttgaggagaagtatggaggcaagaagaggaggaaggaccgcatccaggacctgattgacatgggctacggctatgatgaaagtgacagcttcatcgacaacagcgaggcctatgatgagctggtgcctgccagcctgaccaccaagtatggaggcttctacatcaacagcggcaccctgcagttccggcaggccagcgagagtgaagatgacttcatcaaggagaagaagaagaagagccccaagaagaggaagctgaaggagggcggggagaagatcaagaagaagaagaaggatgacacctatgacaaggagaagaagagcaagaagagcaagttcagcaaggccggcttcaccgccctgaatgccagcaaggagaagaagaagaagaagtacagcggggccctgtctgtgaaggagatgctgaagaagttccagaaggagaaggaggcccagaagaagcgggaggaggagcacaagcctgtggccgtgcccagcgctgaggcccagggcctgcgggagctggagggcgccagtgaccccctgctgagcctgtttggcagcaccagtgacaatgacctgctgcaggccgccacagccatggacagcctgacagacctggacctggagcacctgctgtctgagagccctgagggcagccccttccgggacatggatgatggcagtgacagcctgggcgtgggcctggaccaggagttccggcagcccagcagcctgcctgagggcctgcctgcccccctggagaagagggtgaaggagctggcccaggccgcccgggctgctgagggggagagccggcagaagttcttcacccaggacatcaatggcatcctgctggacatcgaggcccagacccgggagctgagcagccaggtgcgcagcggcgtgtatgcctacctggccagcttcctgccctgcagcaaggatgccctgctgaagagggccaggaagctgcacctgtatgagcagggcggccgcctgaaggagcccctgcagaagctgaaggaggccatcggccgggccatgcctgagcagatggccaagtaccaggatgagtgccaggcccacacccaggccaaggtggccaagatgctggaggaggagaaggacaaggagcagagggaccgcatctgcagtgatgaggaggaggatgaggagaagggcggccgccgcatcatgggccccaggaagaagttccagtggaatgatgagatccgggagctgctgtgccaggtggtgaagatcaagctggagagccaggacctggagaggaacaacaaggcccaggcctgggaggactgtgtgaagggcttcctggatgctgaggtgaagcccctgtggcccaagggctggatgcaggcccggaccctcttcaaggagagccggcggggccacggccacctgaccagcatcctggccaagaagaaggtgatggcccccagcaagatcaaggtgaaggagagcagcaccaagccagacaagaaggtgtctgtgcccagcggccagattggaggccccatcgccctgcccagcgaccaccagacaggaggcctgagcatcggggccagcagccgggagctgcccagccaggccagcggcggcctggccaaccccccacctgtgaacctggaggacagcctggatgaagatctcatcagaaatcctgccagctctgtggaggccgtgtccaaggagctggccgccctgaacagcagagctgctggcaacagcgagttcaccctgcctgcccccagcaaggccccagctgagaaggtgggcggcgtgctgtgcacagaggagaagaggaactttgccaagcccagccccagcgcccctcctccagccagcagcctgcagagccccctgaacttcctggccgagcaggccctggccctgggccagagcagccaggagaagaagccagagagcagcggctacaaggagctgagctgccaggcccccctgaacaagggcctgcctgaggtgcaccagagcaaggccaagcaccacagcctgcccaggaccagccacggcccccaggtggccgtgcctgtgcccggcccccaggtgaaggtgttccacgccggcacccagcagcagaagaacttcaccccacccagcccctttgccaacaagctgcagggccccaaggccagccccacccagtgccacaggagcctgctgcagctggtgaagacagctgccaagggccagggcttccaccccagcgccccagccaccagcggcggcctgagcgccagcagcagcagcagccacaagaccccagccagcagcagcagcgccctgagccacccagccaagccccacagcgtgagcagcgctggcagcagctacaagaacaacccctttgccagcagcatcagcaagcatggagtgagcagcggcagcagcagcagcggcggcacccctgtgcagagctctgtgtctggcagcctggtgcccggcatccagcccccatctgtgggccaggccaccagcaggcctgtgcccagcagcgctgggaagaagatgcctgtgtcccagaagctgaccctggtggcccctcctgggggccccaacggggacagcagcggcggcacccagggcgtggccaagctgctgaccagccccagcctgaagcccagcgctgtgtcctctgtgaccagcagcaccagcctgagcaaaggagccagcggcaccgtgctgctggccggcagcagcctgatggccagcccctacaagagcagcagccccaagctgagcggggccatgagcagcaacagcctgggcatcatcacccctgtgcccatccctgtgcacgtgctgtccttctctgctgacagcagcgccaaggccggcgtgtccaaggatgccatcgtgactggacctgcccctggcagcttccaccacggcctgggccacagcctgctggccggcctgcacagcagcccccctcatgctgcccccctgccccatgctgctgtgcccacccacatcccccagagcctgcccggggccagccagctgcacggcaagggccctgctgtgcccaggaagctgtag

SEQ ID NO: 35429 - DNA, 3405 bp, Artificial Sequence
  derived and/or modified sequence
atgagcgagccccaccgggtgcagttcaccagcctgcccggcagcctcaatccagcattcctgaagaagtcaaggaaagaagaggcaggggctggggagcagcatcaggattgtgagcccgcggcagccgctgtgcgtatcactctgaccctgtttgaacctgaccacaaaaggtgtccagagttcttctacccagagctcgttaagaacattcgggggaaagtaaaggggctgcagcccggggataaaaagaaagatcttagcgaccctttcaatgacgaagagaaagaacggcacaaggttgaggcactagccaggaaattcgaggaaaagtacgggggaaaaaagagacgcaaggataggattcaagacctcattgatatgggctacggttacgacgagtctgactcatttatcgataacagtgaggcgtacgacgagttagtacccgcatctctgactaccaagtacggcggcttctatatcaatagtggcacactgcagtttagacaggctagtgagagtgaagacgactttattaaggagaagaagaaaaaatccccaaagaagcgaaaactgaaggaaggcggcgaaaagatcaaaaaaaagaaaaaggacgacacatatgacaaggaaaaaaagtctaagaagagcaagttctctaaggccgggttcactgctctcaatgctagcaaggaaaaaaagaagaagaaatatagcggagccttgagcgtaaaagagatgctgaagaaattccaaaaagagaaggaggcgcagaaaaagcgagaagaggaacacaagcctgtggccgtacctagtgccgaagctcagggcctaagagaactggaaggggcctccgatccactactgtccttattcggctccacatcggataatgacctcttacaggctgccacagcaatggattcacttacagacctcgatctggaacaccttctgtctgagtcaccagaggggagcccgttcagagatatggacgatggatctgattcccttggagtgggcctggaccaagagttccgacagccatccagcttacctgaaggattaccagcacccctcgaaaagcgggtgaaggagttggcgcaggccgcccgtgccgccgagggtgagagcaggcagaaattttttacacaagatatcaacgggatactgctggacatcgaggcgcagacccgtgaactgtctagtcaggttcgatccggcgtgtacgcatatttagcctcattcctgccctgctctaaagacgctttgctaaaaagagctagaaagctgcacctctacgaacagggaggacgccttaaagagccattacagaagctgaaagaagcaattggccgggcaatgcctgaacagatggccaagtaccaggatgagtgtcaggcccacactcaagcaaaagtcgccaaaatgctcgaggaggagaaggacaaagagcagagagaccgcatttgcagcgacgaagaagaagacgaggagaagggcgggaggaggatcatgggtccacgtaagaagttccagtggaacgatgaaattagggaactgctgtgccaagtggtgaaaataaagctggaaagccaggacctagagcggaataacaaagctcaggcatgggaagattgcgtcaagggtttcttggacgccgaggtcaaacctctttggcctaaagggtggatgcaggcgcggactctgtttaaagagagcagacgcggccatggacatcttacgagtatcttagctaaaaaaaaagtgatggcgccctccaagatcaaggtaaaggaaagctcaacgaagcccgacaagaaagtttctgtacctagcgggcagattggcggccctatcgccctcccaagcgaccatcagaccggaggtctgtccattggcgccagtagccgagagctgcctagccaggccagcgggggactcgcaaaccctccccccgtgaatcttgaggattctcttgacgaggacttgatcagaaacccggcctcttccgttgaggccgtcagtaaggaattagccgccttgaactcccgggcagcgggcaattcagagttcaccctgccagccccttccaaggcccctgcagaaaaggtaggtggggtactgtgtacagaggaaaagcgaaatttcgccaaaccgtccccctcagccccacctcccgcgtcatcattgcagagcccactaaatttcttggccgagcaggcattggcactcggacagtcatctcaggagaagaagcccgaatcatctggatataaagaactctcttgccaggctccactcaacaaggggctcccagaagtgcaccagtccaaggccaaacatcacagcttgccgcggacctctcacgggccccaggttgcagttccagtgcctggccctcaggtgaaggttttccacgctggtactcaacagcaaaagaattttactcccccaagcccattcgccaacaaactgcagggccctaaagcctcgcctactcagtgccaccggagcttactacagcttgttaagaccgccgccaaagggcagggctttcatccctctgctccagctacatctgggggtctctctgcctcatctagcagctcccacaagacacctgctagctcgtctagtgccttgtcgcatccggcgaaaccccatagtgtgagcagcgctggctccagctataaaaacaacccttttgccagcagcattagcaaacatggagtgtcctcaggcagtagcagcagtggcgggacccctgtgcaatcgagcgtgtccggtagcctcgtgcccggcatccagccaccctccgtggggcaagccaccagcagaccggtgccatcgtccgcaggcaagaaaatgcccgtatcgcagaaactcacgctcgtagccccaccaggtgggccgaacggggactcttcagggggaacgcagggtgtggccaagttattaaccagtccctccctgaaaccttcagctgtgagttcagtgacctcctccaccagtttgagtaagggggctagtggcaccgtgctgctggcaggtagttctctaatggcgagtccttataaaagcagctccccaaaattgtctggagccatgtcctccaattccctgggcataattacacccgtgccgatccctgttcatgtgcttagtttcagcgcagattcatccgcaaaggcgggagtgtccaaagacgccatagtcacagggccagcgcctggatctttccaccacggattaggccactcactgctggccggacttcattccagccccccacacgccgcaccactgcctcacgccgcagtgcctacacatatcccacagagtctgcccggtgcaagccaactacacggaaaagggcccgcagtaccacgtaaattatag

SEQ ID NO: 35430 - DNA, 3405 bp, Artificial Sequence
  derived and/or modified sequence
atgagcgagccccaccgggtgcagttcaccagcctgcccggcagcttgaacccagcatttcttaagaagagtcgcaaagaagaagctggagctggcgagcagcaccaggactgcgaaccagctgcagctgcagtgaggatcaccctcaccctgttcgaacccgaccacaaacgatgtcccgagtttttttatcctgagttggtgaagaatatcagaggaaaagttaagggcttacaacctggcgacaaaaaaaaagacctcagtgacccgttcaatgacgaagagaaggagaggcataaagtagaggcgctggcccggaagtttgaggagaaatacggtggcaaaaagagacggaaggaccggattcaggacttaatcgacatgggttacggctatgacgagagtgactctttcatcgataactctgaggcgtatgacgagcttgtgcccgcaagcctgacaaccaagtatggaggcttttacattaatagtggaactcttcagtttcggcaagcctccgaatctgaggatgacttcattaaggagaaaaaaaagaaatcccccaagaagcggaaactgaaagaggggggcgagaaaatcaagaagaagaaaaaggatgatacttacgacaaggagaagaagagcaaaaaatcgaaattctccaaggcaggctttaccgcccttaacgcttccaaagagaaaaagaaaaagaagtattctggggctctaagtgtgaaggagatgttgaaaaagttccagaaagaaaaagaagcccagaagaagcgggaggaggagcacaaaccggtggctgtaccatctgcagaggcccaaggtctgcgcgagctggaaggtgcctcagaccccctgctaagcctcttcggctccacaagcgacaacgatctgctgcaggctgctaccgctatggacagccttactgacctggacttggaacatttgctgtccgaaagccccgagggatctccctttcgggatatggatgatggaagcgattcattgggagtggggctggaccaggagttcagacaacccagttctctccccgaaggcctccccgcccctcttgaaaaaagagtgaaggagctcgctcaggccgcaagagcagcggaaggcgagagccggcaaaagttcttcactcaggacattaatggtatcctcctggacattgaagcccagaccagggagctgtcaagccaggtgcggtcaggagtttacgcttacctggcatcctttctgccttgctcaaaagacgctcttcttaagcgagctaggaagctgcatctgtacgagcagggagggcgactgaaggagccactccagaaattgaaggaagcaatcggccgggctatgcccgaacaaatggcaaaataccaggacgagtgtcaagcacatacacaggccaaagtagcaaagatgcttgaagaggagaaagacaaggagcagagggatcggatatgctccgacgaggaggaagatgaagaaaaaggcgggagaagaattatgggtcctcggaagaaattccagtggaatgatgagattcgtgaactgctctgccaagtggttaagatcaaactcgagagccaggacctggagcgaaacaacaaagcgcaggcttgggaggattgcgttaagggtttcctcgatgctgaggtcaaacctctctggcctaaggggtggatgcaggccagaaccttgttcaaagagtctagacggggacatggtcacctgacatctatactcgccaagaagaaagtgatggcgccgagtaaaatcaaagtcaaagagtcgtccaccaaacccgacaagaaagtgtccgtaccttctggacagataggaggcccgatcgccttaccatccgaccatcagactggtggtttgtctatcggcgcatcaagccgcgagctgccaagtcaggccagcgggggcctggccaatccccctccagtgaatctggaagactctctggatgaggatctaatcaggaatcctgcctcttccgtagaggcagtgtctaaggagcttgccgcacttaatagtagagccgctggaaattctgagttcactcttcccgccccttccaaggctccagccgagaaggtcggcggggtactgtgtaccgaggagaagaggaacttcgctaagccatctccctcggctcctccgcctgcctcgagcctccagtcccccctcaactttctggccgaacaggcccttgcccttgggcaaagctctcaggagaaaaagccagagagcagtggatataaagagctgagctgccaagcgccgctgaacaaaggtcttcctgaggtgcaccagagtaaagcgaagcaccactctctgccacgtacatctcacggacctcaggtagccgtgccggtacccggtccacaagttaaggtgttccatgcagggactcaacaacagaagaacttcacaccacctagtccctttgcgaacaagctgcagggcccgaaagccagtcccactcagtgccaccgaagcctccttcagctagtgaagacagcggccaaaggtcaggggttccacccctccgcccctgccacttctggaggcctctctgcttctagctcttctagccacaagacgccagccagcagctctagcgccttatcccacccagctaaaccacacagtgtgtcatccgcaggtagtagctataagaacaatccattcgcaagttctatatctaagcacggggtctcatccggcagctccagcagcggaggcacacctgtgcagagtagcgtttccggatcactggtgccaggtatccagcccccaagtgtcgggcaagctacaagcaggcccgtgccatcctcagccggcaaaaagatgccagtgtcacagaagctgacattggtcgcgcccccaggtgggcctaacggtgatagcagcggaggcacacagggggtggccaaactccttacttcaccctccctcaagccgagtgccgtgagctctgtgactagtagcaccagcctgtccaagggcgccagcgggactgtgctgctggccggctcttccctgatggcatcgccctacaaatctagcagcccgaagttgagtggtgccatgtccagtaattctctcgggatcattacgcccgtgcctattccagtccacgtgctgagtttttccgccgattcatctgcaaaggctggcgttagcaaagatgctatagtgaccgggcctgcccccggatcattccatcacgggttgggccactcactcctcgctggcctgcatagtagtccgccacatgcggcgccactccctcacgctgcggtgccaactcatataccgcagtcattgccaggggcctctcagctccacggcaaaggacccgctgtcccaagaaaactttag

SEQ ID NO: 35431 - DNA, 3405 bp, Artificial Sequence
  derived and/or modified sequence
atgtccgaaccccaccgagtgcaatttacttccctgccaggatctctcaaccccgcatttctgaaaaaaagcagaaaagaggaggccggtgcgggagagcagcatcaagactgcgagcctgcggctgctgccgtgaggatcactctcacactgttcgagcctgaccacaaaagatgccccgaatttttctatcccgaactggtcaagaacattagagggaaggtaaaggggctgcagcctggcgacaaaaagaaagacctgagcgatccctttaatgacgaagagaaagaacggcataaggtggaggccttagccagaaaattcgaggaaaagtacggcggaaagaagcgtagaaaagacaggatccaagatctgatcgacatgggttatggatatgatgaatccgactcctttatcgataactccgaggcgtacgatgagctcgtgcctgcaagtcttacaactaaatacggcggattctatatcaacagcggcacacttcaatttaggcaggctagcgaatcggaagatgattttatcaaagagaaaaaaaagaagtcccctaaaaagcgtaagctgaaagaagggggagaaaagattaagaagaaaaagaaggatgatacctacgacaaggaaaagaaatctaaaaagtcgaaatttagcaaggctgggtttacggccctgaatgctagcaaagaaaagaagaagaagaaatactccggcgctctgagcgtaaaggagatgctcaagaaatttcagaaggaaaaagaagcgcaaaaaaagcgcgaagaagaacacaagcctgttgcggtcccttcagcagaagctcagggtctcagagaactagaaggcgcttctgatccactcctgtcactgtttggctctacatcagacaatgatctgctacaggccgctacggccatggatagcctgaccgatctagacctggaacatcttctgtccgagagtcctgagggctctccattcagagacatggacgatggaagcgactcgcttggggtgggactcgatcaggagttccgccagccatctagcctgcccgaggggcttccagcgccactggagaagagggtcaaagagctggcccaggcggcaagggctgcagaaggtgagtcaaggcagaagttcttcacacaggatattaacggcatactgcttgatattgaagcccagactcgagagttgagcagccaggtgcgttctggtgtatacgcttacctggcgtcctttctgccgtgtagtaaagacgcgctgctaaaacgtgcgagaaaactacacctttatgaacaggggggtagacttaaggagccattgcagaagctgaaggaggctatcggtcgcgcaatgccagagcagatggctaagtatcaggacgagtgccaggcccacacccaggccaaggttgctaagatgttggaggaggagaaggacaaggaacagagggaccgaatctgtagcgatgaggaggaggatgaggagaagggaggcaggaggattatgggaccccgtaagaagttccagtggaacgatgagatcagggaattattgtgccaggtggtaaaaattaagctcgagtcacaggaccttgaacgtaacaataaggcgcaagcttgggaagactgtgtgaagggcttcctagacgcggaggtgaagccactctggccaaaagggtggatgcaggctcggacactattcaaggaatcccgcagaggacatggacacctgactagcatattagccaaaaaaaaggtgatggctcccagtaaaattaaggtaaaagagtctagcacgaagccagataagaaggtatccgtgccttccggtcagattggcggtccaatagcactgccttctgatcaccagacgggaggactctcgatcggagccagctctagagagctcccaagtcaggcctcaggcggtcttgctaatcctcctcctgtgaacctggaggattcgttggacgaggacctcattcgcaacccagcctcctcagtcgaggccgttagtaaggagctggccgcactaaactcaagggccgcaggaaatagcgagtttactcttcctgccccaagcaaagctccagcagagaaggtgggcggtgtcctctgcaccgaagagaagcgcaacttcgccaaaccaagcccatcagcgcctccacccgcttcaagtctccagtcgcccttgaactttcttgccgagcaggctctggctttagggcagtcctctcaagaaaagaagccagaatccagcggatataaggaacttagttgtcaggccccattgaataaaggtcttcccgaggtccaccagtctaaggccaagcaccactccctgcctcgcacctcacatggcccacaggtggctgtgcccgtgcctggccctcaggtcaaggtgtttcacgccggaacacagcagcagaagaatttcacgccaccttctccttttgccaataaactgcagggccctaaggcctcgcccacccagtgccataggagcctgctgcaacttgtgaagactgctgctaaagggcagggctttcatcccagcgccccagccacctctggaggtcttagtgcgtcttcatctagttcccataagaccccggcttcctccagctccgctctgtctcatccagccaagccgcattcagtaagcagcgccggatcaagttacaagaataacccgtttgcatcttcgatcagcaaacacggcgtgagtagtgggagctctagcagcggtggcacacccgtgcagtcatccgttagtggatcacttgtgccgggaatccagcctccaagcgtaggtcaagcaacaagcagaccagtgcccagttccgccggtaaaaagatgccagtgagccaaaagctgacccttgtcgcacccccagggggtcctaacggtgacagctcggggggtacacaaggagtcgcaaagctgctgacgtctccctctctgaaaccctctgctgtttcctccgtcactagttcaacttccctctccaagggggcatccggcacagtactcttggccggaagctcactcatggccagcccctacaaatcctctagcccaaaactctccggcgctatgagctctaacagcctgggtatcatcaccccggttccaattccggttcatgtgctttcttttagcgcagattcttccgcaaaggctggagtgagcaaagacgcaattgtcactggccctgctcctggaagttttcaccacggcctaggccactctctcttggccggtctgcatagtagtcccccacacgctgctccccttccacacgcagctgtccccactcacatcccccaatcactaccaggagccagtcagcttcacggtaagggcccagcggtcccacggaaactctag

SEQ ID NO: 35432 - DNA, 3405 bp, Artificial Sequence
  derived and/or modified sequence
atgtccgagccacatagggtgcagttcacaagcctcccaggtagcctgaaccctgcctttctgaagaagagccggaaagaggaggctggcgcaggggaacagcatcaggattgcgagcctgctgccgcagccgtgcgcatcactcttacactttttgagccagaccacaagaggtgtccagaatttttttatcccgaactggtgaagaacatacggggaaaggtaaaaggtcttcagcctggggacaaaaagaaggatcttagcgaccctttcaatgacgaagaaaaagaacgccacaaggtggaagccctagctagaaagttcgaggagaaatacggaggtaaaaagcggaggaaagaccgtatccaagacctcatcgacatgggctacgggtacgacgaaagcgacagctttatcgacaactctgaggcatacgacgagctggtgcctgcaagtctcaccaccaagtatggaggcttctatattaattctggcacgctgcaatttaggcaggcaagtgaatcagaggacgacttcatcaaggaaaaaaaaaaaaaatcccccaaaaaaagaaaactgaaggaaggtggagaaaagataaaaaagaaaaagaaggatgatacgtacgacaaggagaagaagtcgaagaaaagtaaattcagtaaggctggcttcacggccctgaacgcttccaaggagaagaaaaagaaaaagtactctggggcactgagtgtaaaggagatgctcaagaagttccagaaagaaaaggaagcccagaaaaaaagagaggaggaacataagcccgtcgcagttccatccgcagaagcccaggggctaagggagctcgagggagcgtcagatccactactgagcctgtttgggagcacaagcgacaatgaccttctgcaggcagcgactgccatggacagcttgacggacctagacctggagcacttactgtcagaatctcctgaagggtcaccattccgagatatggatgacggctctgactctttaggcgttggcctggaccaagagtttagacagccttcctctctgcccgaaggactgcctgccccactagaaaagcgcgtgaaagagttggcgcaggctgcacgagccgctgagggcgaaagccgccaaaaatttttcactcaagatataaatggaatcctccttgacatcgaggcccagaccagagaactcagctcccaggtgagaagcggggtgtacgcttatttggcctctttccttccctgcagcaaagatgctttactgaagcgggctcggaagcttcacctgtacgaacaggggggacgcctgaaggagccgctgcaaaagcttaaagaagccattggcagggctatgcctgagcagatggccaaataccaggacgagtgccaggcccatacacaggccaaggtcgctaagatgctggaggaggagaaagacaaggaacaaagggacagaatttgtagcgacgaggaggaggacgaagagaaaggtggcaggaggattatggggccacgaaaaaagtttcagtggaacgacgaaattcgagaactcctgtgccaggtggttaagatcaagctggaatcccaggacctcgaacggaataataaagctcaggcctgggaagattgcgtgaaagggtttctggatgccgaggtgaagcctctatggcccaaaggttggatgcaggctagaacactctttaaagaaagcagacggggacatggccatttaacatccattctcgccaagaaaaaagtaatggctccctctaaaatcaaagtgaaggagtcctcaactaaacccgacaagaaggtttccgtcccatcaggccagatcgggggaccgatcgccctgccatccgatcaccagactggtggactctctatcggcgcttctagtagggaactgcccagccaggcgtccgggggactcgctaatcctccacccgttaacctcgaggactccctggatgaggacctgattagaaaccctgctagctcagtggaggccgtgagcaaggaacttgcggctctgaactccagagctgcgggaaacagcgagttcaccttaccagctccgagcaaggctccagcagagaaagtgggtggtgtgctgtgtactgaagaaaagcgaaacttcgcgaagccttccccctccgcaccccctccagcaagctctctgcagagtcctctgaatttcttggccgaacaggccctagccctgggacagtcatcacaggaaaagaaacctgagtcctctgggtataaagaactgtcttgccaagcccctctgaataaggggctcccagaggtgcaccagtctaaagccaaacatcattctctccctcggacttcacacgggcctcaggttgcggttcccgtgcctggaccacaggtcaaagtatttcatgccggaacgcagcagcagaagaatttcaccccaccctccccattcgccaacaagctccagggccctaaagcaagccccacacagtgccaccgatcgctgctccaactagtaaaaacagccgcaaaagggcagggctttcatccttctgcgccagcaactagtgggggtctttccgctagttcttcctcctcacacaaaacaccagcaagttccagcagtgctctttcacaccccgctaaaccacattccgtgtcgagcgccggtagctcatataaaaacaaccctttcgcatccagcatatctaaacacggcgtctcttcaggatcttcatcctcagggggaaccccagtgcagagtagcgtttccggaagccttgtgcccggaatccagccaccctccgtgggtcaggcaaccagcaggccagttccgtcctccgctggcaaaaaaatgcccgtttcacaaaagctgacattggtggcaccgccaggcggtcccaatggggatagctctgggggtacccagggcgtggctaagctcctgacgagcccctccctcaaaccctccgcagtgagctcagtgacctctagcacttctctatctaagggcgcttccggaacggtgctgctggctggcagcagccttatggcctcaccttataaaagctcttctcccaagctcagtggggcaatgagcagcaactctctggggataatcacacccgtgcctattcctgtgcatgtgttaagtttttctgcagactcctcagcaaaggcgggtgtcagcaaagacgcgatcgtgactggaccagccccagggtcctttcatcacggcctcggacactcgctcctggcaggcttgcactcatctccccctcacgccgctccactcccccatgctgccgttcccacccacatcccgcagtccctccccggagcctctcagctccacggcaaaggacctgcagttcctaggaagctgtag

SEQ ID NO: 35433 - DNA, 5972 bp, Artificial Sequence
  derived and/or modified sequence
gtcccgcgccgcaagttctcctggggcgaccggaggctgctcccccgaccccctggtgtccccggagtggctgcgcggacgtcgagttggcatttcttcgcttcctcctgggccggcgcgcggcgcggcacaccaggctcccctgggctcggggacccggccatgggccgaggcgcgggccgcccgcccgctgggagccacggcttagcagccgaccgctagctgcgccgccgcccggggaccggcatgaggaccgccgcggggggacgtctgcggcccgcgtcggcgctggggacaaagaagccatgcagtgacacccgctaagacttgttggtagccatgtcggagccccacagggtccagttcacctctctcccaggttccctgaatcctgcgtttttgaagaagtcccggaaggaggaggctggggcaggagaacagcatcaggactgtgagccggctgcagcagctgttcggattacactcaccctctttgaaccagatcacaaacgctgcccagagttcttctacccagagctggtgaagaatatccgagggaaggtaaaaggccttcagcctggagataagaagaaagatctgtcagatcctttcaatgacgaagaaaaggaaaggcataaagtagaggcccttgcccgaaaatttgaagaaaaatacggtggaaagaaacgtagaaaagaccgaatacaggacttgatcgatatggggtatggttatgatgaatccgactccttcatcgataactctgaggcgtatgatgagcttgttcctgcttctttgactacgaagtatggaggattttacattaactcgggaaccctgcagtttagacaagcatcagagtctgaagatgacttcattaaagaaaagaagaaaaaatctccaaagaagcggaagttgaaggaaggtggtgagaagataaagaagaagaaaaaagatgacacttatgacaaggagaagaaatcgaaaaagtccaagttttccaaagccggcttcacagccctcaatgccagtaaggagaagaagaagaagaaatattctggggctttaagcgttaaagagatgctaaagaaatttcagaaagagaaagaggctcagaaaaaaagggaggaggagcataagcctgttgcggtcccatcagcggaagctcagggcctgcgggaactggagggtgcctctgaccccttgctctcactctttggctctacttctgacaacgacttgctccaggcggccactgccatggactcgctgacggatttggacttggagcatctgctcagtgagtctccagaaggaagtcccttccgagatatggatgatggaagtgattcccttggggtgggattggaccaggaattcaggcagccctcttctctccccgaaggcctgccagcacccctggagaagcgcgttaaggagctggctcaggctgccagagctgctgagggggagagcagacagaagttcttcacccaggatattaatggaatcctattagacatagaggcgcagactcgggagctgagcagtcaggtccgctctggggtgtatgcctatcttgcgtcattcctgccctgcagcaaggatgccctgctcaagcgtgctcggaaacttcacctctatgaacaggggggccgtctgaaggagcctctccagaagctcaaggaagccattggcagggcgatgccagagcagatggccaagtaccaggacgaatgccaggcacacacgcaggcaaaggttgccaagatgctggaagaggagaaagacaaggagcagagggaccggatttgttcggatgaggaagaagatgaagaaaaagggggcaggaggataatgggacctcggaagaagttccaatggaatgatgagatcagggagctactgtgccaggtggtgaagatcaaactggagagccaggacctggagaggaacaacaaagcccaggcttgggaggactgtgtgaagggctttctggatgcggaagtcaagcccctctggcccaaaggctggatgcaggccagaactctgtttaaggagagcagacgaggccatgggcacctgacttcaatcctggccaagaagaaagttatggccccttctaaaatcaaggtgaaggaatcgtctacgaagcctgataaaaaggtttctgtcccatcaggacagattggtggccccattgctttgccctcagatcaccaaacaggaggcctgagtattggggcctcgagcagggagctcccatcccaggcatcgggcggccttgctaaccctcctcctgtcaacctggaggactcattggatgaagacttgatccgcaatccagcctcctcggtggaagccgtgtccaaggaattggctgcattgaatagcagagcagctgggaactctgaattcacactgcctgcaccctcaaaagcacctgcagaaaaagttggaggcgttttatgtacagaagaaaaaaggaactttgcgaagcctagtccttctgctccaccaccagctagctctctgcagtcacccctcaattttctggcagaacaggctctggcactggggcagtcctctcaggagaaaaaaccagagagttctggctacaaagagctgtcctgccaggctcccctcaataagggcctgccagaagtacatcagtccaaagctaagcaccacagcttgccacggacgtctcacgggccccaagtggcagttcctgtgcctggcccccaggtcaaagtctttcatgccggcactcagcagcagaaaaacttcacgcccccatctccatttgccaataagctccaaggcccaaaggcttctcccacacagtgtcatcgttccctcctgcagttagtgaagacagcggccaaaggccagggcttccatccctctgcaccagccacctcaggaggcctgtcagcctccagcagcagctctcacaagaccccagcctcgtcctcttctgccctgagccatccagcaaagccacattcagtcagctctgcaggctcatcttacaagaataatccctttgccagctcaatctccaaacatggggtttcttctggcagctcttcctcgggaggaacaccagtccagagttctgtttctgggagcctggtccctggcatacagcctccctccgtgggacaggccaccagccgacccgtcccaagttcagcagggaaaaaaatgcctgtttcccagaagttgactctggtagcccctccaggcggtccaaacggagattccagtggtgggacccagggagtggcaaagttgctgacctcgccgtccctaaagccctctgcagttagtagtgtgacatcgtctacctccttgtcaaaaggagcgagtgggactgtgctgctggccggctcctctttgatggcttcaccctacaaatccagcagcccaaagctgtctggggccatgagctcgaactccttgggaattataacccctgtccctattcctgtccatgtgctctccttcagcgctgactcctctgccaaagcaggggtctccaaggatgccatcgtcacaggccctgcccccgggtccttccaccatggccttggccacagtcttctggctggcttgcactccagcccgccccatgcagcgcctctcccacacgctgcggtgcccacccatatcccgcagagtctgccaggtgcttctcagcttcacgggaaagggcctgctgtaccacggaaattgtgaccgcttcagaggcaaggcttgccacttgggtctgggtggaatcagaacgtgcaggtctcccaggatgtacactcactgcgccctttctgctgcttggtgttcttctggaggagcgtgagttctcagcggagcgcttctcggcacttctgatgtgcctcccatggagggagccgggcccttgctgctcaggaggtgcagactgccccgtgctctgggccttgcagctctgtcgctagacggttgttagaggggcagctctaggctggggcttgcgctgggccgtggtgggaggcacagtgtttacaggctctggtggcagagcagttggcacacctgtgggtgaatctgcctgatcccctggcatttggtcagagtacctcagagcaccccactgctcaggggctccttctggctgcagtaagctccctggatggtcacagtgccgccccatccccaggctgtgtgctcaaagcggacaaaactcaggccagagccacagctgggagacctgcactgtccctgcgaaatactaagaacacctagggtgtgctcactgtgggggccagtttctcctcggaacatgacaatgaagctcttttagagaaaagacctttgtagattcaacaattatgataggatttttacagacacctattttgggctcagttttcatcattaccattaaatgcattggatagaaggggactgttcttcacacatcatattataggaagacataattccagtgcctttatggtggagcagaattcgacaacacatgtccattcagccctctgaatggatctgagacgaagacctttttaaagatatgtctgtattgaagagaaagccagttttgagttttttacacttgcacatcattatctgtgccgtcctgactagaaggttgtctgggcccccaaattccaagtcccagtatagccagggctcccattttgtttttccagagttcgtggaggtggactgcagagcccagagcccttcatctctctgagggtcaaggataccaggggtcccaagtcacagatagacattccagtttgtattcttaggaatcattcttaggcagtgcggcagaagcaggcctctgtgaagtgtctgccgggtagaaataggccttgaagtcctggggctctccaggcagtggggttatgtgtcgactgaagggtgatgtgcagaagagcttggagagtggatcagagagactaggacagttactgcagagctcctaagtcaccactcaaccagtggctgtttcacaaggatttgagggcacttgcctgtcttgtgaggtctgtgccacaaggtgagtctgaactgactgctccagctaagtgatcaggcacgttgagagtatacggtgtcctcagcacatacacctgtgggaaaacggaccgctcttggctcctgactcccagggtacagcgcccagtaactcatccttcattcagaggtttgctggccttcccggtttcccaaggagcaagacctctgtccgccctttggcccggcctctgctctgtctcctttttttacataagaaccaatccgtgtttcacattgggctaagtggattccttatccctttgttatatatattttttgcaacttggatttccagtttgtttacagagtagtcttaggtagtagcaaaagagccaaagaagagatttgtattgctgagctcaaagccaagcagaggccggcagtggaggctgagcagggactctccaggcttctctgcccataaacacccgggtcccaggccctccttcctttccctttggtgctccctcctccccacgtaccattgcgcgtgcagctggagcagaataccctcatttttaggaatctagtgatgcctcttgcctcagggaaacgtttctttgatggggagtttgagatttcttttccttgtttatgctttatttgtggtaatgaaagagcgaatgactgaacagccatggcaaggcagacctacaggcgaggccgcagcagagggtggggcagagcagcctcggggtctgggggctgcaggggtttccctggcgcagcgaaagtctctgagcacttaccgggcgtgaccgtttcttaggtgtgagaggggctgtggcttttgtgcagcgactatgttggtgttaggggtggtgtggagattgttaatcttgtataaagcaattcaataaattgtttcaaggtttccaaaa

SEQ ID NO: 35434 - DNA, 6336 bp, Artificial Sequence
  derived and/or modified sequence
ttctgtgaacatttggaattctgtattcaaaatctattttgaccattcccaagtgattttgaaggtctttggcatgtcataatttgttattttgtcaaggccagtgtttgggtgtgagagtggtgcacagggcaggagtgtgtaactttgttaggaagtgagcctagccacaccctcctgagtcactggttctttactatcctggggtaggcaatatcttttgttcagctgataaaagctttgtcattgtgaagattggctcccaatgataggaaactgctggtgatgaaaataaaggggtcttaaagattattctcagccagaaaaaataagtgttagacaaattaaatggaaaataattaatattttagtagtctttacaatttggaggtctaaggctctgtcagcatgggttctttaaggtcaaggatctaggatacacatgcacaggaaaaaagactggaagtatgctaagcagtgactatctctgaatgattgtgaaaaaattttaggatgaataagcagaaaaaaacaataaatgacaaaatataacaatggagttttcttgacaatgaaattctcttaaacttaaatctctttaattaggcaggtaaactattttatcatcttcgtttgacctggcccttcttttcaatgttaacagaagccatgcagtgacacccgctaagacttgttggtagccatgtcggagccccacagggtccagttcacctctctcccaggttccctgaatcctgcgtttttgaagaagtcccggaaggaggaggctggggcaggagaacagcatcaggactgtgagccggctgcagcagctgttcggattacactcaccctctttgaaccagatcacaaacgctgcccagagttcttctacccagagctggtgaagaatatccgagggaaggtaaaaggccttcagcctggagataagaagaaagatctgtcagatcctttcaatgacgaagaaaaggaaaggcataaagtagaggcccttgcccgaaaatttgaagaaaaatacggtggaaagaaacgtagaaaagaccgaatacaggacttgatcgatatggggtatggttatgatgaatccgactccttcatcgataactctgaggcgtatgatgagcttgttcctgcttctttgactacgaagtatggaggattttacattaactcgggaaccctgcagtttagacaagcatcagagtctgaagatgacttcattaaagaaaagaagaaaaaatctccaaagaagcggaagttgaaggaaggtggtgagaagataaagaagaagaaaaaagatgacacttatgacaaggagaagaaatcgaaaaagtccaagttttccaaagccggcttcacagccctcaatgccagtaaggagaagaagaagaagaaatattctggggctttaagcgttaaagagatgctaaagaaatttcagaaagagaaagaggctcagaaaaaaagggaggaggagcataagcctgttgcggtcccatcagcggaagctcagggcctgcgggaactggagggtgcctctgaccccttgctctcactctttggctctacttctgacaacgacttgctccaggcggccactgccatggactcgctgacggatttggacttggagcatctgctcagtgagtctccagaaggaagtcccttccgagatatggatgatggaagtgattcccttggggtgggattggaccaggaattcaggcagccctcttctctccccgaaggcctgccagcacccctggagaagcgcgttaaggagctggctcaggctgccagagctgctgagggggagagcagacagaagttcttcacccaggatattaatggaatcctattagacatagaggcgcagactcgggagctgagcagtcaggtccgctctggggtgtatgcctatcttgcgtcattcctgccctgcagcaaggatgccctgctcaagcgtgctcggaaacttcacctctatgaacaggggggccgtctgaaggagcctctccagaagctcaaggaagccattggcagggcgatgccagagcagatggccaagtaccaggacgaatgccaggcacacacgcaggcaaaggttgccaagatgctggaagaggagaaagacaaggagcagagggaccggatttgttcggatgaggaagaagatgaagaaaaagggggcaggaggataatgggacctcggaagaagttccaatggaatgatgagatcagggagctactgtgccaggtggtgaagatcaaactggagagccaggacctggagaggaacaacaaagcccaggcttgggaggactgtgtgaagggctttctggatgcggaagtcaagcccctctggcccaaaggctggatgcaggccagaactctgtttaaggagagcagacgaggccatgggcacctgacttcaatcctggccaagaagaaagttatggccccttctaaaatcaaggtgaaggaatcgtctacgaagcctgataaaaaggtttctgtcccatcaggacagattggtggccccattgctttgccctcagatcaccaaacaggaggcctgagtattggggcctcgagcagggagctcccatcccaggcatcgggcggccttgctaaccctcctcctgtcaacctggaggactcattggatgaagacttgatccgcaatccagcctcctcggtggaagccgtgtccaaggaattggctgcattgaatagcagagcagctgggaactctgaattcacactgcctgcaccctcaaaagcacctgcagaaaaagttggaggcgttttatgtacagaagaaaaaaggaactttgcgaagcctagtccttctgctccaccaccagctagctctctgcagtcacccctcaattttctggcagaacaggctctggcactggggcagtcctctcaggagaaaaaaccagagagttctggctacaaagagctgtcctgccaggctcccctcaataagggcctgccagaagtacatcagtccaaagctaagcaccacagcttgccacggacgtctcacgggccccaagtggcagttcctgtgcctggcccccaggtcaaagtctttcatgccggcactcagcagcagaaaaacttcacgcccccatctccatttgccaataagctccaaggcccaaaggcttctcccacacagtgtcatcgttccctcctgcagttagtgaagacagcggccaaaggccagggcttccatccctctgcaccagccacctcaggaggcctgtcagcctccagcagcagctctcacaagaccccagcctcgtcctcttctgccctgagccatccagcaaagccacattcagtcagctctgcaggctcatcttacaagaataatccctttgccagctcaatctccaaacatggggtttcttctggcagctcttcctcgggaggaacaccagtccagagttctgtttctgggagcctggtccctggcatacagcctccctccgtgggacaggccaccagccgacccgtcccaagttcagcagggaaaaaaatgcctgtttcccagaagttgactctggtagcccctccaggcggtccaaacggagattccagtggtgggacccagggagtggcaaagttgctgacctcgccgtccctaaagccctctgcagttagtagtgtgacatcgtctacctccttgtcaaaaggagcgagtgggactgtgctgctggccggctcctctttgatggcttcaccctacaaatccagcagcccaaagctgtctggggccatgagctcgaactccttgggaattataacccctgtccctattcctgtccatgtgctctccttcagcgctgactcctctgccaaagcaggggtctccaaggatgccatcgtcacaggccctgcccccgggtccttccaccatggccttggccacagtcttctggctggcttgcactccagcccgccccatgcagcgcctctcccacacgctgcggtgcccacccatatcccgcagagtctgccaggtgcttctcagcttcacgggaaagggcctgctgtaccacggaaattgtgaccgcttcagaggcaaggcttgccacttgggtctgggtggaatcagaacgtgcaggtctcccaggatgtacactcactgcgccctttctgctgcttggtgttcttctggaggagcgtgagttctcagcggagcgcttctcggcacttctgatgtgcctcccatggagggagccgggcccttgctgctcaggaggtgcagactgccccgtgctctgggccttgcagctctgtcgctagacggttgttagaggggcagctctaggctggggcttgcgctgggccgtggtgggaggcacagtgtttacaggctctggtggcagagcagttggcacacctgtgggtgaatctgcctgatcccctggcatttggtcagagtacctcagagcaccccactgctcaggggctccttctggctgcagtaagctccctggatggtcacagtgccgccccatccccaggctgtgtgctcaaagcggacaaaactcaggccagagccacagctgggagacctgcactgtccctgcgaaatactaagaacacctagggtgtgctcactgtgggggccagtttctcctcggaacatgacaatgaagctcttttagagaaaagacctttgtagattcaacaattatgataggatttttacagacacctattttgggctcagttttcatcattaccattaaatgcattggatagaaggggactgttcttcacacatcatattataggaagacataattccagtgcctttatggtggagcagaattcgacaacacatgtccattcagccctctgaatggatctgagacgaagacctttttaaagatatgtctgtattgaagagaaagccagttttgagttttttacacttgcacatcattatctgtgccgtcctgactagaaggttgtctgggcccccaaattccaagtcccagtatagccagggctcccattttgtttttccagagttcgtggaggtggactgcagagcccagagcccttcatctctctgagggtcaaggataccaggggtcccaagtcacagatagacattccagtttgtattcttaggaatcattcttaggcagtgcggcagaagcaggcctctgtgaagtgtctgccgggtagaaataggccttgaagtcctggggctctccaggcagtggggttatgtgtcgactgaagggtgatgtgcagaagagcttggagagtggatcagagagactaggacagttactgcagagctcctaagtcaccactcaaccagtggctgtttcacaaggatttgagggcacttgcctgtcttgtgaggtctgtgccacaaggtgagtctgaactgactgctccagctaagtgatcaggcacgttgagagtatacggtgtcctcagcacatacacctgtgggaaaacggaccgctcttggctcctgactcccagggtacagcgcccagtaactcatccttcattcagaggtttgctggccttcccggtttcccaaggagcaagacctctgtccgccctttggcccggcctctgctctgtctcctttttttacataagaaccaatccgtgtttcacattgggctaagtggattccttatccctttgttatatatattttttgcaacttggatttccagtttgtttacagagtagtcttaggtagtagcaaaagagccaaagaagagatttgtattgctgagctcaaagccaagcagaggccggcagtggaggctgagcagggactctccaggcttctctgcccataaacacccgggtcccaggccctccttcctttccctttggtgctccctcctccccacgtaccattgcgcgtgcagctggagcagaataccctcatttttaggaatctagtgatgcctcttgcctcagggaaacgtttctttgatggggagtttgagatttcttttccttgtttatgctttatttgtggtaatgaaagagcgaatgactgaacagccatggcaaggcagacctacaggcgaggccgcagcagagggtggggcagagcagcctcggggtctgggggctgcaggggtttccctggcgcagcgaaagtctctgagcacttaccgggcgtgaccgtttcttaggtgtgagaggggctgtggcttttgtgcagcgactatgttggtgttaggggtggtgtggagattgttaatcttgtataaagcaattcaataaattgtttcaaggtttccaaaa

SEQ ID NO: 35435 - protein, 527 aa, Artificial Sequence
  derived and/or modified sequence
MSDTLTADVIGRRVEVNGEHATVRFAGVVPPVAGPWLGVEWDNPERGKHDGSHEGTVYFKCRHPTGGSFIRPNKVNFGTDFLTAIKNRYVLEDGPEEDRKEQIVTIGNKPVETIGFDSIMKQQSQLSKLQEVSLRNCAVSCAGEKGGVAEACPNIRKVDLSKNLLSSWDEVIHIADQLRHLEVLNVSENKLKFPSGSVLTGTLSVLKVLVLNQTGITWAEVLRCVAGCPGLEELYLESNNIFISERPTDVLQTVKLLDLSSNQLIDENQLYLIAHLPRLEQLILSDTGISSLHFPDAGIGCKTSMFPSLKYLVVNDNQISQWSFFNELEKLPSLRALSCLRNPLTKEDKEAETARLLIIASIGQLKTLNKCEILPEERRRAELDYRKAFGNEWKQAGGHKDPEKNRLSEEFLTAHPRYQFLCLKYGAPEDWELKTQQPLMLKNQLLTLKIKYPHQLDQKVLEKQLPGSMTIQKVKGLLSRLLKVPVSDLLLSYESPKKPGREIELENDLKSLQFYSVENGDCLLVRW

SEQ ID NO: 35436 - DNA, 1584 bp, Artificial Sequence
  derived and/or modified sequence
atgagcgacaccctgaccgccgacgtgatcggcagaagagtggaggtgaacggcgagcacgccaccgtgagattcgccggcgtggtgccccccgtggccggcccctggctgggcgtggagtgggacaaccccgagagaggcaagcacgacggcagccacgagggcaccgtgtacttcaagtgcagacaccccaccggcggcagcttcatcagacccaacaaggtgaacttcggcaccgacttcctgaccgccatcaagaacagatacgtgctggaggacggccccgaggaggacagaaaggagcagatcgtgaccatcggcaacaagcccgtggagaccatcggcttcgacagcatcatgaagcagcagagccagctgagcaagctgcaggaggtgagcctgagaaactgcgccgtgagctgcgccggcgagaagggcggcgtggccgaggcctgccccaacatcagaaaggtggacctgagcaagaacctgctgagcagctgggacgaggtgatccacatcgccgaccagctgagacacctggaggtgctgaacgtgagcgagaacaagctgaagttccccagcggcagcgtgctgaccggcaccctgagcgtgctgaaggtgctggtgctgaaccagaccggcatcacctgggccgaggtgctgagatgcgtggccggctgccccggcctggaggagctgtacctggagagcaacaacatcttcatcagcgagagacccaccgacgtgctgcagaccgtgaagctgctggacctgagcagcaaccagctgatcgacgagaaccagctgtacctgatcgcccacctgcccagactggagcagctgatcctgagcgacaccggcatcagcagcctgcacttccccgacgccggcatcggctgcaagaccagcatgttccccagcctgaagtacctggtggtgaacgacaaccagatcagccagtggagcttcttcaacgagctggagaagctgcccagcctgagagccctgagctgcctgagaaaccccctgaccaaggaggacaaggaggccgagaccgccagactgctgatcatcgccagcatcggccagctgaagaccctgaacaagtgcgagatcctgcccgaggagagaagaagagccgagctggactacagaaaggccttcggcaacgagtggaagcaggccggcggccacaaggaccccgagaagaacagactgagcgaggagttcctgaccgcccaccccagataccagttcctgtgcctgaagtacggcgcccccgaggactgggagctgaagacccagcagcccctgatgctgaagaaccagctgctgaccctgaagatcaagtacccccaccagctggaccagaaggtgctggagaagcagctgcccggcagcatgaccatccagaaggtgaagggcctgctgagcagactgctgaaggtgcccgtgagcgacctgctgctgagctacgagagccccaagaagcccggcagagagatcgagctggagaacgacctgaagagcctgcagttctacagcgtggagaacggcgactgcctgctggtgagatggtag

SEQ ID NO: 35437 - DNA, 1584 bp, Artificial Sequence
  derived and/or modified sequence
atgtccgacacgctgacggctgacgtgattggtcggcgtgttgaagtgaacggtgagcacgctactgtgcggttcgctggagtggtccctccagttgccggaccatggctcggagtggaatgggataatccagagcgggggaaacatgatggttctcacgagggcacggtttactttaagtgcagacaccctactggaggtagtttcatacgacctaacaaggtgaatttcgggactgatttcctcaccgctattaaaaaccgatatgtgctggaggatggtcctgaggaggacaggaaagaacagatcgttactattgggaacaagcctgtagaaacaatcggattcgactcaatcatgaagcaacagagccagttgagtaagttacaggaagtatcacttcgcaattgtgccgtgtcttgtgccggggaaaagggaggagtggctgaggcctgtccaaacataaggaaggttgacttgagcaagaacctgctctcaagttgggacgaggtcatccacatcgcagaccagctaaggcatctggaggtgctaaacgtgtcagagaacaaactgaaatttcccagtggctcggtgctaacaggaactttgtccgtattaaaggtccttgtgctgaatcagaccggcatcacttgggccgaggtgctgcgatgcgtggcaggctgtcctggtcttgaagagctgtatctggagtcgaataacatctttatctcagagcgcccgacggacgtgctccaaactgtcaaactattggatctcagctccaaccagctgattgacgagaatcagctctacttaattgctcacctgcctagactggagcagctcatcctgtccgatacaggtatcagctctttgcactttcccgatgccgggatcggatgtaagacctcgatgtttccatcgctcaagtacctggtggtaaatgataaccagatctcacaatggtccttctttaacgagcttgagaagctaccatcactgagagcactttcctgtttgcgcaatccactcactaaagaggataaagaggccgagacagcaagattactcattattgcatcgatcgggcaactcaagaccctgaacaaatgtgaaatcctcccagaagagcgccggagggcagaactcgactaccgcaaggccttcggtaatgagtggaaacaagctggcggtcacaaagaccccgagaagaaccgactctcggaagagtttctgacagctcatccgcggtatcagttcctgtgtctgaaatacggcgcccctgaggattgggaactcaagacccagcagcctctcatgctgaaaaaccaactcttgacacttaagatcaagtacccccaccagctggaccagaaagtgctggaaaaacagttgccaggatccatgacgatccagaaggtgaagggcctgctatcccgcctgttaaaggtgcctgtgtccgatttactgctcagctacgagtctcccaaaaaacccggccgggaaattgagctggaaaacgatttaaaatccctgcagttctactcagtggagaatggtgattgcttactggtgcgatggtag

SEQ ID NO: 35438 - DNA, 1584 bp, Artificial Sequence
  derived and/or modified sequence
atgtctgacacattgacagccgatgtgatcgggcggagggtggaggtaaatggagaacatgctaccgtaagatttgccggagtggtcccccccgtcgcagggccctggctgggggtggagtgggacaacccagagcgcggcaaacatgatgggagtcatgagggaacagtgtacttcaagtgtcgccatcccacaggcggatcatttattcgacctaacaaggttaacttcggcactgactttctgacagcaatcaagaataggtacgtgctcgaggacggacccgaggaggacaggaaagagcagatcgtgaccattggcaacaaaccggtggagactatcgggtttgacagcattatgaagcagcaatcccagctctcaaaactacaagaagtgagtttgcgaaactgcgcagtgtcttgtgccggggaaaagggcggagtggcggaggcctgccccaacattcgaaaagtggacctctccaagaacctgctgtctagctgggacgaagtcatccacatagctgaccagcttagacaccttgaggtcctgaatgtgtccgaaaataaactgaagtttccgagcggaagcgtgcttacaggcacgcttagcgttctgaaggtgttggtactgaaccagactggcatcacttgggccgaagtgttacgctgtgtggcgggctgccccggactcgaggagctatatttggagagcaataatatctttattagtgagcggcctacagacgtactgcagaccgtaaagcttctcgatctatcgagcaaccagttgatcgatgaaaaccaactgtaccttattgctcacctgccgcgcctcgagcaactgatactgagcgatactgggatctcctccctgcactttcctgatgctgggatcgggtgtaagacctcaatgtttccttcccttaaataccttgttgtgaatgataaccagatatcccagtggtcttttttcaatgaacttgagaaactgcctagcctgcgtgccttgtcatgccttcgaaatcctttgactaaagaggataaggaggccgaaacagcccgcctcttgattattgccagtattggacaactaaagacactgaacaagtgcgagattctcccagaagagcgacggagagccgaacttgattatagaaaggccttcggaaacgagtggaagcaggccggtggacacaaggaccccgagaagaatcgcttgtcagaagaatttctgaccgcacatccacgttaccagtttctgtgtctgaagtatggagcccccgaggattgggagctgaagacccagcagccgcttatgctgaagaaccagctgctgacactcaaaataaagtatccccatcaattggatcaaaaagtacttgagaagcagcttccaggaagcatgaccatccagaaagttaagggcttgctctctaggctgttaaaagtcccggtctccgacctcttgctgtcgtatgaatcccccaagaaaccaggacgggagatcgaactcgagaacgatcttaaaagtctccaattttatagtgttgagaacggagactgccttctggtgcggtggtag

SEQ ID NO: 35439 - DNA, 1584 bp, Artificial Sequence
  derived and/or modified sequence
atgtctgacaccctgacagcagatgtgattggccggcgggtggaggtgaatggagagcacgccaccgtgcgctttgctggggtggtgccccctgtggccggcccctggctgggcgtggagtgggacaaccctgagcggggcaagcatgatggcagccatgagggcaccgtgtacttcaagtgccgccaccccactggaggcagcttcatccggcccaacaaggtgaactttggaacagacttcctgacagccatcaagaacagatatgtgctggaggatggccctgaggaggacaggaaggagcagatcgtgaccatcggcaacaagcctgtggagaccatcggctttgacagcatcatgaagcagcagagccagctgagcaagctgcaggaggtgtccctgaggaactgtgctgtgtcctgtgccggggagaagggcggcgtggccgaggcctgccccaacatcaggaaggtggacctgagcaagaacctgctgagctcctgggatgaagtcatccacatcgctgaccagctgcggcacctggaggtgctgaatgtgtctgagaacaagctgaagttccccagcggctctgtgctgaccggcaccctgtctgtgctgaaggtgctggtgctgaaccagacaggcatcacctgggccgaggtgctgcgctgtgtggccggctgccccggcctggaggagctgtacctggagagcaacaacatcttcatcagcgagcggcccacagatgtgctgcagacagtgaagctgctggacctgagcagcaaccagctgattgatgagaaccagctgtacctgattgcccacctgccccggctggagcagctgatcctgagtgacaccggcatcagcagcctgcacttcccagatgctggcatcggctgcaagacctccatgttccccagcctgaagtacctggtggtgaatgacaaccagatcagccagtggagcttcttcaatgagctggagaagctgcccagcctgcgggccctgagctgcctgaggaaccccctgaccaaggaggacaaggaggccgagacagcccggctgctgatcatcgccagcatcggccagctgaagaccctgaacaagtgtgagatcctgcctgaggagaggagaagagctgagctggactacaggaaggcctttggaaatgagtggaagcaggccggcggccacaaggaccctgagaagaaccggctgtctgaggagttcctgacagcccacccccgctaccagttcctgtgcctgaagtatggagcccctgaggactgggagctgaagacccagcagcccctgatgctgaagaaccagctgctgaccctgaagatcaagtacccccaccagctggaccagaaggtgctggagaagcagctgcccggctccatgaccatccagaaggtgaagggcctgctgagccggctgctgaaggtgcctgtgtctgacctgctgctgtcctatgagagccccaagaagccaggccgggagattgagctggagaatgacctgaagagcctgcagttctacagcgtggagaatggagactgcctgctggtgcgctggtag

SEQ ID NO: 35440 - DNA, 1584 bp, Artificial Sequence
  derived and/or modified sequence
atgagcgacaccctgaccgccgacgtgatcggccggcgggtggaggtgaatggcgagcacgctaccgtgcgtttcgctggcgtcgttccacccgtggcagggccctggctcggtgtcgaatgggataatcccgagagaggcaaacacgacgggtcgcacgaaggtacagtgtatttcaaatgtcgtcaccctactggtgggtcattcatccggcccaacaaggtgaatttcggaactgatttcctgacggctatcaagaatcgatacgtcctcgaggatggaccagaagaagaccggaaggagcagatcgttaccatcgggaataaacctgtcgaaacaatcggctttgacagcatcatgaagcaacagtcccagttatctaaactgcaagaggtgtccctccggaattgtgcagtgtcttgtgcaggtgagaaggggggcgtagctgaagcatgcccaaacattcgaaaggtagacctgagcaagaatctcctgagcagctgggacgaagtgatacacatagcagatcagctgcgtcacctcgaagtactgaacgtgtccgaaaataagctaaagtttcctagtggttccgtgctgacaggcactctctctgttctaaaagttctggttctcaaccagactggaatcacatgggctgaagtattgagatgcgttgccggctgccctggtctggaagagctttacctcgaaagcaataacatctttatatctgagcgtccaactgacgtgttgcagaccgtcaagttactggacctctccagcaaccagctcatcgatgagaaccagctttatttgatcgcacatctcccaagactcgagcagctgatcctcagtgataccggcattagcagtctgcacttccctgatgctggtatcggttgcaagacttcaatgttcccctctcttaaatatttggtggtcaacgataatcagattagccaatggtcctttttcaatgagctcgagaaattacccagcctcagggcactgagttgtctcagaaatcctttaacaaaagaggataaggaagccgaaaccgcacggttgctgatcatcgcctccatcggacagctgaagacactgaataagtgcgaaattctgcctgaggaacgtaggcgggccgagctggactatagaaaagcttttgggaatgagtggaagcaagcaggaggccataaagaccccgagaagaataggctcagcgaagagtttctcactgcacacccacgctaccagtttctatgccttaagtacggggcgccagaggactgggagcttaagacccaacagccactcatgttaaaaaatcagctgctgacgctcaagatcaaatatccccatcagttggaccagaaagtcctcgaaaaacaactgcccgggagtatgaccatacagaaggtgaagggtcttctgagtcggctcctgaaggtccctgtgtcagatctgcttttatcatatgagtctcctaaaaaaccggggagggagattgaactggagaacgacctgaagagcctccagttctacagcgtggagaacggggattgcctcctagtcagatggtag

SEQ ID NO: 35441 - DNA, 1584 bp, Artificial Sequence
  derived and/or modified sequence
atgagcgacaccctgaccgccgacgtgatcggccggcgggtggaggtgaacggtgaacacgctaccgtgcggttcgctggcgtggtaccacctgtggccggaccatggctgggcgtcgaatgggacaaccccgaacggggtaagcatgacgggtctcacgaggggactgtttacttcaaatgcaggcaccccaccggagggagtttcattcggcccaataaagtgaatttcgggactgactttctcaccgccattaagaaccgatatgttctggaggacgggcctgaagaggaccgtaaagaacagattgtgacgattggcaacaaaccagtggaaaccattggattcgatagtatcatgaagcagcagtcccagctcagtaagcttcaggaggtgtccctcagaaactgtgctgtaagctgtgcaggtgagaaagggggagtggccgaggcttgcccgaacattcggaaggtcgacctgtccaagaatttgttgagcagttgggatgaggtcatacacatagccgatcaacttcgacacttggaagtgctgaatgtgagcgaaaacaagttaaaattcccctctggttctgtgctgacaggaactctgagtgtgctcaaggttctcgtgctcaaccagacgggaatcacatgggccgaggtgttacgctgtgtggctggctgcccaggtctcgaggagctctacctagagtctaataacatcttcatctctgaaagacccaccgacgtgctgcagaccgtgaaactcctggacctgtcttcgaatcagctcattgacgaaaaccagctctatttgattgctcatttaccccgcttggagcagctcatcctctcagacacggggataagctctttgcacttccctgatgctggcataggctgcaagacttccatgttccccagtttgaagtatcttgtggtcaacgataaccaaataagtcagtggtctttcttcaacgagctggagaaactgccgtcactaagagccttgtcctgcctgcgcaatcctctgaccaaagaggataaggaagcagagaccgctaggttgctcatcatcgcctctataggccaactgaaaacactgaacaagtgcgaaattctccccgaggagcggcgccgggccgaactcgactatcggaaggcctttggcaacgaatggaaacaggcgggcggtcataaggatcccgagaagaacaggctctcagaggagttcttaactgcacatccccgctatcaattcctgtgccttaaatatggagccccagaggactgggagctaaagactcagcagcccctgatgctgaaaaaccagctgcttaccctcaaaattaaatacccccatcagctggatcagaaagtactggaaaagcagctgccaggatcgatgaccatccagaaggtgaagggcctgttaagcagactgctcaaggtccctgtttctgacctactgctcagctatgaatcccccaagaaacctggacgtgagattgagctcgaaaatgatttaaagtcgttgcaattttactccgtggaaaacggggactgcctgcttgtgaggtggtag

SEQ ID NO: 35442 - DNA, 1584 bp, Artificial Sequence
  derived and/or modified sequence
atgtcggatacattaactgcagatgttattggcaggagggtcgaagtgaatggtgaacatgcgactgtaagattcgccggagtggtcccgcctgtggctggcccatggctgggggttgaatgggataaccccgaaagaggcaagcacgacggcagccacgaaggcaccgtgtactttaagtgtcgccaccctacaggcggttctttcataaggcccaataaggttaattttggtacagactttctgactgctattaaaaacagatacgtactcgaggatggaccagaagaggatcgaaaagagcagatagtcacaatcggcaacaagccggtggaaacaatagggtttgattcaataatgaagcaacagagccagctttctaaacttcaggaagtaagtctgcgcaattgcgcagttagttgtgccggagagaagggcggtgtggctgaagcctgcccgaacatccgtaaggtggacctgtcaaagaacctgctgagctcttgggacgaggtgattcatatagcagaccagctcagacacctggaggtcctcaacgtctccgagaataaactgaagttccccagtgggagtgtcctcacgggtacgctgagcgtattgaaggtattagttcttaaccaaaccgggatcacttgggctgaggtgctgagatgcgtggccggttgtccaggactggaagaactgtatttagaatcaaataacatatttatttctgagcgccctaccgacgtcctgcaaaccgtgaaactgttggacttgtcttctaaccagctcatagacgaaaaccagctttacctcattgcgcaccttcctagactggagcagttgattctgtcggatactggcatttcatctttgcactttcccgacgccggaataggatgcaaaacaagcatgttcccttcacttaaatatcttgtggtaaatgataaccagatatctcaatggtccttctttaacgagctcgagaaactgcccagcctgagagccctcagttgcctccgcaaccccctgacaaaagaggataaggaggccgagaccgccagactgttaatcatcgcctcaatcgggcagctcaaaacactcaacaagtgcgagattctgcccgaagaaagaagaagagccgagctcgactaccgaaaagcattcggcaacgaatggaaacaggccggagggcacaaggatccggagaaaaaccggttgtcagaggaatttttgactgctcaccctcgctaccaatttctctgtctaaagtacggagctcccgaggattgggagctgaaaacccaacagcccctcatgctcaagaaccagttactgaccttgaaaataaagtacccgcatcagctcgatcagaaggtgttggagaagcagctccccggttctatgaccatacagaaagtgaaaggtctcttgtcgaggctgttgaaggtgccagtctccgacctcctgctctcctatgagtcgccgaagaagccgggacgagagatcgaactggagaacgacttgaagtccttacagttctactctgtggagaatggggattgtttactagtgcgttggtag

SEQ ID NO: 35443 - DNA, 1584 bp, Artificial Sequence
  derived and/or modified sequence
atgtccgacactttgacagccgatgtgatcggcagacgcgtggaggtaaacggagaacatgctacagtccgctttgctggggtagtgcctccggtagctggaccctggctcggagtggagtgggacaaccctgagcgagggaagcacgatgggtctcatgagggtaccgtttacttcaagtgccggcatcctaccgggggaagcttcattagaccaaataaggttaattttggaaccgattttttaacagccattaaaaataggtatgtgctcgaagacggtcctgaggaggacaggaaggagcaaattgtcactatcggcaataaaccagttgagaccatcggctttgacagcataatgaagcaacagtcacaactcagcaaactacaggaggtgtccctgcggaactgcgccgtctcttgtgccggagaaaaaggtggagtggccgaagcatgtcccaacatccgaaaagttgatctgtccaaaaacctgttaagctcctgggatgaggttattcatatcgcggatcaattgcggcacctggaggtactcaacgtgtctgaaaacaagcttaagtttccgtctgggtcggtgctgaccggcactctttccgtgctcaaggtcctcgttctaaatcagactggcatcacgtgggcagaagttttgaggtgcgttgccggatgtcccggtctggaggagctgtatctggagagtaataacatctttatctccgaacgccctaccgatgtcctacagaccgtaaaactgctggatctcagctcaaaccagctgatcgacgagaatcagctctatcttatagcgcatttgccacgtctggagcagctgattctaagcgataccgggatttcatccctccacttccccgacgctggaatcggttgtaagactagtatgtttccgtcattgaaatatctggtagtcaatgacaaccaaatctcacagtggtccttcttcaatgagctcgagaagctgcctagtctgcgcgcactcagctgcctcagaaaccccttaacaaaggaagacaaagaggctgagacagcacgattgctgattatcgccagtataggacagctgaagaccctgaataaatgcgaaattctgcccgaagagcggcgacgcgctgaactcgattaccgaaaggcttttgggaacgagtggaagcaagctggaggacataaagaccccgaaaagaatcgactaagcgaggagttcctgactgcacatccacgatatcagtttctgtgcctcaagtacggggcacccgaggattgggagctgaaaacgcagcagccactcatgctgaagaaccagctcctgactttgaaaattaagtatcctcaccagttagatcagaaagtgctggagaagcagctaccgggatccatgactatccagaaggtgaagggcctgctctcgagattattgaaggttccggtgagtgatctgttactcagctatgaatctcccaaaaagccagggagggaaatagaacttgaaaatgacctcaaatccctacagttctatagtgtggagaacggcgattgcttgctggtccggtggtag

SEQ ID NO: 35444 - DNA, 1966 bp, Artificial Sequence
  derived and/or modified sequence
attctcgtctatgctccagcagccgtacctcactccggtggaggcgggacttcctacagcacttccggccagagcctcaagcttcgctgctgggcagttggctggaggggctgctgctgggaacacctggagtctccgcgggcagatctcatattttggattctggatatattataatgagtgacactttgacagcggatgtcattggtcgaagagttgaagttaatggagaacatgcaacagtacgttttgctggtgttgtccctcccgtggcaggaccctggttaggagtagaatgggacaatcccgagagaggaaagcatgatgggagccacgaagggactgtgtattttaaatgcaggcacccgacaggaggatcctttattcgtccgaacaaggtaaattttggaacagactttcttactgcaattaagaaccgctatgtgttagaagatggaccagaggaagatagaaaagagcaaattgttacaattggaaataaacctgtggagactatcggttttgactctattatgaaacagcaaagtcagctgagcaagttgcaagaagtttctctgaggaactgtgcagtaagttgtgctggtgaaaaaggaggagttgctgaagcatgtcctaatatcagaaaggtagatttgtcaaaaaacctgttgtcatcatgggatgaagtgatacacattgctgatcagctcagacacctggaagtccttaatgtcagtgaaaataaactaaaatttccctccggttcagtattaactggaacgctttctgtactgaaggttttagtcctcaatcaaacaggaataacgtgggctgaggtgctgcggtgtgtcgcggggtgcccaggcctggaggaactctaccttgagtctaacaacattttcatttccgaaaggccaacagatgttctccagacagtcaagttattagatctttcctctaatcaattaattgatgaaaatcagctgtatctgatagcccacctgcccaggttagaacaattaatcctctctgacactggaatttcttctctacattttccggatgctggaattgggtgcaaaacgtccatgttcccatccttgaagtacctggtagtaaacgacaatcagatatcacaatggtcgtttttcaatgagctagagaagttaccaagtctacgggctttgtcctgcctaagaaaccccctgaccaaagaggacaaagaagcagagacggcgcgactactcattatcgccagcattggccagctgaagacgctgaacaaatgtgagattctccccgaggagaggcggagagctgagcttgactaccgaaaagcttttggaaatgagtggaaacaggctggtggacataaggatccggaaaaaaacagactcagcgaagaattcctcacagcccatcccagataccagttcctctgcctgaaatatggtgcacctgaagattgggaactcaaaacacagcaaccacttatgctgaaaaaccagctactaacactgaagataaaataccctcatcaacttgatcagaaagtcctggagaaacaactgccgggctccatgacaattcaaaaggtgaagggattgctgtcacgtcttctcaaagttcctgtgtcagaccttctgttgtcctatgaaagtcccaaaaagccgggcagagaaatcgagctggaaaatgacctaaagtcattacagttttattctgtggaaaatggagattgtctattagtgcgatggtgacaaccaactaataaaatttaaagaccacactgcttatcgtgtctggggttcaccggaaataaatgattcactggaacaattctactgtcaaaacaaagggggtttacaacttgtcctaagtataacaagggatgtattttttgttgggaagtgaccatttctaggcttatacataatagcaataataaaggctttgaacctactaa

SEQ ID NO: 35445 - DNA, 1956 bp, Artificial Sequence
  derived and/or modified sequence
ctacagcacttccggccagagcctcaagcttcgctgctgggcagttggctggaggggctgctgctgggaacacctggagtctccgcgggcaggtgagcttcagaggttcggggagctttcggaacgagcattcctggccgatctcatattttggattctggatatattataatgagtgacactttgacagcggatgtcattggtcgaagagttgaagttaatggagaacatgcaacagtacgttttgctggtgttgtccctcccgtggcaggaccctggttaggagtagaatgggacaatcccgagagaggaaagcatgatgggagccacgaagggactgtgtattttaaatgcaggcacccgacaggaggatcctttattcgtccgaacaaggtaaattttggaacagactttcttactgcaattaagaaccgctatgtgttagaagatggaccagaggaagatagaaaagagcaaattgttacaattggaaataaacctgtggagactatcggttttgactctattatgaaacagcaaagtcagctgagcaagttgcaagaagtttctctgaggaactgtgcagtaagttgtgctggtgaaaaaggaggagttgctgaagcatgtcctaatatcagaaaggtagatttgtcaaaaaacctgttgtcatcatgggatgaagtgatacacattgctgatcagctcagacacctggaagtccttaatgtcagtgaaaataaactaaaatttccctccggttcagtattaactggaacgctttctgtactgaaggttttagtcctcaatcaaacaggaataacgtgggctgaggtgctgcggtgtgtcgcggggtgcccaggcctggaggaactctaccttgagtctaacaacattttcatttccgaaaggccaacagatgttctccagacagtcaagttattagatctttcctctaatcaattaattgatgaaaatcagctgtatctgatagcccacctgcccaggttagaacaattaatcctctctgacactggaatttcttctctacattttccggatgctggaattgggtgcaaaacgtccatgttcccatccttgaagtacctggtagtaaacgacaatcagatatcacaatggtcgtttttcaatgagctagagaagttaccaagtctacgggctttgtcctgcctaagaaaccccctgaccaaagaggacaaagaagcagagacggcgcgactactcattatcgccagcattggccagctgaagacgctgaacaaatgtgagattctccccgaggagaggcggagagctgagcttgactaccgaaaagcttttggaaatgagtggaaacaggctggtggacataaggatccggaaaaaaacagactcagcgaagaattcctcacagcccatcccagataccagttcctctgcctgaaatatggtgcacctgaagattgggaactcaaaacacagcaaccacttatgctgaaaaaccagctactaacactgaagataaaataccctcatcaacttgatcagaaagtcctggagaaacaactgccgggctccatgacaattcaaaaggtgaagggattgctgtcacgtcttctcaaagttcctgtgtcagaccttctgttgtcctatgaaagtcccaaaaagccgggcagagaaatcgagctggaaaatgacctaaagtcattacagttttattctgtggaaaatggagattgtctattagtgcgatggtgacaaccaactaataaaatttaaagaccacactgcttatcgtgtctggggttcaccggaaataaatgattcactggaacaattctactgtcaaaacaaagggggtttacaacttgtcctaagtataacaagggatgtattttttgttgggaagtgaccatttctaggcttatacataatagcaataataaaggctttgaacct

SEQ ID NO: 35446 - protein, 976 aa, Artificial Sequence
  derived and/or modified sequence
MKVVNLKQAILQAWKERWSDYQWAINMKKFFPKGATWDILNLADALLEQAMIGPSPNPLILSYLKYAISSQFDDFSRDLCVQALLDIMDMFCDRLSCHGKAEECIGLCRALLSALHWLLRCTAASAERLREGLEAGTPAAGEKQLAMCLQRLEKTLSSTKNRALLHIAKLEEASSWTAIEHSLLKLGEILANLSNPQLRSQAEQCGTLIRSIPTMLSVHAEQMHKTGFPTVHAVILLEGTMNLTGETQSLVEQLTMVKRMQHIPTPLFVLEIWKACFVGLIESPEGTEELKWTAFTFLKIPQVLVKLKKYSHGDKDFTEDVNCAFEFLLKLTPLLDKADQRCNCDCTNFLLQECGKQGLLSEASVNNLMAKRKADREHAPQQKSGENANIQPNIQLILRAEPTVTNILKTMDADHSKSPEGLLGVLGHMLSGKSLDLLLAAAAATGKLKSFARKFINLNEFTTYGSEESTKPASVRALLFDISFLMLCHVAQTYGSEVILSESRTGAEVPFFETWMQTCMPEEGKILNPDHPCFRPDSTKVESLVALLNNSSEMKLVQMKWHEACLSISAAILEILNAWENGVLAFESIQKITDNIKGKVCSLAVCAVAWLVAHVRMLGLDEREKSLQMIRQLAGPLFSENTLQFYNERVVIMNSILERMCADVLQQTATQIKFPSTGVDTMPYWNLLPPKRPIKEVLTDIFAKVLEKGWVDSRSIHIFDTLLHMGGVYWFCNNLIKELLKETRKEHTLRAVELLYSIFCLDMQQVTLVLLGHILPGLLTDSSKWHSLMDPPGTALAKLAVWCALSSYSSHKGQASTRQKKRHREDIEDYISLFPLDDVQPSKLMRLLSSNEDDANILSSPTDRSMSSSLSASQLHTVNMRDPLNRVLANLFLLISSILGSRTAGPHTQFVQWFMEECVDCLEQGGRGSVLQFMPFTTVSELVKVSAMSSPKVVLAITDLSLPLGRQVAAKAIAAL

SEQ ID NO: 35447 - DNA, 2931 bp, Artificial Sequence
  derived and/or modified sequence
atgaaggtggtgaatcttaaacaggccatcctgcaggcctggaaagaaagatggagtgactaccaatgggccattaatatgaagaagttctttccgaagggggcaacatgggatatcttgaatttggccgatgcgctcctggagcaagccatgatcgggcctagtcctaatcctttgattttatcttatcttaaatacgctattagtagtcagtttgatgactttagcagggatctctgcgtgcaggccctgctcgatattatggatatgttttgcgaccgcctgtcctgccatgggaaagcggaagagtgtattggactttgccgggctctcttgagcgcccttcattggctccttcgatgcactgccgcatctgctgaaagacttcgcgaaggtctcgaggcaggtactccagcggctggagaaaaacagttggcaatgtgtcttcagcgcctggagaagaccctctcatccacaaaaaacagggctctactccatatcgccaagttggaggaagcatcatcttggacagccattgagcactcactgcttaagcttggtgagattctggccaatctgtctaacccacagcttaggtcccaggccgaacagtgcggaaccctgatcagatcgattcccacaatgctgtcagtccacgccgagcagatgcacaagacaggctttcctacagtacacgctgtgatactgttggagggcactatgaacctgacaggagaaacgcaaagccttgtagaacagttgacgatggtaaagagaatgcagcatattccgacacccctgttcgtgctcgaaatctggaaggcctgtttcgtcgggctcatcgagtcccctgagggtacagaagagcttaaatggaccgcgtttacatttttgaagatcccacaggtgcttgttaagctcaagaaatacagccacggggataaggactttaccgaggatgtcaattgcgcgtttgaatttctcttgaagctaaccccgctgctggataaggccgatcagagatgtaattgcgactgcacaaactttctccttcaggaatgcggtaaacaggggcttctatcagaggcatccgtaaataatttaatggctaagaggaaggcggatagggaacacgctcctcagcagaagtccggggaaaatgccaatatccaaccgaacattcagctgatccttcgggccgaaccaactgtaacaaacattcttaagaccatggatgccgaccactcaaaaagtcctgaagggcttctcggagttctcgggcacatgctgagcgggaaatctttagatcttctgctcgccgctgccgccgcaaccggcaaactgaagtccttcgccaggaaattcatcaacctgaacgagtttaccacatacggttccgaggagagcacaaaacccgccagcgtcagggccttgctgtttgacatttcctttctgatgctgtgccatgtggctcagacctacggctcagaggttatcttaagtgagagccggacaggggccgaagtgccattcttcgaaacatggatgcaaacatgcatgccagaagaaggcaaaatcctgaacccagaccatccctgtttccgccccgattccactaaggtcgagtcacttgttgcattgctcaacaactcgtctgagatgaagttggtccagatgaagtggcatgaggcatgcctgagcatcagtgctgcgatcctggagattcttaatgcttgggaaaatggtgtgctggcttttgagtcaattcagaaaattaccgacaacatcaagggaaaagtgtgttcgcttgccgtgtgcgcggtggcgtggctggtagcacacgtcagaatgctgggcctggatgaacgagaaaagagcctgcaaatgattagacagctggcaggaccactatttagtgagaacacacttcagttctataacgagcgcgtcgtcatcatgaactctatattggagcgcatgtgtgcagacgttcttcagcagacggcaacccaaatcaagtttccatcaacgggggtagatacgatgccctactggaatctgctcccccctaagagaccgatcaaagaggttctgaccgacatctttgcaaaggtattagagaagggctgggttgacagccggagtatccacatttttgatacccttctgcatatgggcggagtgtactggttctgcaataacctgataaaggagttgcttaaggagacccggaaagaacacaccctgagggctgttgaattgttgtactccatcttttgtctagacatgcaacaagtgacactcgtgcttcttggacatatcctccccgggctactgacagatagttccaagtggcattcactcatggaccccccgggaactgccctggcgaaactggccgtgtggtgcgctctttctagttattcttcccacaaggggcaggccagcacccggcagaaaaagaggcatagagaggatatcgaagattacatctctctgttccccctagacgacgtgcagccctctaaactaatgcgcctgttatcctcgaacgaggacgacgctaatattctctcatctccgaccgatcgctctatgagctcttctctgtcggcctctcagctgcatacagtaaatatgcgagacccgctgaaccgagtgttggcaaacctgttcctgctcatcagctccatcctcggttctcgcaccgccggcccacatacacagttcgtccaatggtttatggaagagtgcgtcgactgcctggagcagggcggaaggggctcggttctgcaatttatgccatttactactgtgagtgagctggtaaaggtttcagccatgtccagtcctaaggtggtgctggccattaccgacctttcactgccccttgggcgacaggtggccgcgaaggctattgcagcgctttag

SEQ ID NO: 35448 - DNA, 2700 bp, Artificial Sequence
  derived and/or modified sequence
atgccattggtgcctcgctggtgccctactcttctgtcttctcaaccgtcagtatcctgccacggcaaggctgaagagtgtataggtttgtgccgtgctctgttatctgccctccactggctcctgcgttgtacagccgccagtgccgaaaggttgcgggagggcttagaggccgggacaccagccgcaggcgagaaacagctggccatgtgcctgcagcgactcgaaaagacactatcctctacaaaaaacagagccttgctgcatatcgctaagctcgaagaagcctcctcctggacagcaatcgaacactcattgctgaaattgggggagatcctcgctaatctctctaacccgcaactgagaagtcaagccgaacagtgcggcaccttgattagaagtattcccaccatgctgtccgttcatgccgagcaaatgcacaaaacaggctttcccactgtacacgcagttatccttctcgaagggaccatgaacctcacaggcgagacccagtcattggtcgaacagctgacaatggtcaaacggatgcagcacatccccactcctttgtttgtgctggagatctggaaggcctgtttcgttggcctgattgaatcccctgagggtaccgaggaactgaagtggaccgccttcacatttttgaaaattccccaagtgctcgtcaagctgaagaaatactctcacggtgacaaggacttcactgaggacgttaattgcgcgtttgaattccttctaaaactcacccctctcctcgataaggctgatcagagatgcaactgtgattgcaccaacttcctgctgcaggagtgcggcaaacagggcctgctgtctgaggcctctgttaataatctcatggccaagagaaaagccgacagggaacacgctcctcagcagaagagtggggagaatgcaaacatacaaccaaacatccagctgatcctgagagcagagcctacggtgactaatattttaaagaccatggacgctgatcacagtaagtcccccgaagggttgttaggcgtcctcggccatatgctgagtgggaagtccttggacctgctgctggccgccgcggcagcaacgggaaagctaaagagctttgctagaaagttcattaacttgaacgagtttacgacctacgggtctgaggagagcaccaagcctgccagcgttagagcactcctgtttgatatctcttttcttatgctttgccacgtggctcagacatacggatccgaggttattctctccgaaagcaggaccggcgcagaggttcccttttttgaaacctggatgcaaacatgcatgccggaagaggggaaaattttgaaccccgatcacccttgcttcaggcctgactccaccaaggtcgagagccttgtggccctacttaacaattcctctgaaatgaaattggttcagatgaaatggcatgaggcctgcctgtccatttccgctgcgattcttgaaatcctcaacgcttgggagaatggagtcctggccttcgaatcaattcagaaaatcaccgataatatcaagggtaaggtttgcagtctggccgtgtgtgcagtcgcctggctggtcgcgcacgtacggatgttaggacttgacgaacgggagaaaagtctacagatgatcaggcagcttgctgggcccctattctccgaaaacactttgcagttttataatgagcgggtggtcatcatgaatagtattctagaacggatgtgcgccgacgtgctgcagcagaccgccacccaaataaagttcccaagcacaggcgtggataccatgccgtattggaatctactgccacctaagcggcccataaaggaggttcttacagacatttttgccaaggttctcgagaagggttgggtagattcccgttccatacatatttttgatactctgctacatatggggggagtatactggttctgcaataaccttatcaaagaactgctgaaagagacccgtaaggagcacacactgagagcagtggagctactgtatagtattttctgtttagacatgcagcaggtaactttagttctcctcggccatatcctgcccgggttgcttaccgattcctctaaatggcactcgctcatggacccccccgggactgcattagcaaagctggccgtgtggtgcgctctctcctcatacagttcccacaaggggcaagccagtactcggcagaagaagcggcatcgcgaggatattgaggactacattagcctgtttccattggatgatgtacagcccagtaagctgatgaggcttctgtcatctaacgaggacgacgctaatattctcagctctcccaccgatcggtcaatgagctcgagcttgtctgcatctcagctgcacaccgttaacatgcgcgaccctctgaatcgtgttctggctaacctcttcttgcttattagcagcattctcggtagtcgtacggcggggccgcacacgcagttcgtgcaatggttcatggaggagtgtgtggattgcctcgagcaaggggggcgtggttccgtgcttcaattcatgccgttcactactgtgtcagagctggtcaaggtgtcagcaatgtcctctcctaaagtcgtgctggcgattacggacctgagcctgcccctggggaggcaggtggccgcgaaagccatcgcagcattatag

SEQ ID NO: 35449 - DNA, 2931 bp, Artificial Sequence
  derived and/or modified sequence
atgaaggtggtgaacctgaagcaggccatcctgcaggcctggaaggagcgctggagcgactaccagtgggccatcaacatgaagaagttcttccccaagggggccacctgggacatcctgaacctggctgatgccctgctggagcaggccatgattggccccagccccaaccccctcatcctgagctacctgaagtatgccatcagcagccagtttgatgacttcagccgggacctgtgtgtgcaggccctgctggacatcatggacatgttctgtgaccggctgagctgccacggcaaggccgaggagtgcatcggcctgtgccgggccctgctgagcgccctgcactggctgctgcgctgcacagctgccagcgctgagcggctgcgggagggcctggaggccggcaccccagctgctggggagaagcagctggccatgtgcctgcagaggctggagaagaccctgagcagcaccaagaacagagccctgctgcacatcgccaagctggaggaggccagctcctggacagccatcgagcacagcctgctgaagctgggggagatcctggccaacctgagcaacccccagctgcggagccaggccgagcagtgtggcaccctcatccgcagcatccccaccatgctgtctgtgcacgccgagcagatgcacaagacaggcttccccaccgtgcatgctgtgatcctgctggagggcaccatgaacctgaccggggagacccagagcctggtggagcagctgaccatggtgaagaggatgcagcacatccccacccccctgtttgtgctggagatctggaaggcctgctttgtgggcctgattgagagccctgagggcacagaggagctgaagtggacagccttcaccttcctgaagatcccccaggtgctggtgaagctgaagaagtacagccacggggacaaggacttcacagaagatgtgaactgtgcctttgagttcctgctgaagctgacccccctgctggacaaggctgaccagcgctgcaactgtgactgcaccaacttcctgctgcaggagtgtgggaagcagggcctgctgtctgaggcctctgtgaacaacctgatggccaagaggaaggctgaccgggagcacgccccccagcagaagagcggggagaatgccaacatccagcccaacatccagctgatcctgcgggcagagcccaccgtgaccaacatcctgaagaccatggatgctgaccacagcaagagccctgagggcctgctgggcgtgctgggccacatgctgagcggcaagagcctggacctgctgctggccgctgctgctgccaccgggaagctgaagagctttgccaggaagttcatcaacctgaatgagttcaccacctacggcagcgaggagagcaccaagccagcctctgtgcgggccctgctgtttgacatctccttcctgatgctgtgccacgtggcccagacctacggcagcgaggtgatcctgtctgagagcaggactggagctgaggtgcccttctttgagacctggatgcagacctgcatgcctgaggagggcaagatcctgaacccagaccacccctgcttccggccagacagcaccaaggtggagagcctggtggccctgctgaacaacagcagcgagatgaagctggtgcagatgaagtggcatgaggcctgcctgagcatctctgctgccatcctggagatcctgaatgcctgggagaatggagtgctggcctttgagagcatccagaagatcacagacaacatcaagggcaaggtgtgcagcctggccgtgtgtgctgtggcctggctggtggcccacgtgaggatgctgggcctggatgagcgggagaagagcctgcagatgatccggcagctggccggccccctcttcagcgagaacaccctgcagttctacaatgaaagagtggtgatcatgaacagcatcctggagaggatgtgtgctgatgtgctgcagcagacagccacccagatcaagttccccagcactggagtggacaccatgccctactggaacctgctgccccccaagaggcccatcaaggaggtgctgacagacatctttgccaaggtgctggagaagggctgggtggacagccgcagcatccacatctttgacaccctgctgcacatgggcggcgtgtactggttctgcaacaacctgatcaaggagctgctgaaggagaccaggaaggagcacaccctgcgggctgtggagctgctgtacagcatcttctgcctggacatgcagcaggtgaccctggtgctgctgggccacatcctgcccggcctgctgacagacagcagcaagtggcacagcctgatggaccccccaggcacagccctggccaagctggccgtgtggtgtgccctgagcagctacagcagccacaagggccaggccagcacccggcagaagaagaggcacagagaagatattgaggactacatcagcctcttccccctggatgatgtgcagcccagcaagctgatgaggctgctgagcagcaatgaagatgatgccaacatcctgagcagccccacagaccgctccatgagcagcagcctgagcgccagccagctgcacacagtgaacatgagggaccccctgaacagagtgctggccaacctcttcctgctgatcagcagcatcctgggcagcaggacagctggcccccacacccagtttgtgcagtggttcatggaggagtgtgtggactgcctggagcagggcggccggggctctgtgctgcagttcatgcccttcaccaccgtgtctgagctggtgaaggtgtctgccatgagcagccccaaggtggtgctggccatcacagacctgagcctgcccctgggccggcaggtggccgccaaggccatcgccgccctgtag

SEQ ID NO: 35450 - DNA, 2700 bp, Artificial Sequence
  derived and/or modified sequence
atgcccctggtgccccgctggtgccccaccctgctgagcagccagcccagcgtgtcctgccacggcaaggccgaggagtgcatcggcctgtgccgggccctgctgagcgccctgcactggctgctgcgctgcacagctgccagcgctgagcggctgcgggagggcctggaggccggcaccccagctgctggggagaagcagctggccatgtgcctgcagaggctggagaagaccctgagcagcaccaagaacagagccctgctgcacatcgccaagctggaggaggccagctcctggacagccatcgagcacagcctgctgaagctgggggagatcctggccaacctgagcaacccccagctgcggagccaggccgagcagtgtggcaccctcatccgcagcatccccaccatgctgtctgtgcatgctgagcagatgcacaagacaggcttccccaccgtgcacgccgtcatcctgctggagggcaccatgaacctgactggagagacccagagcctggtggagcagctgaccatggtgaagaggatgcagcacatccccacccccctgtttgtgctggagatctggaaggcctgctttgtgggcctcatcgagagccctgagggcacagaggagctgaagtggacagccttcaccttcctgaagatcccccaggtgctggtgaagctgaagaagtacagccatggagacaaggacttcacagaagatgtgaactgtgcctttgagttcctgctgaagctgacccccctgctggacaaggctgaccagcgctgcaactgtgactgcaccaacttcctgctgcaggagtgtgggaagcagggcctgctgtctgaggcctctgtgaacaacctgatggccaagaggaaggctgaccgggagcacgccccccagcagaagtctggagaaaatgccaacatccagcccaacatccagctgatcctgcgggcagagcccaccgtgaccaacatcctgaagaccatggatgctgaccacagcaagagccctgagggcctgctgggcgtgctgggccacatgctgagcggcaagagcctggacctgctgctggccgctgctgctgccaccgggaagctgaagagctttgccaggaagttcatcaacctgaatgagttcaccacctacggcagcgaggagagcaccaagccagcctctgtgcgggccctgctgtttgacatctccttcctgatgctgtgccacgtggcccagacctacggcagcgaggtgatcctgtctgagagcaggactggagctgaggtgcccttctttgagacctggatgcagacctgcatgcctgaggagggcaagatcctgaacccagaccacccctgcttccggccagacagcaccaaggtggagagcctggtggccctgctgaacaacagcagcgagatgaagctggtgcagatgaagtggcatgaggcctgcctgagcatctctgctgccatcctggagatcctgaatgcctgggagaatggagtgctggcctttgagagcatccagaagatcacagacaacatcaagggcaaggtgtgcagcctggccgtgtgtgctgtggcctggctggtggcccacgtgaggatgctgggcctggatgagcgggagaagagcctgcagatgatccggcagctggccggccccctcttcagcgagaacaccctgcagttctacaatgaaagagtggtgatcatgaacagcatcctggagaggatgtgtgctgatgtgctgcagcagacagccacccagatcaagttccccagcactggagtggacaccatgccctactggaacctgctgccccccaagaggcccatcaaggaggtgctgacagacatctttgccaaggtgctggagaagggctgggtggacagccgcagcatccacatctttgacaccctgctgcacatgggcggcgtgtactggttctgcaacaacctgatcaaggagctgctgaaggagaccaggaaggagcacaccctgcgggctgtggagctgctgtacagcatcttctgcctggacatgcagcaggtgaccctggtgctgctgggccacatcctgcccggcctgctgacagacagcagcaagtggcacagcctgatggaccccccaggcacagccctggccaagctggccgtgtggtgtgccctgagcagctacagcagccacaagggccaggccagcacccggcagaagaagaggcaccgggaggacatcgaggactacatcagcctcttccccctggatgatgtgcagcccagcaagctgatgaggctgctgagcagcaatgaagatgatgccaacatcctgagcagccccacagaccgctccatgagcagcagcctgagcgccagccagctgcacacagtgaacatgagggaccccctgaacagagtgctggccaacctcttcctgctgatcagcagcatcctgggcagcaggacagctggcccccacacccagtttgtgcagtggttcatggaggagtgtgtggactgcctggagcagggcggccggggctctgtgctgcagttcatgcccttcaccaccgtgtctgagctggtgaaggtgtctgccatgagcagccccaaggtggtgctggccatcacagacctgagcctgcccctgggccggcaggtggccgccaaggccatcgccgccctgtag

SEQ ID NO: 35451 - DNA, 3456 bp, Artificial Sequence
  derived and/or modified sequence
aagtgccaaaatggcgatgcctaccacctagaactggattgtgcgctccatttctttcacctcaaagctggccgccaccgctgccacctgctcagagtgaaataatgaaggtggtcaacctgaagcaagccattttgcaagcctggaaggagcgctggagtgactaccaatgggcaatcaacatgaagaaattctttcctaaaggagccacctgggatattctcaacctggcagatgcgttactagagcaggccatgattggaccatcccccaatcctctcatcttgtcctacctgaagtatgccattagttcccagtttgatgacttttctcgggacctgtgtgtccaggcattgctggacatcatggacatgttttgtgaccgtctgagctgtcacggcaaagcagaggaatgcatcggactgtgccgagcccttcttagcgccctccactggctgctgcgctgcacggcagcctctgcagagcggctgcgggaggggctggaggccggcactccagccgctggggagaagcagcttgccatgtgccttcagcgcctggagaaaaccctcagcagcaccaagaaccgggccctgctgcacatcgccaaactagaggaggcctcttcttggactgccatcgagcattctctcttgaaacttggagagatcctggccaatctcagcaacccgcagctccggagtcaggccgagcagtgtggcaccctcattaggagcatccccacgatgctgtctgtgcatgcggagcagatgcacaagaccggcttccccactgtccacgccgtgatcctgctcgagggcaccatgaacctgacaggcgagacgcagtccctggtggagcagctgacgatggtgaagcgcatgcagcatatccccaccccactttttgtcctggagatctggaaagcttgcttcgtggggctcattgagtctcccgagggtacggaggagctcaagtggacagctttcactttcctcaagattccacaggttttggtgaagttgaagaagtactctcatggagacaaggacttcactgaggatgtcaactgtgcttttgagttcctgctgaagctcacccccttgttggacaaagctgaccagcgctgcaactgtgactgtacaaacttcctgctccaagaatgtggcaagcaggggcttctgtctgaggccagcgtcaacaaccttatggctaagcgcaaagcggaccgagagcacgcaccccagcagaaatcgggagagaatgccaacatccagcccaacatccagctgatcctccgggcggagcccactgtcacaaacatcctcaagacgatggatgcagaccactctaagtcaccggagggactgctgggagtcctgggccacatgctgtccgggaagagtctggacttgctgctggctgccgccgccgccactggaaagctgaaatccttcgcccggaaattcatcaatttgaatgaattcacaacctatggcagcgaagaaagcaccaaaccggcctccgtccgggccctgctgtttgacatctccttcctcatgctgtgccatgtggcccagacctatggttcagaggtgattctgtccgagtcgcgcacaggagctgaggtgcccttcttcgagacctggatgcagacctgcatgcctgaggagggcaagatcctgaaccctgaccacccctgcttccgccccgactccaccaaagtggagtccctggtggccctgctcaacaactcctcggagatgaagctagtgcagatgaagtggcatgaggcctgtctcagcatctcagccgccatcttggaaatcctcaatgcctgggagaatggggtcctggccttcgagtccatccagaaaatcactgataacatcaaagggaaggtatgcagtctggcggtgtgtgctgtggcttggcttgtggcccacgtccggatgctggggctggatgagcgtgagaagtcgctgcagatgatccgccagctggcagggccactgtttagtgagaacaccctgcagttctacaatgagagggtggtgatcatgaactcgatcctggagcgcatgtgtgccgacgtgctgcagcagacagccacgcagatcaagtttccctccaccggggtggacacaatgccctactggaacctgctgccccccaagcggcccatcaaagaggtgctgacggacatttttgccaaggtgctggagaagggctgggtggacagccgctccatccacatctttgacaccctgctgcacatgggcggcgtctactggttctgcaacaacctgattaaggagctgctgaaggagacgcggaaggagcacacgctgcgggcagtggagctgctctactccatcttctgcctggacatgcagcaagtgaccctggtcctgctgggccacatcctacctggcctgctcactgactcctccaagtggcacagcctcatggaccccccgggcactgctcttgccaagctggccgtgtggtgtgccctcagttcctactcctcccacaagggacaggcgtccacccgccagaagaagagacaccgcgaagacattgaggattatatcagcctcttccccctggacgatgtgcagccttcgaagttgatgcgactgctgagctctaatgaggacgatgccaacatcctttcgagccccacagaccgatccatgagcagctccctctcagcctctcagctccacacggtcaacatgcgggaccctctgaaccgagtcctggccaacctgttcctgctcatctcctccatcctggggtctcgcaccgctggcccccacacccagttcgtgcagtggttcatggaggagtgtgtggactgcctggagcagggtggccgtggcagcgtcctgcagttcatgcccttcaccaccgtgtcggaactggtgaaggtgtcagccatgtccagccccaaggtggttctggccatcacggacctcagcctgcccctgggccgccaggtggctgctaaagccattgctgcactctgaggggcttggcatggccgcagtgggggctggggactggcgcagccccaggcgcctccaagggaagcagtgaggaaagatgaggcatcgtgcctcacatccgctccacatggtgcaagagcctctagcggcttccagttccccgctcctgactcctgacctccaggatgtctcccggtttcttctttcaaaatttcctctccatctgctggcacctgaggagagtgagcagcctggaccacaagcccagtggtcacccctgtgtgcgcccgccccagcccaggagtagtcttacctctgaggaactttctagatgcaaagtgtgtatgtgtgtgtgtgtgtgtgtgtgtgtgtgtttgtgtgtattttgtaatatgtgagggaaatctaccttcgttcatgtataaataaagctcctcgtggc

SEQ ID NO: 35452 - DNA, 3334 bp, Artificial Sequence
  derived and/or modified sequence
aagtgccaaaatggcgatgcctaccacctagaactggattgtgcgctggccgccaccgctgccacctgctcagagtgaaataatgaaggtggtcaacctgaagcaagccattttgcaagcctggaaggagcgctggagtgactaccaatgggcaatcaacatgaagaaattctttcctaaaggagccacctgggatattctcaacctggcagatgcgttactagagcaggccatgattggaccatcccccaatcctctcatcttgtcctacctgaagtatgccattagttcccagatggtgtcctactcttctgtcctcacagccatcagtaagctgtcacggcaaagcagaggaatgcatcggactgtgccgagcccttcttagcgccctccactggctgctgcgctgcacggcagcctctgcagagcggctgcgggaggggctggaggccggcactccagccgctggggagaagcagcttgccatgtgccttcagcgcctggagaaaaccctcagcagcaccaagaaccgggccctgctgcacatcgccaaactagaggaggcctcttcttggactgccatcgagcattctctcttgaaacttggagagatcctggccaatctcagcaacccgcagctccggagtcaggccgagcagtgtggcaccctcattaggagcatccccacgatgctgtctgtgcatgcggagcagatgcacaagaccggcttccccactgtccacgccgtgatcctgctcgagggcaccatgaacctgacaggcgagacgcagtccctggtggagcagctgacgatggtgaagcgcatgcagcatatccccaccccactttttgtcctggagatctggaaagcttgcttcgtggggctcattgagtctcccgagggtacggaggagctcaagtggacagctttcactttcctcaagattccacaggttttggtgaagttgaagaagtactctcatggagacaaggacttcactgaggatgtcaactgtgcttttgagttcctgctgaagctcacccccttgttggacaaagctgaccagcgctgcaactgtgactgtacaaacttcctgctccaagaatgtggcaagcaggggcttctgtctgaggccagcgtcaacaaccttatggctaagcgcaaagcggaccgagagcacgcaccccagcagaaatcgggagagaatgccaacatccagcccaacatccagctgatcctccgggcggagcccactgtcacaaacatcctcaagacgatggatgcagaccactctaagtcaccggagggactgctgggagtcctgggccacatgctgtccgggaagagtctggacttgctgctggctgccgccgccgccactggaaagctgaaatccttcgcccggaaattcatcaatttgaatgaattcacaacctatggcagcgaagaaagcaccaaaccggcctccgtccgggccctgctgtttgacatctccttcctcatgctgtgccatgtggcccagacctatggttcagaggtgattctgtccgagtcgcgcacaggagctgaggtgcccttcttcgagacctggatgcagacctgcatgcctgaggagggcaagatcctgaaccctgaccacccctgcttccgccccgactccaccaaagtggagtccctggtggccctgctcaacaactcctcggagatgaagctagtgcagatgaagtggcatgaggcctgtctcagcatctcagccgccatcttggaaatcctcaatgcctgggagaatggggtcctggccttcgagtccatccagaaaatcactgataacatcaaagggaaggtatgcagtctggcggtgtgtgctgtggcttggcttgtggcccacgtccggatgctggggctggatgagcgtgagaagtcgctgcagatgatccgccagctggcagggccactgtttagtgagaacaccctgcagttctacaatgagagggtggtgatcatgaactcgatcctggagcgcatgtgtgccgacgtgctgcagcagacagccacgcagatcaagtttccctccaccggggtggacacaatgccctactggaacctgctgccccccaagcggcccatcaaagaggtgctgacggacatttttgccaaggtgctggagaagggctgggtggacagccgctccatccacatctttgacaccctgctgcacatgggcggcgtctactggttctgcaacaacctgattaaggagctgctgaaggagacgcggaaggagcacacgctgcgggcagtggagctgctctactccatcttctgcctggacatgcagcaagtgaccctggtcctgctgggccacatcctacctggcctgctcactgactcctccaagtggcacagcctcatggaccccccgggcactgctcttgccaagctggccgtgtggtgtgccctcagttcctactcctcccacaagggacaggcgtccacccgccagaagaagagacaccgcgaagacattgaggattatatcagcctcttccccctggacgatgtgcagccttcgaagttgatgcgactgctgagctctaatgaggacgatgccaacatcctttcgagccccacagaccgatccatgagcagctccctctcagcctctcagctccacacggtcaacatgcgggaccctctgaaccgagtcctggccaacctgttcctgctcatctcctccatcctggggtctcgcaccgctggcccccacacccagttcgtgcagtggttcatggaggagtgtgtggactgcctggagcagggtggccgtggcagcgtcctgcagttcatgcccttcaccaccgtgtcggaactggtgaaggtgtcagccatgtccagccccaaggtggttctggccatcacggacctcagcctgcccctgggccgccaggtggctgctaaagccattgctgcactctgaggggcttggcatggccgcagtgggggctggggactggcgcagccccaggcgcctccaagggaagcagtgaggaaagatgaggcatcgtgcctcacatccgctccacatggtgcaagagcctctagcggcttccagttccccgctcctgactcctgacctccaggatgtctcccggtttcttctttcaaaatttcctctccatctgctggcacctgaggagagtgagcagcctggaccacaagcccagtggtcacccctgtgtgcgcccgccccagcccaggagtagtcttacctctgaggaactttctagatgcaaagtgtgtatgtgtgtgtgtgtgtgtgtgtgtgtgtgtttg

SEQ ID NO: 35453 - DNA, 1986 bp, Artificial Sequence
  derived and/or modified sequence
aagtgccaaaatggcgatgcctaccacctagaactggattgtgcgctccatttctttcacctcaaagctggccgccaccgctgccacctgctcagagtgaaataatgaaggtggtcaacctgaagcaagccattttgcaagcctggaaggagcgctggagtgactaccaatgggcaatcaacatgaagaaattctttcctaaaggagccacctgggatattctcaacctggcagatgcgttactagagcaggccatgattggaccatcccccaatcctctcatcttgtcctacctgaagtatgccattagttcccagatggtgtcctactcttctgtcctcacagccatcatggaaatcctcaatgcctgggagaatggggtcctggccttcgagtccatccagaaaatcactgataacatcaaagggaaggtatgcagtctggcggtgtgtgctgtggcttggcttgtggcccacgtccggatgctggggctggatgagcgtgagaagtcgctgcagatgatccgccagctggcagggccactgtttagtgagaacaccctgcagttctacaatgagagggtggtgatcatgaactcgatcctggagcgcatgtgtgccgacgtgctgcagcagacagccacgcagatcaagtttccctccaccggggtggacacaatgccctactggaacctgctgccccccaagcggcccatcaaagaggtgctgacggacatttttgccaaggtgctggagaagggctgggtggacagccgctccatccacatctttgacaccctgctgcacatgggcggcgtctactggttctgcaacaacctgattaaggagctgctgaaggagacgcggaaggagcacacgctgcgggcagtggagctgctctactccatcttctgcctggacatgcagcaagtgaccctggtcctgctgggccacatcctacctggcctgctcactgactcctccaagtggcacagcctcatggaccccccgggcactgctcttgccaagctggccgtgtggtgtgccctcagttcctactcctcccacaagggacaggcgtccacccgccagaagaagagacaccgcgaagacattgaggattatatcagcctcttccccctggacgatgtgcagccttcgaagttgatgcgactgctgagctctaatgaggacgatgccaacatcctttcgagccccacagaccgatccatgagcagctccctctcagcctctcagctccacacggtcaacatgcgggaccctctgaaccgagtcctggccaacctgttcctgctcatctcctccatcctggggtctcgcaccgctggcccccacacccagttcgtgcagtggttcatggaggagtgtgtggactgcctggagcagggtggccgtggcagcgtcctgcagttcatgcccttcaccaccgtgtcggaactggtgaaggtgtcagccatgtccagccccaaggtggttctggccatcacggacctcagcctgcccctgggccgccaggtggctgctaaagccattgctgcactctgaggggcttggcatggccgcagtgggggctggggactggcgcagccccaggcgcctccaagggaagcagtgaggaaagatgaggcatcgtgcctcacatccgctccacatggtgcaagagcctctagcggcttccagttccccgctcctgactcctgacctccaggatgtctcccggtttcttctttcaaaatttcctctccatctgctggcacctgaggagagtgagcagcctggaccacaagcccagtggtcacccctgtgtgcgcccgccccagcccaggagtagtcttacctctgaggaactttctagatgcaaagtgtgtatgtgtgtgtgtgtgtgtgtgtgtgtgtgtttgtgtgtattttgtaatatgtgagggaaatctaccttcgttcatgtataaataaagctcctcgtggc

SEQ ID NO: 35454 - DNA, 2256 bp, Artificial Sequence
  derived and/or modified sequence
aagtgccaaaatggcgatgcctaccacctagaactggattgtgcgctccatttctttcacctcaaagctggccgccaccgctgccacctgctcagagtgaaataatgaaggtggtcaacctgaagcaagccattttgcaagcctggaaggagcgctggagtgactaccaatgggcaatcaacatgaagaaattctttcctaaaggagccacctgggatattctcaacctggcagatgcgttactagagcaggccatgattggaccatcccccaatcctctcatcttgtcctacctgaagtatgccattagttcccagatggtgtcctactcttctgtcctcacagccatcagtaagtttgatgacttttctcgggacctgtgtgtccaggcattgctggacatcatggacatgttttgtgaccgtctgagctgtcacggcaaagcagaggaatgcatcggactgtgccgagcccttcttagcgccctccactggctgctgcgctgcacggcagcctctgcagagcggctgcgggaggggctggaggccggcactccagccgctggggagaagcagcttgccatgtgccttcagcgcctggagaaaaccctcagcagcaccaagaaccgggccctgctgcacatcgccaaactagaggaggcctcttcttggactgccatcgagcattctctcttgaaacttggagagatcctggccaatctcagcaacccgcagctccggagtcaggccgagcagtgtggcaccctcattaggagcatccccacgatgctgtctgtgcatgcggagcagatgcacaagaccggcttccccactgtccacgccgtgatcctgctcgagggcaccatgaacctgacaggcgagacgcagtccctggtggagcagcagacagccacgcagatcaagtttccctccaccggggtggacacaatgccctactggaacctgctgccccccaagcggcccatcaaagaggtgctgacggacatttttgccaaggtgctggagaagggctgggtggacagccgctccatccacatctttgacaccctgctgcacatgggcggcgtctactggttctgcaacaacctgattaaggagctgctgaaggagacgcggaaggagcacacgctgcgggcagtggagctgctctactccatcttctgcctggacatgcagcaagtgaccctggtcctgctgggccacatcctacctggcctgctcactgactcctccaagtggcacagcctcatggaccccccgggcactgctcttgccaagctggccgtgtggtgtgccctcagttcctactcctcccacaagggacaggcgtccacccgccagaagaagagacaccgcgaagacattgaggattatatcagcctcttccccctggacgatgtgcagccttcgaagttgatgcgactgctgagctctaatgaggacgatgccaacatcctttcgagccccacagaccgatccatgagcagctccctctcagcctctcagctccacacggtcaacatgcgggaccctctgaaccgagtcctggccaacctgttcctgctcatctcctccatcctggggtctcgcaccgctggcccccacacccagttcgtgcagtggttcatggaggagtgtgtggactgcctggagcagggtggccgtggcagcgtcctgcagttcatgcccttcaccaccgtgtcggaactggtgaaggtgtcagccatgtccagccccaaggtggttctggccatcacggacctcagcctgcccctgggccgccaggtggctgctaaagccattgctgcactctgaggggcttggcatggccgcagtgggggctggggactggcgcagccccaggcgcctccaagggaagcagtgaggaaagatgaggcatcgtgcctcacatccgctccacatggtgcaagagcctctagcggcttccagttccccgctcctgactcctgacctccaggatgtctcccggtttcttctttcaaaatttcctctccatctgctggcacctgaggagagtgagcagcctggaccacaagcccagtggtcacccctgtgtgcgcccgccccagcccaggagtagtcttacctctgaggaactttctagatgcaaagtgtgtatgtgtgtgtgtgtgtgtgtgtgtgtgtgtttgtgtgtattttgtaatatgtgagggaaatctaccttcgttcatgtataaataaagctcctcgtggc

SEQ ID NO: 35455 - DNA, 2931 bp, Artificial Sequence
  derived and/or modified sequence
atgaaggtggtgaacctgaagcaggccatcctgcaggcctggaaggagagatggagtgactaccagtgggctattaacatgaaaaaattctttcccaaaggcgccacttgggacatcctgaacctcgctgacgccctacttgagcaagccatgatcggcccttcaccaaatcctctcatactaagctatttaaagtatgccatttcctctcagttcgacgatttcagccgggatctgtgcgtacaagccctgcttgacatcatggacatgttctgcgacaggctcagttgccatggaaaagcggaggagtgcatcggattgtgcagggctctgctcagcgccctacactggctcttgcgctgcaccgccgcatccgccgaaagactccgagagggactggaggctggcacccccgccgccggagagaagcagctggccatgtgtctgcagagattggaaaagactctgagttcgaccaaaaaccgtgctcttctccacatcgcaaaactggaagaggcgtcttcctggactgctattgagcatagcctcctgaaacttggggagatacttgctaatctgtccaatccgcagctccgttcacaggccgagcagtgtggaacattaattaggtcaatccccactatgctcagcgtgcacgcggaacagatgcacaaaacaggattccctaccgtccatgctgtgatcctgctggagggaacaatgaacctgacaggcgagacccaaagcttagttgagcagctgaccatggttaaacgcatgcaacatattcctacccccttattcgtactggaaatctggaaggcctgctttgtggggctcatcgagagtcccgagggaaccgaggagttgaagtggactgcctttacgttcctgaaaattcctcaggtcttggttaaactcaagaagtattctcatggggataaagattttactgaagatgtaaattgtgcattcgaatttctactgaagctgactccactcctggataaggctgatcagagatgcaattgcgactgtacaaatttcctattgcaagaatgtggcaagcaaggcctgttgtctgaggcatcagtaaacaatcttatggccaagaggaaggccgatagagaacacgccccccagcagaagtctggagaaaacgccaatatccagcccaacattcagctcatactgagagccgaacccacagtgacgaacatcctgaagacgatggacgccgatcacagtaagtctcccgaaggacttctgggggtgctcggacacatgcttagtggcaaatccttagatctgttactcgccgcagctgctgcaaccggcaaactaaagagtttcgccagaaagtttatcaatctgaatgaatttacgacatacggaagtgaggaatcaaccaagcccgcaagtgtccgcgccctcctctttgatatcagcttcctaatgctgtgccatgttgcccagacttatggaagtgaagtcatcctgagcgagagcaggacgggcgcagaggtgcccttcttcgagacttggatgcaaacatgtatgcccgaagaagggaagattttgaatccagaccatccgtgcttccgaccagatagcaccaaagtggagtccctggtggctcttcttaacaattcgagcgagatgaagctggtgcagatgaaatggcatgaggcctgcctctcaattagcgcagccattctggaaatactcaatgcttgggaaaatggcgtgctggcctttgagtcaattcaaaagattactgataacatcaaagggaaggtttgctcactggccgtatgcgctgtagcctggctggtggcccacgttagaatgcttggtctggacgaaagagagaagtcccttcagatgataaggcagcttgcaggtcccttgttctccgaaaatacactccagttctacaatgaaagagtggttattatgaatagcatccttgagaggatgtgcgcggacgttctgcaacagacagccacacagatcaaatttccctccaccggggtcgacaccatgccttattggaatctgctcccccctaaaagaccgatcaaagaggtgctcaccgatatctttgccaaggttctagagaagggctgggtggatagccgcagcatccacatctttgataccctattacatatggggggagtctactggttctgtaataacctcatcaaggagctcctcaaggaaaccagaaaggaacacactcttagagctgtggaacttctctactctattttttgcctcgacatgcagcaggtgactctcgtgctgctgggccatatcttacccggcctgctgactgactctagtaagtggcatagtctcatggacccgccaggaactgcgttagccaagctagccgtttggtgcgcgctgtctagctacagctctcacaagggacaggcttcaacaagacagaagaaacggcacagggaagatatagaagattatatctcactttttccccttgacgatgtgcagcccagcaagctgatgaggttactctctagcaatgaagatgacgccaatattctctcttcccccacggaccgatccatgtcctcatctttgtccgcaagccagctgcatactgttaacatgagggatcctcttaaccgggtattagccaatctgttcctgctaatttcttctattctcggctctcgtaccgccgggccgcacacccagtttgtgcagtggtttatggaagagtgtgtagactgtctcgaacagggtggccgcggatctgtcctgcagttcatgccgtttaccacagttagcgagctcgttaaagtgtcagccatgtcatccccaaaggtagtcctagctattacagatctctctcttcctctcggaagacaggtcgcggcgaaagccattgcagcgctttag

SEQ ID NO: 35456 - DNA, 2700 bp, Artificial Sequence
  derived and/or modified sequence
atgcccctggtgccccggtggtgccccaccctgctgagcagccagccctctgtgtcatgccatggcaaggctgaggaatgtattgggttatgtagggctctcctaagtgctctccactggctcctgagatgtaccgccgcctctgctgagagactgagggagggtctggaggccggtacaccagccgcgggcgagaagcagctggcaatgtgcttgcagcgtctagaaaaaaccctttccagtactaagaacagggcacttctgcatattgcaaagctggaggaggcctcgagctggacggccattgagcacagtctcttgaaactcggcgaaattctggctaatctctccaacccccagctgcgatcgcaggcagagcagtgcggcactctgattagatcaatcccgacgatgctcagcgttcatgctgaacaaatgcacaagacgggcttccccaccgttcatgccgttatcctgttagagggcacaatgaatttgacaggagagacccagtccctggttgagcagctgactatggttaagaggatgcaacatatccccactccccttttcgttctggaaatctggaaggcctgtttcgtagggctgatcgagagcccagaaggcaccgaggagctcaagtggacagctttcacgttccttaagatcccccaagtcctggtgaaactcaagaagtactcccatggagacaaggattttactgaggatgttaactgcgctttcgaattccttctcaagttgactcctttgctggataaagccgaccagaggtgcaactgtgattgcaccaacttcttactgcaggagtgtggaaaacaaggtttacttagtgaggcttccgttaacaacttgatggccaaacgaaaggcagatagagagcacgctccacagcagaaaagcggcgaaaatgcgaatatccagcccaacattcaactgattcttcgggccgagcctactgtgaccaatatactgaagaccatggacgccgaccactcaaaatccccagaggggctgcttggcgtgctgggacatatgctttccggcaaatcactagacctattactggctgccgccgccgctaccggtaagctgaagtcctttgcccggaagttcatcaaccttaacgagttcacaacgtatggcagcgaagagtctactaagccagcaagtgttcgagccctgttatttgacatctccttcctgatgctgtgtcacgttgcccagacatacggatcagaagtcatactgtccgagtccagaacgggagccgaagtgccgtttttcgagacttggatgcaaacatgcatgccggaggagggtaagatcctgaatcccgaccatccatgtttccggcctgatagcaccaaggtggaatctctggtcgccctgctaaacaattccagtgagatgaaattggtgcagatgaagtggcacgaggcttgtctgagcatctcagccgccatcctggagattctgaacgcctgggagaatggcgttctcgcatttgagtccatccagaaaatcaccgataatatcaagggaaaggtctgtagtctggctgtatgtgcagtcgcctggttagtggcgcatgtgcggatgcttggactcgatgaacgtgagaagtccctgcagatgatcagacagctggctgggccgttattcagcgaaaataccctgcagttttataacgaacgtgttgtcataatgaactccattctggaacgcatgtgtgccgatgtgcttcagcagactgcaacccagattaagttcccttctacaggcgttgacaccatgccgtactggaatttactcccccccaagagaccaatcaaggaagtgctgacagacatatttgccaaagtgctggaaaaaggatgggtggacagcaggagcatccatatcttcgacacgcttttacacatggggggggtgtattggttttgtaataacctaatcaaagaacttctgaaagaaacaagaaaggaacacacactcagggccgtggagcttctgtattcaattttctgtctagacatgcagcaggtcacactggttcttctggggcatatcctccctggcctgttgactgattcctcaaagtggcactcactaatggacccgcctgggacagccctcgccaaattggccgtctggtgtgccctgtcatcatacagcagccacaaagggcaggcctctactaggcagaagaaaagacatcgcgaggatattgaggactatatctctttattccccctggacgatgtgcagccgtccaagctcatgaggctcttgagcagcaatgaagacgatgctaacatactgagctctcctactgacaggagtatgtcatcctcactctcagcgtctcagctgcatactgttaacatgcgcgatcccctcaacagagtgctcgccaatctgttcctgttaattagttctatactcggcagcagaacagcgggtccccacacacagttcgttcaatggttcatggaggaatgtgtggattgccttgaacagggcgggcgcggatccgtgctgcagttcatgccgttcacgactgtgagcgagctggttaaggtgtcagcaatgtcctcgcccaaagtggtgctggccatcaccgatctctccctgccacttggacggcaggtcgccgccaaagccatcgctgctctgtag

SEQ ID NO: 35457 - DNA, 2931 bp, Artificial Sequence
  derived and/or modified sequence
atgaaggtagttaacctgaaacaggcaattcttcaggcttggaaagagcgttggagcgactatcagtgggcgatcaacatgaaaaagtttttccccaaaggcgctacatgggacattttaaacctcgccgatgctctgctggaacaggccatgatcggccctagccccaatccactcattctgagctacttgaaatatgcaatcagctctcagttcgacgatttttccagagatctgtgtgtgcaagccctcctggacataatggatatgttctgtgacaggctgtcatgccacggtaaggctgaagaatgcatcggactctgccgagcgctgctgtctgctctgcactggttactgaggtgtactgcagcatcggccgaaagactgcgggagggactggaagctggcacaccagccgcaggtgaaaaacagctcgccatgtgtcttcagcgcctagagaaaaccctatcctctactaagaatagggctctgcttcacattgcaaaactcgaagaagcttcctcctggactgcgatcgagcacagcctgctgaaactgggcgagatcctcgccaatctctctaacccacagcttcgcagccaagccgagcaatgtggcactcttatacggtcaattcccactatgctctcagtgcatgctgaacagatgcacaaaacaggatttcctacagtgcatgccgtgatcttgctcgaggggacaatgaacttgactggcgaaacacagtccctagtcgagcagctgacaatggtcaagcgtatgcagcatatcccgaccccgctcttcgtgctcgaaatttggaaagcatgtttcgttggcctcattgagtcccccgagggcacagaggagctgaagtggactgccttcaccttcttgaagatccctcaggtcctggtcaagctgaagaagtacagtcacggggacaaagattttactgaagacgtgaattgtgcttttgagttcctgcttaagctgacccctctcctggataaggccgatcagaggtgcaactgcgactgcacaaactttctgctacaggagtgcggcaagcagggactgctgtctgaagctagtgtcaacaacttgatggctaaaagaaaggccgatcgcgaacacgcacctcaacagaagtcgggcgagaacgcgaatatccagcctaacattcagctgatcttgcgcgctgagcctaccgttactaacattcttaaaaccatggatgctgatcactcaaagagcccagagggcctgctgggcgtgctaggccacatgctgtccggaaagtccctcgacctcctgttagctgccgcagctgcaactggcaagctgaagagctttgcccgaaaattcataaacctgaacgagttcaccacatatggtagtgaggagagcactaaaccagcatccgtaagggccctattgttcgatatcagtttcctgatgctgtgtcacgtcgcccagacatacggcagtgaggttattttgtctgaatctagaacaggggctgaagtgcctttcttcgagacatggatgcaaacgtgcatgccagaggaaggcaagatcctcaatccagaccatccctgcttcagaccggattcgacaaaggtggagtctctggtggctctcctgaacaactcatcggagatgaagctggtgcaaatgaaatggcacgaagcttgcctgtccattagcgctgcaatactggagatacttaatgcttgggagaacggcgtgctcgccttcgagtctatacagaaaattacagataatatcaagggtaaggtgtgttctctggctgtgtgtgcagttgcctggcttgtggcccacgtgcggatgcttggacttgacgagagggagaagagtcttcaaatgatacgacagcttgcaggaccccttttttcagagaatactttacagttttataatgaacgggtggttatcatgaactccatactcgaaaggatgtgcgccgacgtgctgcaacagacggctactcagattaagtttccgagtactggcgtcgacacgatgccttactggaatctgttgccacctaaacgtcctattaaagaggtgctgaccgatatctttgctaaagttcttgaaaaaggctgggtggactcacgtagcatccatatattcgacactttactgcatatggggggagtgtactggttttgtaacaacttaatcaaggagctgttaaaagaaaccaggaaggagcataccttacgcgcagtagaattattgtattctatcttttgcttggatatgcagcaggttaccctggtgctcctgggtcatatcctgccgggactcctgacagattcgtctaagtggcacagtttaatggacccccctgggaccgccctcgcgaagttggcggtgtggtgtgccctttcttcgtacagctctcataaaggtcaggcctccactcgccaaaaaaaaagacaccgggaagacattgaagactatattagcctctttcctttagatgacgtgcagccgtccaaattaatgcgcctgttgagctccaacgaagatgatgcgaacattttgtcctcaccgaccgaccggtcaatgagcagctccctttctgcctctcagttgcacactgtaaatatgcgcgacccactgaatagggtgctcgccaatctattcttgctcatttcttccatcctggggagccgaacggcgggaccccacacacaatttgtccagtggtttatggaggagtgcgttgattgtctagaacagggaggtcggggatcagttcttcaattcatgccatttactactgtttcagaactcgtaaaggtgtccgccatgtcgagtcctaaggttgtgctggctataaccgatctgagccttcctctcggccgtcaggtggctgcaaaagccatcgcagctctgtag

SEQ ID NO: 35458 - DNA, 2700 bp, Artificial Sequence
  derived and/or modified sequence
atgcctctggtgccacgctggtgtccaaccctgttgtcgtcccagcccagcgtcagttgtcatgggaaggcagaggaatgcattggactgtgtagggctcttctgagcgccctgcattggctgctgcgctgtactgccgctagtgccgaaaggctgcgagagggattggaagccggaactccagccgcaggagaaaagcagctggccatgtgtctgcagcggctggagaagacactcagcagtaccaagaatcgggctctgctgcacattgctaagttagaagaggccagttcttggaccgccatcgagcattctctgctgaaactgggcgagatattagcaaatctcagcaacccacaactcaggtcacaagccgaacagtgtggaacgctgataagatccataccaacaatgctgagcgtgcatgctgagcagatgcataaaactgggttccctaccgttcatgctgttatcctgctggaaggaacgatgaacctcaccggcgaaacgcagtctctggttgagcagttaacaatggtcaagaggatgcagcacatacctactcctcttttcgtgttggaaatctggaaagcttgctttgtagggttgatagagtcccctgaaggtacagaggagctgaaatggacagcgtttacttttcttaagatcccccaggtcctggtgaagctcaagaagtatagtcacggcgacaaggatttcacagaggacgtcaattgtgctttcgagttcctgctcaagctgacccctctgcttgataaggctgaccagagatgcaactgcgattgcaccaacttcttgctgcaagagtgcgggaagcagggcctgctgtcagaggcgagcgtgaacaacctgatggctaagaggaaggccgaccgcgagcatgctccccaacagaagagtggagagaatgccaacatccagccaaacatccagttgatcttaagagccgagcctactgttactaacattctgaagacaatggacgccgatcattcaaagagtccagaaggactgctgggggtgctgggtcacatgctctcaggcaagtccctagacctactgctggcagctgctgctgcgacaggtaagctgaaatcctttgcacgaaagttcataaatttgaatgagttcaccacctacgggtcagaagagagcaccaaacctgcaagtgtacgcgcattgctgttcgatatcagctttctcatgctatgccacgtcgcgcaaacctacggtagcgaggtcatcctgtctgagtcacgcacaggcgctgaggtcccatttttcgagacatggatgcagacttgcatgccagaagagggaaaaattctgaatcccgatcacccttgcttccgtcccgactcaactaaggttgagagcttagtggcgctcttgaataatagtagtgaaatgaagctagtgcagatgaaatggcatgaagcttgtttatctattagcgcagcaatccttgaaatcttaaacgcgtgggagaatggggtcctcgcgtttgagtctatccaaaaaatcacagacaatatcaaggggaaggtatgttccctcgctgtatgtgcagtggcgtggctggtggctcatgtgcgcatgctcggattggatgagcgggagaaaagcttgcaaatgatacggcagctcgccggaccactgttctcagaaaatacactgcagttctacaatgaacgcgtagtgatcatgaattcaatcctcgagcgaatgtgcgcagacgttctgcagcagaccgctacccaaatcaagttccccagcaccggtgttgataccatgccgtactggaacctgcttcctcccaagcgacccatcaaagaagtgctgaccgatatcttcgctaaggtactggaaaagggctgggtagactcaagatcaatacatatcttcgatacactcctccacatgggcggtgtttactggttttgtaataatcttattaaggagttgctgaaggagactagaaaagaacacactctgcgcgcagtcgagcttttatactctatcttttgcctcgatatgcagcaggtcacactggttctactcggtcacattctccccggacttctaaccgatagttcaaagtggcacagcctgatggatcctccaggaaccgccctggctaagctggctgtgtggtgtgccctgtcttcctacagttcccacaaggggcaggcttctactcggcagaagaagcgccaccgggaggatattgaagactatatctctctgtttccactggatgacgtgcagcccagtaaactgatgcggcttctcagctccaatgaagatgacgcaaacatcctgagctcccccacagatcgttccatgagttcgtccttgtcagcctcacagctccacacagtgaatatgagagatcccctgaatcgtgtgttggcaaatctgtttctgctgatttcctctatccttggcagcagaaccgccggaccacacactcagttcgtacaatggttcatggaagaatgtgtcgattgcttagaacagggtgggcgaggatccgtacttcagttcatgcccttcacaacagtttccgaactggtgaaagtctctgcaatgtcttcccctaaggtggtcttggcaattactgacttaagcctgccactcggcagacaggtcgcagccaaggcaatcgctgcgctttag

SEQ ID NO: 35459 - DNA, 2931 bp, Artificial Sequence
  derived and/or modified sequence
atgaaggtggtgaacctgaagcaggccatcctgcaggcctggaaggagagatggagcgactaccagtgggccatcaacatgaagaagttcttccccaagggcgccacctgggacatcctgaacctggccgacgccctgctggagcaggccatgatcggccccagccccaaccccctgatcctgagctacctgaagtacgccatcagcagccagttcgacgacttcagcagagacctgtgcgtgcaggccctgctggacatcatggacatgttctgcgacagactgagctgccacggcaaggccgaggagtgcatcggcctgtgcagagccctgctgagcgccctgcactggctgctgagatgcaccgccgccagcgccgagagactgagagagggcctggaggccggcacccccgccgccggcgagaagcagctggccatgtgcctgcagagactggagaagaccctgagcagcaccaagaacagagccctgctgcacatcgccaagctggaggaggccagcagctggaccgccatcgagcacagcctgctgaagctgggcgagatcctggccaacctgagcaacccccagctgagaagccaggccgagcagtgcggcaccctgatcagaagcatccccaccatgctgagcgtgcacgccgagcagatgcacaagaccggcttccccaccgtgcacgccgtgatcctgctggagggcaccatgaacctgaccggcgagacccagagcctggtggagcagctgaccatggtgaagagaatgcagcacatccccacccccctgttcgtgctggagatctggaaggcctgcttcgtgggcctgatcgagagccccgagggcaccgaggagctgaagtggaccgccttcaccttcctgaagatcccccaggtgctggtgaagctgaagaagtacagccacggcgacaaggacttcaccgaggacgtgaactgcgccttcgagttcctgctgaagctgacccccctgctggacaaggccgaccagagatgcaactgcgactgcaccaacttcctgctgcaggagtgcggcaagcagggcctgctgagcgaggccagcgtgaacaacctgatggccaagagaaaggccgacagagagcacgccccccagcagaagagcggcgagaacgccaacatccagcccaacatccagctgatcctgagagccgagcccaccgtgaccaacatcctgaagaccatggacgccgaccacagcaagagccccgagggcctgctgggcgtgctgggccacatgctgagcggcaagagcctggacctgctgctggccgccgccgccgccaccggcaagctgaagagcttcgccagaaagttcatcaacctgaacgagttcaccacctacggcagcgaggagagcaccaagcccgccagcgtgagagccctgctgttcgacatcagcttcctgatgctgtgccacgtggcccagacctacggcagcgaggtgatcctgagcgagagcagaaccggcgccgaggtgcccttcttcgagacctggatgcagacctgcatgcccgaggagggcaagatcctgaaccccgaccacccctgcttcagacccgacagcaccaaggtggagagcctggtggccctgctgaacaacagcagcgagatgaagctggtgcagatgaagtggcacgaggcctgcctgagcatcagcgccgccatcctggagatcctgaacgcctgggagaacggcgtgctggccttcgagagcatccagaagatcaccgacaacatcaagggcaaggtgtgcagcctggccgtgtgcgccgtggcctggctggtggcccacgtgagaatgctgggcctggacgagagagagaagagcctgcagatgatcagacagctggccggccccctgttcagcgagaacaccctgcagttctacaacgagagagtggtgatcatgaacagcatcctggagagaatgtgcgccgacgtgctgcagcagaccgccacccagatcaagttccccagcaccggcgtggacaccatgccctactggaacctgctgccccccaagagacccatcaaggaggtgctgaccgacatcttcgccaaggtgctggagaagggctgggtggacagcagaagcatccacatcttcgacaccctgctgcacatgggcggcgtgtactggttctgcaacaacctgatcaaggagctgctgaaggagaccagaaaggagcacaccctgagagccgtggagctgctgtacagcatcttctgcctggacatgcagcaggtgaccctggtgctgctgggccacatcctgcccggcctgctgaccgacagcagcaagtggcacagcctgatggacccccccggcaccgccctggccaagctggccgtgtggtgcgccctgagcagctacagcagccacaagggccaggccagcaccagacagaagaagagacacagagaggacatcgaggactacatcagcctgttccccctggacgacgtgcagcccagcaagctgatgagactgctgagcagcaacgaggacgacgccaacatcctgagcagccccaccgacagaagcatgagcagcagcctgagcgccagccagctgcacaccgtgaacatgagagaccccctgaacagagtgctggccaacctgttcctgctgatcagcagcatcctgggcagcagaaccgccggcccccacacccagttcgtgcagtggttcatggaggagtgcgtggactgcctggagcagggcggcagaggcagcgtgctgcagttcatgcccttcaccaccgtgagcgagctggtgaaggtgagcgccatgagcagccccaaggtggtgctggccatcaccgacctgagcctgcccctgggcagacaggtggccgccaaggccatcgccgccctgtag

SEQ ID NO: 35460 - DNA, 2700 bp, Artificial Sequence
  derived and/or modified sequence
atgcccctggtgcccagatggtgccccaccctgctgagcagccagcccagcgtgagctgccacggcaaggccgaggagtgcatcggcctgtgcagagccctgctgagcgccctgcactggctgctgagatgcaccgccgccagcgccgagagactgagagagggcctggaggccggcacccccgccgccggcgagaagcagctggccatgtgcctgcagagactggagaagaccctgagcagcaccaagaacagagccctgctgcacatcgccaagctggaggaggccagcagctggaccgccatcgagcacagcctgctgaagctgggcgagatcctggccaacctgagcaacccccagctgagaagccaggccgagcagtgcggcaccctgatcagaagcatccccaccatgctgagcgtgcacgccgagcagatgcacaagaccggcttccccaccgtgcacgccgtgatcctgctggagggcaccatgaacctgaccggcgagacccagagcctggtggagcagctgaccatggtgaagagaatgcagcacatccccacccccctgttcgtgctggagatctggaaggcctgcttcgtgggcctgatcgagagccccgagggcaccgaggagctgaagtggaccgccttcaccttcctgaagatcccccaggtgctggtgaagctgaagaagtacagccacggcgacaaggacttcaccgaggacgtgaactgcgccttcgagttcctgctgaagctgacccccctgctggacaaggccgaccagagatgcaactgcgactgcaccaacttcctgctgcaggagtgcggcaagcagggcctgctgagcgaggccagcgtgaacaacctgatggccaagagaaaggccgacagagagcacgccccccagcagaagagcggcgagaacgccaacatccagcccaacatccagctgatcctgagagccgagcccaccgtgaccaacatcctgaagaccatggacgccgaccacagcaagagccccgagggcctgctgggcgtgctgggccacatgctgagcggcaagagcctggacctgctgctggccgccgccgccgccaccggcaagctgaagagcttcgccagaaagttcatcaacctgaacgagttcaccacctacggcagcgaggagagcaccaagcccgccagcgtgagagccctgctgttcgacatcagcttcctgatgctgtgccacgtggcccagacctacggcagcgaggtgatcctgagcgagagcagaaccggcgccgaggtgcccttcttcgagacctggatgcagacctgcatgcccgaggagggcaagatcctgaaccccgaccacccctgcttcagacccgacagcaccaaggtggagagcctggtggccctgctgaacaacagcagcgagatgaagctggtgcagatgaagtggcacgaggcctgcctgagcatcagcgccgccatcctggagatcctgaacgcctgggagaacggcgtgctggccttcgagagcatccagaagatcaccgacaacatcaagggcaaggtgtgcagcctggccgtgtgcgccgtggcctggctggtggcccacgtgagaatgctgggcctggacgagagagagaagagcctgcagatgatcagacagctggccggccccctgttcagcgagaacaccctgcagttctacaacgagagagtggtgatcatgaacagcatcctggagagaatgtgcgccgacgtgctgcagcagaccgccacccagatcaagttccccagcaccggcgtggacaccatgccctactggaacctgctgccccccaagagacccatcaaggaggtgctgaccgacatcttcgccaaggtgctggagaagggctgggtggacagcagaagcatccacatcttcgacaccctgctgcacatgggcggcgtgtactggttctgcaacaacctgatcaaggagctgctgaaggagaccagaaaggagcacaccctgagagccgtggagctgctgtacagcatcttctgcctggacatgcagcaggtgaccctggtgctgctgggccacatcctgcccggcctgctgaccgacagcagcaagtggcacagcctgatggacccccccggcaccgccctggccaagctggccgtgtggtgcgccctgagcagctacagcagccacaagggccaggccagcaccagacagaagaagagacacagagaggacatcgaggactacatcagcctgttccccctggacgacgtgcagcccagcaagctgatgagactgctgagcagcaacgaggacgacgccaacatcctgagcagccccaccgacagaagcatgagcagcagcctgagcgccagccagctgcacaccgtgaacatgagagaccccctgaacagagtgctggccaacctgttcctgctgatcagcagcatcctgggcagcagaaccgccggcccccacacccagttcgtgcagtggttcatggaggagtgcgtggactgcctggagcagggcggcagaggcagcgtgctgcagttcatgcccttcaccaccgtgagcgagctggtgaaggtgagcgccatgagcagccccaaggtggtgctggccatcaccgacctgagcctgcccctgggcagacaggtggccgccaaggccatcgccgccctgtag

SEQ ID NO: 35461 - DNA, 642 bp, Artificial Sequence
  derived and/or modified sequence
atggaccaggagcccgtgggcggcgtggagagaggcgaggccgtggccgccagcggcgccgccgccgccgccgccttcggcgagagcgccggccagatgagcaacgagagaggcttcgagaacgtggagctgggcgtgatcggcaagaagaagaaggtgcccagaagagtgatccacttcgtgagcggcgagaccatggaggagtacagcaccgacgaggacgaggtggacggcctggagaagaaggacgtgctgcccaccgtggaccccaccaagctgacctggggcccctacctgtggttctacatgctgagagccgccaccagcaccctgagcgtgtgcgacttcctgggcgagaagatcgccagcgtgctgggcatcagcacccccaagtaccagtacgccatcgacgagtactacagaatgaagaaggaggaggaggaggaggaggaggagaacagaatgagcgaggaggccgagaagcagtaccagcagaacaagctgcagaccgacagcatcgtgcagaccgaccagcccgagaccgtgatcagcagcagcttcgtgaacgtgaacttcgagatggagggcgacagcgaggtgatcatggagagcaagcagaaccccgtgagcgtgcccccctag

SEQ ID NO: 35462 - DNA, 231 bp, Artificial Sequence
  derived and/or modified sequence
atggaccaggagcccgtgggcggcgtggagagaggcgaggccgtggccgccagcggcgccgccgccgccgccgccttcggcgagagcgccggccagatgagcaacgagagaggcttcgagaacgtggagctgggcgtgatcggcaagaagaagaaggtgcccagaagagtgatccacttcgtgagcggcgagaccatggaggagtacagcaccgacgaggacgaggtgtag

SEQ ID NO: 35463 - DNA, 642 bp, Artificial Sequence
  derived and/or modified sequence
atggaccaggagcccgtgggtggggtggagcgaggcgaagcggttgctgcctcaggagccgccgccgcagccgcctttggcgagagcgcaggacagatgagtaatgaacgtggatttgagaatgtggagttgggagtgatcggcaagaaaaagaaagtaccacgaagggttattcacttcgtcagtggagaaacaatggaagaatacagcaccgatgaggacgaggtcgatggactggagaagaaggacgtcctccctaccgtggacccaaccaagctgacatggggcccttatctttggttctatatgctccgtgcagcaacatcaactctgagtgtgtgcgactttttgggtgaaaagattgcttctgttctaggcataagtacgcctaagtatcaatacgctatcgacgagtactacagaatgaagaaggaagaagaggaagaggaagaggaaaatcgcatgtcggaagaggccgaaaaacagtatcagcaaaataaattgcagactgattccatcgtgcagacagaccagcctgaaaccgttatcagtagttcattcgtgaatgtgaattttgaaatggagggagactcagaagttattatggagtctaaacagaacccggttagcgtccccccctag

SEQ ID NO: 35464 - DNA, 642 bp, Artificial Sequence
  derived and/or modified sequence
atggaccaggagccagtcgggggagtggaaagaggagaagccgttgctgcctctggtgccgccgccgccgcagctttcggtgagagtgcaggtcagatgtccaatgagagaggttttgagaacgtggaactcggagtgatcggaaaaaagaagaaggtacctaggcgcgttatccacttcgtctccggggagactatggaggagtattccaccgacgaagatgaggtggatggacttgaaaagaaggacgtcctccctactgtcgacccgaccaagctgacatggggcccgtacttgtggttctacatgctccgggctgctactagtaccctcagcgtgtgcgattttctcggagaaaagattgctagtgtgcttggcattagcaccccaaaatatcagtacgctatcgatgaatattaccgaatgaagaaggaagaagaggaagaggaggaagagaatcgcatgtccgaggaggccgaaaagcagtaccagcagaacaagctgcagaccgattccatcgtgcaaactgatcagccagagacagtcatttccagcagctttgtgaacgtgaattttgagatggaaggagatagcgaggtgattatggagtctaagcagaatccggtctcagtgcccccttag

SEQ ID NO: 35465 - DNA, 231 bp, Artificial Sequence
  derived and/or modified sequence
atggaccaggaacctgtaggaggggtcgagcgtggggaagctgtcgccgccagtggcgcagctgctgcggctgcgtttggcgagagtgccggccagatgagcaatgagcgcggctttgagaacgtggagctaggggttatcgggaaaaaaaagaaagtcccgcgccgggtgattcactttgtctccggagagactatggaggagtacagtactgacgaggacgaggtgtag

SEQ ID NO: 35466 - DNA, 642 bp, Artificial Sequence
  derived and/or modified sequence
atggaccaggagcctgtgggcggcgtggagcggggggaggccgtggccgccagcggggctgctgctgctgctgccttcggggagagcgctggccagatgagcaatgaaagaggatttgaaaatgtggagctgggcgtgattggcaagaagaagaaggtgcccaggagggtcatccactttgtgtctggagagaccatggaggagtacagcacagatgaagatgaggtggatggcctggagaagaaggatgtgctgcccaccgtggaccccaccaagctgacctggggcccctacctgtggttctacatgctgcgggccgccaccagcaccctgtctgtgtgtgacttcctgggggagaagatcgcctctgtgctgggcatcagcacccccaagtaccagtatgccattgatgagtactacaggatgaagaaggaggaggaggaggaggaggaggagaacaggatgtctgaggaggccgagaagcagtaccagcagaacaagctgcagacagacagcatcgtgcagacagaccagcctgagaccgtcatcagcagcagctttgtgaatgtgaactttgagatggagggggacagcgaggtgatcatggagagcaagcagaaccctgtgtctgtgcccccatag

SEQ ID NO: 35467 - DNA, 231 bp, Artificial Sequence
  derived and/or modified sequence
atggaccaggagcctgtgggcggcgtggagcggggggaggccgtggccgccagcggggctgctgctgctgctgccttcggggagagcgctggccagatgagcaatgaaagaggatttgaaaatgtggagctgggcgtgattggcaagaagaagaaggtgcccaggagggtcatccactttgtgtctggagagaccatggaggagtacagcacagatgaagatgaggtgtag

SEQ ID NO: 35468 - DNA, 642 bp, Artificial Sequence
  derived and/or modified sequence
atggaccaggagcccgtgggcggcgtggagcggggcgaggccgtggccgcctctggcgccgcagcagccgccgccttcggggaatctgccggacagatgtcaaatgagcgtgggtttgaaaacgtggaacttggtgtgatcggaaagaaaaaaaaagttccccggagagtcatccacttcgtttccggcgagacgatggaggagtatagcacggatgaggacgaggttgacggattggaaaagaaggacgtattgcccaccgtagacccgaccaaactgacctggggaccatacctatggttttacatgctgagagctgccacatccactttgagtgtgtgtgatttccttggggagaaaatcgcctccgtgctgggcatcagcacccccaagtatcagtacgccattgacgaatactatcgcatgaagaaggaggaagaagaagaggaagaggaaaatcggatgagcgaggaggctgagaaacagtatcaacagaataagcttcagaccgactcgattgtacagaccgatcagccggagacagtgattagtagctcttttgtgaatgtcaattttgaaatggaaggagatagcgaggttatcatggaatctaagcaaaatccagtgagcgttccaccatag

SEQ ID NO: 35469 - DNA, 642 bp, Artificial Sequence
  derived and/or modified sequence
atggaccaggagcccgtgggcggcgtggagcggggcgaggccgtggcagcaagtggagccgccgctgccgcggccttcggtgagagtgccggtcagatgtccaatgaaagaggcttcgaaaatgtggagctgggagtaattggtaaaaagaagaaagtgcccaggagagtgatccacttcgtgtccggagagacaatggaggaatattctacagacgaagatgaggtagacggactggaaaagaaggacgtcctacccactgtggaccctactaaacttacatggggaccatatctatggttctacatgttaagagccgctacaagcacgctttcagtgtgcgatttccttggtgaaaagatcgcctcagtacttggcatatctacccccaagtaccagtatgcaattgatgagtactatcgcatgaaaaaggaagaggaagaggaagaggaagaaaatcgcatgtcagaggaagcagagaaacaatatcagcagaacaagctgcagacagactctatagtacagactgaccaacctgagactgtgatctcatccagtttcgttaatgtcaattttgaaatggagggggattcagaggtcataatggagtccaaacagaaccccgtaagcgtaccgccttag

SEQ ID NO: 35470 - DNA, 231 bp, Artificial Sequence
  derived and/or modified sequence
atggaccaggagcccgtgggcggcgtggagcggggcgaggccgtggccgcaagcggggccgccgctgccgccgccttcggtgagtctgccgggcagatgtcaaatgaacggggattcgagaatgtcgaactaggggttattggaaagaaaaaaaaagtccccagacgggtgatccatttcgtctccggggagacaatggaggagtatagcactgatgaggatgaagtctag

SEQ ID NO: 35471 - DNA, 642 bp, Artificial Sequence
  derived and/or modified sequence
atggatcaagagcccgtcgggggtgtggaacgaggcgaagctgtggcggcaagtggagccgctgcagccgcagctttcggagaatctgctgggcagatgagtaatgaaagagggtttgagaatgtggagctgggagttatcggaaagaagaagaaggtcccaagacgggttattcattttgtgtctggggaaacaatggaagagtactctacagacgaggatgaagttgatggcctggagaagaaggatgtgcttccgaccgtggaccctaccaaactgacctggggtccttatctctggttctatatgttgagagcagctacctctactctgtcagtgtgcgactttctgggggagaagatcgcttcagtcctcggaataagcaccccaaaatatcaatacgctatcgacgaatattaccgtatgaagaaagaggaggaagaggaagaagaagagaaccgcatgtccgaggaagccgagaagcagtaccagcagaacaagcttcagacggactccatcgtacaaactgaccaacccgaaacggtcatttcatcgagcttcgtaaatgtgaatttcgagatggaaggcgattcagaggtgattatggagtctaagcaaaatcctgtgagcgtccctccatag

SEQ ID NO: 35472 - DNA, 642 bp, Artificial Sequence
  derived and/or modified sequence
atggatcaggaacctgttggcggagtcgaaaggggagaggccgtcgctgcttcaggtgcggcagccgctgccgcttttggcgagagcgccggtcagatgagtaatgaaaggggtttcgaaaatgtcgaactgggcgtgatcggcaagaagaaaaaggtgcccaggagagtgatacatttcgtgagcggcgaaacaatggaagagtactctacagatgaggatgaggtggacggtttagagaagaaggatgtgttaccgaccgtcgatccaactaagctgacatgggggccatatctctggttctacatgctaagagccgctacaagcacgctgagcgtctgcgacttcttgggcgagaagatcgcttcagtgctgggtatctccactcccaagtatcagtatgctatcgatgagtactataggatgaagaaggaagaagaggaggaggaggaggaaaatagaatgtctgaggaggccgagaagcaatatcagcagaacaagctgcagaccgatagtattgttcaaactgatcagcccgagacggtaatttcaagcagcttcgtgaatgtcaactttgaaatggaaggagattccgaagttataatggagtccaagcagaatcctgtgtcagtacccccatag

SEQ ID NO: 35473 - DNA, 231 bp, Artificial Sequence
  derived and/or modified sequence
atggaccaagaaccagtcggtggagtagaacgtggagaggctgtggcggcttcaggcgcagccgctgctgccgcattcggcgaatctgcgggacagatgtctaatgaacgagggttcgagaacgtcgagctgggcgtgattggcaagaaaaagaaagtacctcggcgtgtaatccactttgtgagcggtgagactatggaagagtattctactgacgaggacgaagtctag

SEQ ID NO: 35474 - protein, 799 aa, Artificial Sequence
  derived and/or modified sequence
MKPSPAGTAKELEPPAPARGEQRTAEPEGRWREKGEADTERQRTRERQEATLAGLAELEYLRQRQELLVRGALRGAGGAGAAAPRAGELLGEAAQRSRLEEKFLEENILLLRKQLNCLRRRDAGLLNQLQELDKQISDLRLDVEKTSEEHLETDSRPSSGFYELSDGASGSLSNSSNSVFSECLSSCHSSTCFCSPLEATLSLSDGCPKSADVNPKYQCDLVSKNGNDVYRYPSPLHAVAVQSPMFLLCLTGNPLREEDRLGNHASDICGGSELDAVKTDSSLPSPSSLWSASHPSSSKKMDGYILSLVQKKTHPVRTNKPRTSVNADPTKGLLRNGSVCVRAPGGVSQGNSVNLKNSKQACLPSGGIPSLNNGTFSPPKQWSKESKAEQAESKRVPLPEGCPSGAASDLQSKHLPKTAKPASQEHARCSAIGTGESPKESAQLSGASPKESPSRGPAPPQENKVVQPLKKMSQKNSLQGVPPATPPLLSTAFPVEERPALDFKSEGSSQSLEEAHLVKAQFIPGQQPSVRLHRGHRNMGVVKNSSLKHRGPALQGLENGLPTVREKTRAGSKKCRFPDDLDTNKKLKKASSKGRKSGGGPEAGVPGRPAGGGHRAGSRAHGHGREAVVAKPKHKRTDYRRWKSSAEISYEEALRRARRGRRENVGLYPAPVPLPYASPYAYVASDSEYSAECESLFHSTVVDTSEDEQSNYTTNCFGDSESSVSEGEFVGESTTTSDSEESGGLIWSQFVQTLPIQTVTAPDLHNHPAKTFVKIKASHNLKKKILRFRSGSLKLMTTV

SEQ ID NO: 35475 - DNA, 2400 bp, Artificial Sequence
  derived and/or modified sequence
atgaagccatcgccagcgggaactgcaaaggagctggagccgcctgcaccagcccggggagaacagcgcacagctgaacccgaaggcagatggagagaaaaaggcgaggcggacactgagagacagcgtacacgggaacggcaagaggccacattggccggcctcgccgagctggaatacctgaggcagcgccaggagctgctcgttcggggtgcactacgcggcgctggcggggcaggggcagcggcaccgagagcaggtgaattgttgggtgaagcagcccaacgcagccggcttgaggaaaagttcctagaggagaacatcctgctgctccggaagcagctgaattgcctgcggagacgggacgctgggctgcttaatcagctacaagaactggacaagcagatttccgacttgaggctcgatgtcgagaaaactagtgaagagcacctggagaccgattcaagaccgagcagcgggttttacgagttgagtgacggagcctcagggtccttgagcaactcatccaacagcgtgttctcagaatgcctgagtagctgtcacagtagtacatgtttttgtagccccttggaggcgaccctatcactgagtgacggctgcccaaaatctgctgacgtgaatcccaagtaccagtgtgacttagtctctaagaacggaaatgacgtgtaccgctatccatctccccttcacgccgttgccgtgcagagcccgatgtttctcctgtgcctgaccggcaacccactgagagaggaagacagactgggcaaccatgcctctgatatttgcggaggaagcgagctggacgccgtgaagacagattcatctctaccctcaccgagttcattgtggtctgccagccatccttctagtagcaaaaagatggacggatatattttgagtttagtgcaaaaaaaaactcaccctgtgcgcaccaataaaccacgaacaagtgtcaacgctgacccaaccaaaggacttctgcgtaatggatcggtatgcgtacgcgcaccaggaggagtatcccagggtaacagcgtaaatctgaagaactccaagcaggcctgcctgccctcagggggaatccccagcttgaataatggtactttttcaccccctaaacaatggtcaaaggagagcaaagccgagcaagctgagtcaaagcgagtgcccctccctgaaggctgtccaagcggagctgcctccgacttgcagagtaaacatctgcctaagacagccaagccggcctctcaagaacacgcgagatgctctgcaatcggaacaggtgagagtccaaaggagagtgcgcaactttccggcgcctctccaaaagaatctccgagcagaggtcctgctccaccccaggagaacaaggtcgtccagcccctgaagaaaatgtctcagaaaaactcccttcagggggtgccacccgctacacccccactactttccaccgccttcccagtggaggaacgccccgccctggatttcaaaagcgagggatcttcgcaatcccttgaggaggcacacctagttaaagcccaatttatccccggacaacagccaagcgtccgactccatcgaggccaccgtaacatgggcgtagtcaagaacagcagtcttaagcaccgaggacctgctctgcagggtctggagaacggtctgccgactgtgagagagaaaacccgggccgggtcaaaaaagtgtaggtttccggatgacctggacacaaacaagaagctgaaaaaagcgtcttcaaagggaagaaaatccggaggaggacccgaggctggcgtcccgggcaggccggctggaggcggacaccgggccggttctagggcacatggtcacggtcgggaagctgtggtggctaaaccaaagcacaaacggacagattaccggaggtggaagtctagcgcggaaatatcttatgaagaagctctgcgtcgagctcgccgcgggagacgggagaacgtcgggttgtaccccgcccccgttcccctgccgtatgccagtccttatgcatacgtggcatcagactccgaatactcggcagagtgcgaaagtctgttccacagcaccgtggttgatacgagtgaagatgaacaatcaaattatacgacaaactgtttcggggattccgaatcctcagtgtccgaaggagagttcgtaggcgagagtactaccacttccgacagtgaggagagcggaggcctgatatggagccagtttgtccagacactgcctattcagacagtgacagcgcctgatttacataaccatcctgccaagacgtttgtcaaaatcaaagccagccacaacctgaagaaaaagatcttgcgatttcgatccggatcactcaagcttatgactactgtctag

SEQ ID NO: 35476 - DNA, 2400 bp, Artificial Sequence
  derived and/or modified sequence
atgaagcccagccctgctggaacagccaaggagctggagcccccagccccagcccggggggagcagaggacagctgagcctgagggccgctggagggagaagggggaggccgacacagagcggcagaggacccgggagcggcaggaggccaccctggccggcctggccgagctggagtacctgcggcagaggcaggagctgctggtgcggggggccctgcggggggccggcggggccggggccgccgccccccgggccggggagctgctgggggaggccgcccagaggagccggctggaggagaagttcctggaggagaacatcctgctgctgaggaagcagctgaactgcctgcggaggagagatgctggcctgctgaaccagctgcaggagctggacaagcagatcagtgacctgcggctggatgtggagaagaccagcgaggagcacctggagacagacagccggcccagcagcggcttctatgagctgagtgatggagccagcggcagcctgagcaacagcagcaacagcgtcttcagcgagtgcctgagcagctgccacagcagcacctgcttctgcagccccctggaggccaccctgagcctgagtgatggctgccccaagtctgcagatgtgaaccccaagtaccagtgtgacctggtgtccaagaatggaaatgatgtgtaccgctaccccagccccctgcatgctgtggccgtgcagagccccatgttcctgctgtgcctgactggaaaccccctgcgggaggaggaccggctgggcaaccacgccagtgacatctgtggcggcagcgagctggatgctgtgaagacagacagcagcctgcccagccccagcagcctgtggagcgccagccaccccagcagcagcaagaagatggatggctacatcctgagcctggtgcagaagaagacccaccctgtgaggaccaacaagcccaggacctctgtgaatgctgaccccaccaagggcctgctgagaaatggatctgtgtgtgtgcgggcccctgggggcgtgtcccagggcaacagcgtgaacctgaagaacagcaagcaggcctgcctgcccagcggcggcatccccagcctgaacaacggcaccttcagcccccccaagcagtggagcaaggagagcaaggccgagcaggccgagagcaagagggtgcccctgcctgagggctgccccagcggggccgccagtgacctgcagagcaagcacctgcccaagacagccaagccagccagccaggagcacgcccgctgcagcgccatcggcaccggggagagccccaaggagagcgcccagctgagcggggccagccccaaggagagccccagccggggccctgccccaccccaggagaacaaggtggtgcagcccctgaagaagatgagccagaagaacagcctgcagggcgtgcccccagccaccccacccctgctgagcacagccttccctgtggaggagaggcctgccctggacttcaagtctgagggcagcagccagagcctggaggaggcccacctggtgaaggcccagttcatccctggccagcagcccagcgtgcggctgcaccggggccacaggaacatgggcgtggtgaagaacagcagcctgaagcaccggggccctgccctgcagggcctggagaatggcctgcccaccgtgcgggagaagacccgggccggcagcaagaagtgccgcttcccagatgacctggacaccaacaagaagctgaagaaggccagcagcaaaggaaggaagagcggcggcggccctgaggccggcgtgcccggccggcctgctgggggcggccaccgggccggcagccgggcccacggccacggccgggaggccgtggtggccaagcccaagcacaagaggacagactaccgccgctggaagagcagcgctgagatctcctatgaggaggccctgcggcgggcccggcggggcagaagagaaaatgtgggcctgtacccagcccctgtgcccctgccctatgccagcccctatgcctacgtggccagtgacagcgagtacagcgcagaatgtgagagcctcttccacagcacagtggtggacaccagtgaagatgagcagagcaactacaccaccaactgctttggagacagcgagagctctgtgtctgagggggagtttgtgggggagagcaccaccaccagtgacagcgaggagagcggcggcctcatctggagccagtttgtgcagaccctgcccatccagacagtgacagccccagacctgcacaaccacccagccaagacctttgtgaagatcaaggccagccacaacctgaagaagaagatcctgcgcttccgcagcggcagcctgaagctgatgaccaccgtgtag

SEQ ID NO: 35477 - DNA, 2400 bp, Artificial Sequence
  derived and/or modified sequence
atgaagcccagccccgccggcaccgccaaggagctggagccccccgctcccgcccgcggagagcaacgaacagccgagcccgaagggcggtggcgagaaaagggggaggccgatacagaacgacagcgcacccgcgagagacaggaggcaaccctcgcaggtctggctgaactggaatatctacggcagaggcaggagctgctggtaaggggggccctgaggggggccggcggagcgggtgccgccgcgccccgagccggggagctccttggcgaggctgctcagcgctccagactcgaagagaaatttctggaagagaacatactgctcctccgcaaacaattaaattgcctgaggcgcagggacgccggtctgcttaatcagctgcaggaactcgataagcagatctcagacctgaggctggacgtcgagaaaacgagcgaggaacacctggaaactgattccaggccaagttctggcttctatgaactctccgatggcgcctcaggatccctgagtaacagttccaatagcgtgttttccgaatgcctgtcgtcctgtcacagcagcacgtgtttctgtagcccgttagaggccacgttatctctctctgatggctgtcccaagtccgctgatgttaatccgaaataccagtgcgatctcgtctcgaaaaacggaaatgacgtctacagatatccgtcacctctacatgcggtcgccgtccaatcaccgatgttccttctatgcctcaccggcaatcccctgcgtgaagaagaccggctgggaaatcacgcatcggatatttgcggtggaagcgagttggacgccgtcaagacagattcctctctcccttccccttctagtttatggtcagcgtcgcatccctcctcttccaaaaagatggacggatatattctgtctcttgtgcaaaaaaagacccacccggtacgaactaacaagccaagaacctctgtcaacgcagacccaacgaagggtctattgcgaaacgggtccgtgtgtgtgcgcgcccctgggggtgtttcccaggggaacagtgtaaacctgaaaaacagtaagcaggcctgtctccctagtggtggcatcccttcgcttaataatggcacattctcacccccaaagcagtggtctaaggaaagtaaagccgagcaggccgagtcaaagcgggtgcccttgccagaggggtgtcctagtggcgccgcgagtgatctgcagagcaaacatctgcccaaaactgcgaaaccagcaagtcaggaacacgcgagatgctcggcaattggcacaggtgagtccccaaaagaatcagcacagctgagcggcgccagcccaaaggagtctcctagcagagggccggcacctcctcaggaaaacaaggtggtccagccactgaaaaagatgtcacagaagaactctcttcagggtgtaccacctgctactcctcctttactgtctaccgcttttcctgtggaagagagaccagccctggacttcaagagcgaggggagcagccagagcttggaagaggcccatctcgtcaaggcacaatttatcccaggccagcaacctagtgtccggctccacagagggcatcgaaatatgggggtcgtaaaaaacagctccctgaagcatcgtggcccagcattacagggcctagagaacggcctcccaactgttcgggaaaagactcgggcaggttcaaagaaatgtaggttccccgatgacctcgacactaacaaaaagctcaagaaggcctcctccaagggaaggaaatccggaggcggtcccgaggcgggcgtccctggccggcccgccggcggcggacaccgggcgggctctagagcccacgggcatggtcgggaggctgtggtggccaagcccaaacacaagcgaactgattaccgtcggtggaagtctagcgcagagatcagctacgaggaggctctgcggagagcaaggcgagggaggcgtgaaaacgtggggctttaccctgcacctgtgccgctgccgtatgcctcaccttatgcatacgtggctagtgactctgagtactctgccgaatgcgagagcctattccattccaccgttgtggacacttctgaggacgaacagtccaattacactaccaattgctttggcgattcagagtctagcgtgagcgagggcgagtttgttggcgaatccaccaccacctccgactccgaagagagtggtggcctgatttggtcacagttcgttcagacgctaccgattcagacggttacggcacccgacttacataatcacccggccaagacatttgtgaagataaaggcatcgcacaacctaaagaagaaaatcctgaggtttcggagcggcagcctgaagctgatgaccactgtgtag

SEQ ID NO: 35478 - DNA, 2400 bp, Artificial Sequence
  derived and/or modified sequence
atgaaaccgtcgccagccggtaccgccaaggaacttgagccccctgccccagctcgaggcgagcagagaacagcagagccggaaggccgatggagggagaaaggggaagctgatactgagaggcaacgaacacgtgagaggcaagaggcaaccctggccggtctcgctgaactagaatacctccgtcagaggcaggaattgctggtccgaggcgcactgagaggagctgggggtgccggagcagctgccccacgcgctggagaacttcttggcgaggctgctcagcggtccaggctggaggagaagttcctggaagagaacattcttttactgaggaagcagctgaactgcctgcgtcgacgagatgctggccttttaaaccagctccaggagctagacaagcagatctctgatctgcggcttgacgtggaaaaaacttctgaggagcaccttgagaccgattcaaggccaagttctgggttctacgagctgtctgacggagccagtggaagcctgtccaactccagcaattctgtgttcagtgaatgtctttctagttgccattcttccacatgcttctgtagcccacttgaggctaccctatctctgagcgatggctgtccaaaaagcgccgacgtgaacccgaaataccagtgcgatcttgtatccaagaacggaaacgacgtatatcgctatccttccccgctgcatgccgtggccgtccagagccctatgtttctgctgtgcctgacgggaaaccccttgcgtgaggaggaccgcctcggaaatcacgcgagcgacatatgcgggggatcagagctcgacgccgtcaaaaccgacagtagccttccttctccttcctcattatggagcgcatctcacccaagcagcagcaagaagatggatgggtatatactgagtctcgtccagaaaaagacccatcctgtgcgaaccaacaaaccacggacaagcgtgaacgcagaccccacaaaaggactgttgagaaatgggtccgtgtgtgtgagggcgccagggggtgtgtctcaggggaattcagtgaacctaaagaactccaagcaggcctgtttgccctccgggggtatcccaagtctgaataatggtactttctcaccccctaagcaatggtccaaggagtccaaggccgagcaggccgaatcaaagcgagtgcccctacctgaaggatgcccttccggggcagcttcagatctgcaatctaagcacttgcccaagactgctaaaccagcttctcaagaacacgcccgatgcagcgcaatcgggactggggaatcccccaaagaatctgcacagctttctggtgcctcaccaaaagaatcccctagcagaggcccagcacccccacaggagaataaggtcgtccagcccttgaagaaaatgtctcagaagaattcacttcagggcgtgcccccagccaccccacccctgcttagcactgctttccccgtggaagaaaggccagctctggacttcaagtccgaagggagctcccagtcactggaagaagcccacctggtgaaggctcagtttattccaggacagcagccatctgttcggcttcaccggggacataggaacatgggtgtggtgaaaaacagttctctgaagcatcgaggcccagcgctccagggtttggaaaacgggttacctactgtccgcgaaaaaactagagcaggaagcaaaaagtgccggttccctgatgacttagacacaaataagaagcttaagaaggcgtctagcaaaggtcggaaatctggaggtggtcccgaagccggtgtgccaggtcggccagctggtggagggcacagggccggttcccgcgcacatggacacggaagagaagccgtagtggccaagcccaagcacaaaaggactgattatcgtagatggaagtcttccgccgagatctcctacgaagaggccttgcgacgggctagaagaggcagaagagaaaacgtgggattgtatcctgctcccgtcccacttccgtatgcctccccatacgcgtacgtcgcttctgactccgagtattcagcagagtgtgaatctctgttccattctaccgtcgtggacacctcagaagacgaacagtcgaactacacaaccaattgctttggcgacagtgagtcgtctgtcagcgagggcgaatttgtaggagagagtactaccacctccgactccgaggaatcaggcggtctgatttggagtcagtttgtacaaaccctgccgatccaaacagtcacggccccagacctccataatcacccagctaagacatttgtgaaaatcaaagccagccacaacctcaaaaagaagatcctcagattcaggagcggttcactaaagctaatgacgactgtgtag

SEQ ID NO: 35479 - DNA, 3734 bp, Artificial Sequence
  derived and/or modified sequence
ctcgagggcttctagccaccgtccccgccagcgccgcgccccgccacagggcggcatgagcccacccgcggccgcagccctagcgccctgctcctccgcctgggcggcccggctgcggtgacggctctcgctgcccgactgggggccatgaagccgagtccggccgggacggcgaaggagctggagcctccggcgccggcccgaggcgagcagcgcacggcggagcccgaggggcgctggcgggagaagggcgaggcagacaccgagcggcagcgcacccgggagcggcaggaggccacgctggccgggctggcggagctggagtacctgcgccagcgccaagagctgctggtcaggggcgccctgcgcggcgccgggggtgcgggagccgctgcgccccgcgctggggagctactgggggaggcggcgcagcgcagtcgcctggaggagaagttcttggaggagaacatcttgctgctaagaaagcaattgaactgtttgaggcgaagagatgctggtttgttgaatcagttgcaagagcttgacaagcagataagtgacctgagactggatgtagaaaagacatctgaagagcacctggagacagacagtcggcctagctcagggttttatgagctgagtgatggggcttcaggatccctttccaattcctctaactcggtgttcagtgagtgtttatccagttgtcattccagcacctgcttttgcagccccttggaggcgaccttgagtctctcagatggttgccccaaatctgcagatgtgaatcccaagtaccagtgtgatctggtgtctaaaaacgggaatgatgtatatcgctatcccagtccacttcatgctgtggctgtgcagagcccaatgtttctcctttgtctgacgggcaaccctctgagggaagaggacaggcttggaaaccatgccagtgacatttgcggtggatctgagctagatgccgtcaaaacagacagttccttaccgtccccaagcagtctgtggtctgcttcccatccttcatccagcaagaaaatggatggctacattctgagcctggtccagaaaaaaacacaccctgtaaggaccaacaaaccaagaaccagcgtgaacgctgaccccacgaaagggcttctgaggaacgggagcgtttgtgtcagagccccgggcggtgtctcacagggcaacagtgtgaaccttaagaattcgaaacaggcgtgtctgccctctggcgggataccttctctgaacaatgggacattctccccaccgaagcagtggtcgaaagaatcaaaggccgaacaagccgaaagcaagagggtgcccctgccagagggctgcccctcaggcgctgcctccgaccttcagagtaagcacctgccaaaaacggccaagccagcctcgcaagaacatgctcggtgttccgccattgggacaggggagtcccctaaggaaagcgctcagctctcaggggcctctccaaaagagagtcctagcagaggccctgccccgccgcaggagaacaaagttgtacagcccctgaaaaagatgtcacagaaaaacagcctgcagggcgtccccccggccactcctcccctgctgtctacagctttccccgtggaagagaggcctgccttggatttcaagagcgagggctcttcccaaagcctggaggaagcgcacctggtcaaggcccagtttatcccggggcagcagcccagtgtcaggctccaccggggccacaggaacatgggcgtcgtgaagaactccagcctgaagcaccgcggcccagccctccaggggctggagaacggcttgcccaccgtcagggagaaaacgcgggccgggagcaagaagtgtcgcttcccagatgacttggatacaaataagaaactcaagaaagcctcctccaaggggaggaagagtgggggcgggcccgaggctggtgttcccggcaggcccgcgggcgggggccacagggcggggagcagggcgcatggccacggacgggaggcggtggtggccaaacctaagcacaagcgaactgactaccggcggtggaagtcctcggccgagatttcctacgaagaggccctgaggagggcccggcgcggtcgccgggagaatgtggggctgtaccccgcgcctgtgcctctgccctacgccagcccctacgcctacgtggctagcgactccgagtactcggccgagtgcgagtccctgttccactccaccgtggtggacaccagtgaggacgagcagagcaattacaccaccaactgcttcggggacagcgagtcgagtgtgagcgagggcgagttcgtgggggagagcacaaccaccagcgactctgaagaaagcgggggcttaatttggtcccagtttgtccagactctgcccattcaaacggtaacggccccagaccttcacaaccaccccgcaaaaacctttgtcaaaattaaggcctcacataacctcaagaagaagatcctccgctttcggtctggctctttgaaactgatgacgacggtttgagtgacatcattggtgtagaaagtttgtgtgtttttttttcttctccctagttgccaaaattaaaaaggtggtgttttcatttttgtataatactttaatggaatgctttttaaaaaaatataaaaccaaggtaaattattgtttcatcttcacgtatggatgctagtgcctttaatggaaggtaaagaatgttttgctagttagaagtacatattgaggttttaatggtggtgatagtgagttttgtggcaccagctgttttttattttaaactttctgagcatccggcaaggtacaggttttgatgttcaagttttattgggataagatcttttgatcccaaggtcaggtggatggaatttttggatttatatttgttccttgagtcttcagggcagtgtctccatgagggttttcctgttgaggggcaccacatacaatagtgtgaagtaggtatgaggggcagtcattgtattctatagtttttttatgtagtctacatttctcagatgtatccccattcggttttattctcagaactgttactagactcatgacttggaggccaaaccttaaatccagagatagcagcctcgatagggaccttaaaaggattcacaaaaacttttgccacacttggtgcctaggccctgttcctaataaccccttctagggccgtttatccaacatttagatgccttcttttccctccctaatttgtagccagtccaacctttcattccttggaggatttagttttgggataaaattttggtccttgggcacagagacattcactattaatgaagtaacccttgggcatgactccaatcccagaattgctcactgagcgctatgccaccgaagcgttgacctgaacatattagtgcaatccagtccagattggacctttgatcctatgtggaagggctgttttttaagaaaaaatttttggtaaacagtattgtgtaaaattgctttttgtataccaatatatgcatgttttgtgcatgagtagtacttgtgttgatactcctgttgatgttaaattactatataatataaacagtatgtgtttttatatatcattgtgtaaatttaatataacatatgcagtaataaaccatttgttttactgctgttaagtttgttatttgggtataaaaccagatgtttacacctgtaaa

SEQ ID NO: 35480 - DNA, 2400 bp, Artificial Sequence
  derived and/or modified sequence
atgaagcccagccccgccggcaccgccaaggagctggagccccccgcccccgccagaggcgagcagagaaccgccgagcccgagggcagatggagagagaagggcgaggccgacaccgagagacagagaaccagagagagacaggaggccaccctggccggcctggccgagctggagtacctgagacagagacaggagctgctggtgagaggcgccctgagaggcgccggcggcgccggcgccgccgcccccagagccggcgagctgctgggcgaggccgcccagagaagcagactggaggagaagttcctggaggagaacatcctgctgctgagaaagcagctgaactgcctgagaagaagagacgccggcctgctgaaccagctgcaggagctggacaagcagatcagcgacctgagactggacgtggagaagaccagcgaggagcacctggagaccgacagcagacccagcagcggcttctacgagctgagcgacggcgccagcggcagcctgagcaacagcagcaacagcgtgttcagcgagtgcctgagcagctgccacagcagcacctgcttctgcagccccctggaggccaccctgagcctgagcgacggctgccccaagagcgccgacgtgaaccccaagtaccagtgcgacctggtgagcaagaacggcaacgacgtgtacagataccccagccccctgcacgccgtggccgtgcagagccccatgttcctgctgtgcctgaccggcaaccccctgagagaggaggacagactgggcaaccacgccagcgacatctgcggcggcagcgagctggacgccgtgaagaccgacagcagcctgcccagccccagcagcctgtggagcgccagccaccccagcagcagcaagaagatggacggctacatcctgagcctggtgcagaagaagacccaccccgtgagaaccaacaagcccagaaccagcgtgaacgccgaccccaccaagggcctgctgagaaacggcagcgtgtgcgtgagagcccccggcggcgtgagccagggcaacagcgtgaacctgaagaacagcaagcaggcctgcctgcccagcggcggcatccccagcctgaacaacggcaccttcagcccccccaagcagtggagcaaggagagcaaggccgagcaggccgagagcaagagagtgcccctgcccgagggctgccccagcggcgccgccagcgacctgcagagcaagcacctgcccaagaccgccaagcccgccagccaggagcacgccagatgcagcgccatcggcaccggcgagagccccaaggagagcgcccagctgagcggcgccagccccaaggagagccccagcagaggccccgcccccccccaggagaacaaggtggtgcagcccctgaagaagatgagccagaagaacagcctgcagggcgtgccccccgccaccccccccctgctgagcaccgccttccccgtggaggagagacccgccctggacttcaagagcgagggcagcagccagagcctggaggaggcccacctggtgaaggcccagttcatccccggccagcagcccagcgtgagactgcacagaggccacagaaacatgggcgtggtgaagaacagcagcctgaagcacagaggccccgccctgcagggcctggagaacggcctgcccaccgtgagagagaagaccagagccggcagcaagaagtgcagattccccgacgacctggacaccaacaagaagctgaagaaggccagcagcaagggcagaaagagcggcggcggccccgaggccggcgtgcccggcagacccgccggcggcggccacagagccggcagcagagcccacggccacggcagagaggccgtggtggccaagcccaagcacaagagaaccgactacagaagatggaagagcagcgccgagatcagctacgaggaggccctgagaagagccagaagaggcagaagagagaacgtgggcctgtaccccgcccccgtgcccctgccctacgccagcccctacgcctacgtggccagcgacagcgagtacagcgccgagtgcgagagcctgttccacagcaccgtggtggacaccagcgaggacgagcagagcaactacaccaccaactgcttcggcgacagcgagagcagcgtgagcgagggcgagttcgtgggcgagagcaccaccaccagcgacagcgaggagagcggcggcctgatctggagccagttcgtgcagaccctgcccatccagaccgtgaccgcccccgacctgcacaaccaccccgccaagaccttcgtgaagatcaaggccagccacaacctgaagaagaagatcctgagattcagaagcggcagcctgaagctgatgaccaccgtgtag

SEQ ID NO: 35481 - protein, 1357 aa, Artificial Sequence
  derived and/or modified sequence
MEFYESAYFIVLIPSIVITVIFLFFWLFMKETLYDEVLAKQKREQKLIPTKTDKKKAEKKKNKKKEIQNGNLHESDSESVPRDFKLSDALAVEDDQVAPVPLNVVETSSSVRERKKKEKKQKPVLEEQVIKESDASKIPGKKVEPVPVTKQPTPPSEAAASKKKPGQKKSKNGSDDQDKKVETLMVPSKRQEALPLHQETKQESGSGKKKASSKKQKTENVFVDEPLIHATTYIPLMDNADSSPVVDKREVIDLLKPDQVEGIQKSGTKKLKTETDKENAEVKFKDFLLSLKTMMFSEDEALCVVDLLKEKSGVIQDALKKSSKGELTTLIHQLQEKDKLLAAVKEDAAATKDRCKQLTQEMMTEKERSNVVITRMKDRIGTLEKEHNVFQNKIHVSYQETQQMQMKFQQVREQMEAEIAHLKQENGILRDAVSNTTNQLESKQSAELNKLRQDYARLVNELTEKTGKLQQEEVQKKNAEQAATQLKVQLQEAERRWEEVQSYIRKRTAEHEAAQQDLQSKFVAKENEVQSLHSKLTDTLVSKQQLEQRLMQLMESEQKRVNKEESLQMQVQDILEQNEALKAQIQQFHSQIAAQTSASVLAEELHKVIAEKDKQIKQTEDSLASERDRLTSKEEELKDIQNMNFLLKAEVQKLQALANEQAAAAHELEKMQQSVYVKDDKIRLLEEQLQHEISNKMEEFKILNDQNKALKSEVQKLQTLVSEQPNKDVVEQMEKCIQEKDEKLKTVEELLETGLIQVATKEEELNAIRTENSSLTKEVQDLKAKQNDQVSFASLVEELKKVIHEKDGKIKSVEELLEAELLKVANKEKTVQDLKQEIKALKEEIGNVQLEKAQQLSITSKVQELQNLLKGKEEQMNTMKAVLEEKEKDLANTGKWLQDLQEENESLKAHVQEVAQHNLKEASSASQFEELEIVLKEKENELKRLEAMLKERESDLSSKTQLLQDVQDENKLFKSQIEQLKQQNYQQASSFPPHEELLKVISEREKEISGLWNELDSLKDAVEHQRKKNNDLREKNWEAMEALASTEKMLQDKVNKTSKERQQQVEAVELEAKEVLKKLFPKVSVPSNLSYGEWLHGFEKKAKECMAGTSGSEEVKVLEHKLKEADEMHTLLQLECEKYKSVLAETEGILQKLQRSVEQEENKWKVKVDESHKTIKQMQSSFTSSEQELERLRSENKDIENLRREREHLEMELEKAEMERSTYVTEVRELKDLLTELQKKLDDSYSEAVRQNEELNLLKAQLNETLTKLRTEQNERQKVAGDLHKAQQSLELIQSKIVKAAGDTTVIENSDVSPETESSEKETMSVSLNQTVTQLQQLLQAVNQQLTKEKEHYQVLE

SEQ ID NO: 35482 - protein, 75 aa, Artificial Sequence
  derived and/or modified sequence
MEFYESAYFIVLIPSIVITVIFLFFWLFMKETLYDEVLAKQKREQKLIPTKTDKKKAEKKKNKKKEIQNGNLHES

SEQ ID NO: 35483 - DNA, 4074 bp, Artificial Sequence
  derived and/or modified sequence
atggaattttatgagtccgcttacttcatcgtccttatcccatccatcgttataaccgtcattttcctgtttttctggctctttatgaaggagacactttatgatgaagtgctggcaaaacagaaacgcgagcagaaactgattcccactaagacggataagaaaaaagccgaaaagaaaaagaataaaaagaaggaaatacagaatggaaacctgcatgagagtgactcagagtcagtgccccgcgacttcaagttgagtgatgctcttgctgtggaggatgatcaggttgcacccgtgcccctcaacgtcgtggagacgtcatcctctgtgcgggagaggaagaaaaaggaaaagaaacagaagcctgtgctggaggagcaggtgatcaaggaatctgatgcctcaaagatcccgggaaagaaggtggagccagttcccgtaaccaaacagcctaccccaccttctgaagcagccgccagtaagaagaagccaggccagaaaaagtccaaaaacggaagtgacgaccaggacaagaaggtagagactctgatggtgccatccaagcgacaagaagctctgcctttgcatcaggaaaccaaacaagagtccggctcaggtaagaagaaggcttcatcaaaaaagcagaaaaccgagaatgtatttgttgatgaacccctgatccacgcgacgacttacatcccccttatggacaacgccgatagttccccagttgtggataagagagaagtcattgatttactgaagccagaccaagtcgaaggaatacagaaaagcgggactaagaaactgaagacggagacagacaaggaaaacgcggaggtgaagtttaaggactttctcttatctctcaaaaccatgatgttttcagaagacgaggcgttgtgcgtggttgacctcctgaaggagaaatctggggtaattcaggatgcactgaagaaatcatcgaaaggcgagttgacaaccctgattcatcagcttcaggagaaggataaactcctcgctgccgtgaaggaggacgctgccgccaccaaggaccgctgcaaacagctgacccaggagatgatgaccgaaaaggagagaagtaatgtggtcattactagaatgaaggaccggattgggactctggagaaagagcataacgtgttccagaataagattcacgtttcttatcaagaaactcagcaaatgcagatgaaatttcagcaggttagagagcagatggaggccgagattgctcacctcaagcaagagaacggaattctgcgagatgccgtgtctaatacaacaaatcagttggagagcaaacagagcgcagaactcaacaagctgagacaggactacgctcgcctcgtcaatgagcttactgagaaaacaggaaaactccagcaggaagaggttcagaagaaaaatgcagagcaggccgctacacaactgaaggttcagttgcaagaagctgagcgaaggtgggaggaggttcagagctacattcggaagcgtaccgctgagcacgaagccgcgcaacaagacctccaaagcaagttcgtggccaaggagaacgaggtccagagcctgcattccaagctgacagacactctcgtctcaaaacagcagttagaacagcggctgatgcagctaatggagtctgaacagaagagagtaaataaggaggagtctctgcagatgcaggtgcaggatatcctcgaacaaaacgaagcccttaaggcccagatccagcagttccatagccaaatcgccgctcagacttccgcaagcgtcttggctgaggagcttcataaggtaattgccgagaaggataaacagatcaaacaaactgaagacagcctcgcctcggagagggatcgtttgacaagcaaagaagaggaactcaaggatatccaaaatatgaactttctacttaaggccgaagtgcagaaactgcaggcactggcaaatgaacaggcggcggccgcacatgaactcgagaaaatgcagcaaagcgtgtacgtcaaagatgataaaattagactgttagaagagcagctacagcacgaaatctcaaacaagatggaggaattcaaaatcctcaatgaccagaataaggcgttgaaatccgaagtgcagaaactgcagacgctcgttagtgagcaaccaaacaaagacgtggtggagcagatggagaagtgtatccaggagaaggacgagaagctgaaaactgttgaagagctgctggaaaccggactgatccaggttgctactaaggaagaagaactcaacgcgattagaacagagaatagttctctgaccaaggaggtacaagatttgaaggccaagcagaacgaccaggtgagcttcgcttcgctcgtggaagagttgaaaaaggtcatccacgaaaaggacggcaagatcaagagcgtggaggagctgttggaagccgagttgctgaaggtcgctaataaagagaaaacagtacaggaccttaaacaggagatcaaagccctcaaggaggaaatcggaaatgtacaactcgagaaagcccagcaactgtctatcacgagcaaggtccaggagcttcagaacctgctgaaaggtaaggaggagcagatgaacaccatgaaggctgtgctggaagagaaggaaaaggacttggccaacactggcaagtggttgcaggatctgcaagaagaaaatgagagtcttaaagcccatgtccaggaggtggctcagcacaatctcaaagaggcttccagcgcatctcaatttgaagaactcgagatcgtgctcaaggagaaagaaaatgagctcaagagacttgaagcaatgctgaaagaacgggaatctgatctgtcgagcaagacacagctgttacaggacgtacaggatgagaacaaactgtttaagtcccaaatagaacaactcaaacagcagaattatcagcaagccagttcctttccgcctcacgaagagctgctcaaagtgatctccgagagagagaaagaaataagtggactttggaatgagcttgactcgctcaaggacgccgtggaacatcagaggaaaaagaataacgatcttcgggaaaagaattgggaggcaatggaggccttagccagtaccgagaagatgctgcaggacaaggtcaataaaacctcgaaggagcggcagcagcaagtggaggcagttgagctcgaggccaaggaggtcctgaaaaagttattcccaaaggttagtgtgcctagtaatctgtcatacggggaatggcttcatggcttcgaaaagaaagccaaggagtgcatggctggtacctctgggtcagaggaggtaaaagtgctcgaacacaagctcaaggaggccgacgagatgcacaccttgttgcagttggaatgtgagaagtataagtccgtactcgccgaaacagaaggcatactgcaaaaactacagcgttccgtggaacaggaagagaataagtggaaagtgaaggtggacgagtctcacaagaccattaaacaaatgcaaagctccttcacctcctcagagcaggagctcgaacgactgcggagcgagaataaggatatagagaacttgagacgtgagagagagcacctcgagatggagctggagaaagccgagatggaaagaagcacctatgttacagaagtccgggagttaaaagatctgttgactgaactgcaaaaaaagctggatgactcgtattccgaagcagttaggcagaacgaggaacttaatctactcaaagctcagcttaacgaaaccctcacaaagttgcgtacagagcagaacgagcggcagaaggtcgccggtgatctccacaaggcccagcagagtctagagctgattcagagcaagatagttaaagctgccggggacaccacagtgatcgaaaattccgacgtttcgcctgagacagaatctagcgagaaggaaacaatgagtgtatctctcaaccagaccgttacccaactacagcagctccttcaagcagtcaaccaacagctgacaaaggaaaaggagcattatcaggtgcttgagtag

SEQ ID NO: 35484 - DNA, 4074 bp, Artificial Sequence
  derived and/or modified sequence
atggaattttacgagtctgcttactttatcgtcctcatccccagcatcgtgataactgtaatttttttgtttttctggcttttcatgaaagaaaccttgtatgacgaagtgcttgccaaacaaaaaagagagcagaagctgatacccacaaaaacagataagaaaaaggccgagaaaaagaagaataagaagaaggaaatccagaacggcaacttacacgaatcagattcagagagcgtgcccagagacttcaaactgagtgatgcactggccgttgaggacgatcaggttgctcccgtcccactgaacgttgtagagacatcctcatccgtgcgtgaaagaaaaaagaaagagaagaaacagaagccggtactcgaggagcaagtgatcaaagaatcagatgcctctaaaatccccggaaaaaaagtagagccagtgcccgtgactaagcagcccactccaccctccgaagccgccgcaagcaaaaaaaagccggggcagaaaaagtcgaagaatggctctgatgaccaggataaaaaggtggagaccctgatggttccttccaaaaggcaggaagcattgcccctccaccaggaaacaaaacaagagtcggggagcgggaagaagaaagcatcctccaaaaagcagaagacagagaatgtttttgtggacgaacctttaatacatgccacaacctatatccctctaatggataatgcagattcatcacccgtggtggataagcgagaagttatcgatcttctgaaacccgaccaagtggaggggattcaaaagtctggcaccaaaaagctcaagaccgagactgataaggagaatgctgaggtcaaattcaaggatttcctcctgagcctgaaaaccatgatgtttagtgaggatgaggccttgtgtgtggtcgacctcttgaaggagaagtcaggcgtcatccaggatgctctaaaaaagagcagcaaaggagagctcaccacactgatccatcagttgcaggagaaggacaagctgcttgctgcagtgaaagaggatgctgcagctaccaaagacagatgcaagcagctcacacaagagatgatgaccgaaaaagagcgatctaacgtcgtgatcacccggatgaaagatcggataggaacacttgaaaaagaacataacgtgttccaaaataagatccacgtttcctaccaggagacccagcagatgcagatgaagtttcagcaggtcagagaacagatggaagctgagatcgcccacctcaaacaggaaaatggaatcttaagagacgccgtgtcaaacaccacaaaccaattagagtccaaacaatctgccgaactcaacaagttgcgccaggattacgcccgactggtgaacgaattgactgaaaaaaccggcaaactgcaacaggaagaggtgcaaaaaaagaacgcagagcaagctgcaacccagcttaaggtgcagctgcaggaggccgagcgccgatgggaagaggtgcaaagctatattcgcaaaaggacagcagaacacgaagccgcccaacaggatctccagagtaaattcgtggcaaaagaaaacgaggtccaatctctccacagtaagctgacagatacactggtctctaaacagcaacttgaacagcgcttgatgcaattaatggaatctgagcagaagcgcgtcaataaggaggagtctctccaaatgcaggtgcaagatatattggaacagaatgaggctttaaaagcccagattcagcagtttcattcccaaatcgctgcccagacctccgcgtcggtactcgccgaagaacttcacaaagtcattgccgagaaggataaacagatcaagcaaaccgaggatagcctggctagtgagcgggataggctgacatcaaaagaggaggagctaaaagacattcagaacatgaactttttgttaaaagcggaggtgcaaaaactgcaggccttagccaatgaacaggccgctgccgctcacgagctcgagaagatgcagcagagtgtgtatgtgaaggatgataaaattagactgctggaggaacagctccaacatgagatttcaaataagatggaagagttcaaaattttaaacgaccaaaacaaggctctcaaaagcgaggtccagaaactccagacattggtcagtgagcagcccaacaaggatgttgtggaacagatggagaaatgcatccaggagaaagatgaaaagctgaagaccgtggaagaactcttagaaacagggctgatccaggttgctacaaaggaggaggagctgaatgcaatccgaacagagaactccagtttgaccaaggaagtgcaggacctgaaagccaagcagaacgaccaggtgagttttgcaagcctggtggaagagcttaagaaggtgatccacgaaaaagacgggaaaattaagtctgtggaggagctcctggaggcagagttgttaaaagtggccaacaaagaaaagaccgtccaagacttgaagcaggaaatcaaggcacttaaagaagaaatagggaacgtacagctggagaaagcacagcagctcagcataaccagtaaggtacaggagttacaaaatctgctgaaggggaaagaagaacagatgaataccatgaaagctgttctagaggagaaagagaaagatcttgcgaacacaggtaagtggctccaggatctgcaggaggaaaacgagagtcttaaggcacacgtgcaggaagtagcacagcacaacctgaaggaagccagctccgcatcacagtttgaggagctggagattgtgttaaaggagaaggagaacgaattaaaaaggctggaggccatgcttaaagagcgggagagcgatctttcctcaaaaacacaacttctccaggacgtgcaggatgaaaataaactgtttaagtcacagatcgagcaattgaaacagcagaactaccagcaggcaagtagttttccccctcacgaggagttgctcaaggtcataagcgaacgggagaaagagatctctggtctatggaacgaactggactccctcaaagatgccgtggaacatcagcgtaagaaaaacaacgatctgagagagaagaattgggaggccatggaagcactggctagcaccgagaagatgttacaggataaggtaaataaaacctcaaaggagcgccaacagcaagtggaggccgtggagctcgaagccaaggaggttctgaagaagctttttcctaaagtgagcgtcccgagcaacttgagctacggagagtggctgcatggtttcgagaagaaagccaaagagtgcatggccgggacttcgggttcggaagaggtcaaagtgctagaacacaaactgaaagaagccgacgagatgcacacgctcttgcagctggaatgtgaaaagtacaaatcagtgcttgctgagacggaggggatcctgcagaagttacagagatcagtggagcaggaggagaacaaatggaaagtgaaggttgacgagagtcacaaaaccatcaaacagatgcaaagttcttttacatcttccgagcaggagctggaacgacttagatccgagaacaaggacatcgagaacctgcgccgcgagcgggaacatctggaaatggaactggagaaggctgagatggagcgttccacctacgtcacagaggtgcgagaactcaaggatttgttgacggaactgcagaaaaagctcgacgacagctatagtgaagctgtcaggcagaatgaggagctcaatctgcttaaggctcagttaaacgagacactgactaagttaaggaccgagcagaacgaacgccagaaggtggcaggcgatttgcacaaagcccaacagagtctggaattgatccagtcaaaaattgtgaaagccgccggtgacacaacagtgattgagaattcggacgtgtcccctgaaaccgagtcgtccgagaaagagacaatgtcagtctcactaaatcagaccgtgacacagttgcaacagcttttgcaagcagtgaaccagcaacttaccaaagagaaggagcactatcaggtgttggagtag

SEQ ID NO: 35485 - DNA, 4074 bp, Artificial Sequence
  derived and/or modified sequence
atggaattctatgagtccgcctacttcattgtgctgatcccttccatagtcattaccgtcatatttctgttcttctggttatttatgaaggaaactctatacgacgaagtgctggctaagcagaaaagggagcagaagttaatcccaactaaaacagacaagaaaaaagcggagaagaaaaaaaataaaaaaaaggaaattcagaacggcaatctgcatgagtccgattcagagtccgtgccaagagatttcaagctgtccgatgcgttagccgttgaagacgatcaagttgctcccgtgccactgaatgtggtggagacgtctagtagtgtccgcgagcgcaaaaaaaaggagaagaagcagaaacccgtgctggaagaacaggttataaaggaaagtgatgcgagcaagataccaggtaagaaagtggaacctgtccccgtgacaaagcagccaactccgccctctgaggctgccgcctccaaaaaaaaaccaggccagaagaaatctaaaaacggatctgatgatcaggacaaaaaagttgaaaccctcatggttcctagcaaaagacaggaagctctacctttgcatcaggaaaccaagcaggagagcggatcgggcaaaaagaaggcctcgagcaagaaacagaagaccgaaaacgtgtttgtcgacgagccactcatccatgctaccacgtacatccctctcatggataacgctgattcctcccctgtggtggacaagagagaggtaatcgatctgttgaagcctgatcaggtcgaaggtatccagaaaagcgggacgaagaaactgaagacggagaccgataaggagaatgccgaagtcaagtttaaggactttctgttatctctgaagactatgatgttttctgaagatgaggccctctgtgtggtagacctgcttaaggagaagtccggcgtgatccaggacgccctgaaaaaatcaagtaagggagagctgactaccctgatccaccagcttcaggagaaggacaaactgctagcggcagtgaaggaggacgccgccgctaccaaggacagatgcaagcaactaacgcaggagatgatgaccgaaaaggaacggagcaatgtggttataacccggatgaaagatagaatcggaacattagaaaaggagcataatgttttccagaataagattcatgtcagctaccaagagacccagcagatgcaaatgaaattccagcaagtccgggaacaaatggaggcagaaatagcccacctcaagcaagaaaacggaatcctgcgcgatgccgtatccaacaccacgaaccagttggagtccaaacagagcgccgagttgaacaaactgaggcaagactacgcccgactcgttaacgagctgaccgaaaaaacggggaagctgcagcaggaagaagtgcagaagaaaaacgccgaacaggcagctacccagctcaaagtccagctgcaggaggccgaacggagatgggaggaggtgcagagttatattaggaagcggaccgccgaacatgaagctgcccagcaggacctgcagtctaagttcgtggccaaggaaaacgaggtgcagtccctgcactccaaacttacagacaccctcgtgtcgaagcaacagctggaacaaagactgatgcaactgatggagagcgaacagaagcgggtgaacaaggaagaatccttacagatgcaggtacaggatatactcgagcaaaacgaagccctaaaagcgcaaatacagcagtttcatagtcagattgctgctcagacatctgcttctgtgctggccgaagagctgcacaaggttattgccgaaaaggataagcagatcaaacagacagaagactccctggcctctgaacgcgacaggcttacctcaaaagaggaggaactgaaggacatccaaaatatgaactttttgctcaaagccgaggtgcaaaagctccaggccctcgccaatgagcaggccgcagccgcccacgagctggagaagatgcagcaatcagtgtatgtaaaagatgataaaatccggcttctcgaagaacagctgcagcacgaaatatccaacaagatggaggagtttaagatccttaatgatcagaataaggctctgaaaagcgaggtacaaaagttacagacacttgtatctgagcagccgaataaggatgtggtcgaacaaatggagaaatgcatccaagagaaggacgagaagttaaaaaccgtggaagaacttctggagaccggcttgattcaggtagcgacaaaagaagaggaactcaacgccattagaacagagaactcatcactcactaaggaggtgcaggatctgaaggccaaacagaacgaccaagtgagtttcgcttcactcgtcgaggagctcaaaaaagtcatacatgagaaggacggcaaaataaaatccgtagaagagctcctggaggctgaactcctgaaggtggccaataaggagaagacagtgcaggacctcaaacaagaaataaaggccctcaaagaggagattgggaacgtgcaactagaaaaagcccaacagctcagtataacgagcaaggtgcaggagcttcaaaacctcctgaagggcaaggaagaacagatgaatacaatgaaagccgttctcgaagaaaaggagaaagacctggctaatacaggaaagtggctgcaagatctgcaggaagagaatgaaagcctgaaggctcatgtgcaagaagtggcacagcacaatctgaaggaggccagcagcgcttcccagttcgaagaacttgagatagtgctgaaagaaaaagagaacgagctgaaacggctggaggccatgctgaaagagcgggaatccgatctatcctcaaagacccagctacttcaggatgtgcaggatgagaacaaattgttcaaatcacaaattgagcagttgaagcagcagaactaccagcaggctagcagctttcccccacacgaagagttactgaaggtcatatcagaaagggaaaaagagatctctgggctgtggaacgagctggattctcttaaagatgccgttgagcatcagcggaaaaagaataacgaccttagagagaaaaactgggaagctatggaggccttggcgtctaccgagaagatgctccaagacaaagtcaataaaactagcaaggaacgccaacaacaggtagaagcagtcgagctggaggctaaggaagtgctgaagaagctgtttcctaaagtgagcgtacctagcaacctgtcttatggcgagtggctgcatgggttcgaaaaaaaggcgaaagagtgcatggccggcacttccgggtctgaggaggttaaggtgctcgagcacaaactgaaagaagctgatgagatgcatacgctgctgcagctggaatgtgagaagtataaaagtgtgcttgcagaaacagagggtatcctgcaaaaactccagagaagcgtggaacaggaggaaaacaagtggaaggtgaaggtggacgaaagccacaaaactattaaacagatgcaatcaagtttcacctcttctgagcaggaacttgaaaggctgaggtctgaaaacaaagatatcgagaacttacggagagagagagagcatctcgagatggagttagagaaagccgagatggaaagaagcacttacgtgaccgaagtcagagaactgaaggatcttcttaccgagctgcagaaaaagctggacgacagctatagcgaggctgtcaggcagaacgaggagctgaatctgctcaaggcccagctgaacgagacactgactaagcttaggactgagcagaacgagagacagaaagtggccggcgaccttcacaaggcccagcagtcacttgaactcatccagagcaagattgtgaaggcagctggcgatactactgtgatagagaacagcgatgtgagccccgaaacggagtcttctgagaaagaaaccatgagcgtgagcttgaaccagaccgttacccagctgcagcagcttctccaagccgttaaccagcaactcacaaaagaaaaggagcactaccaagttctagagtag

SEQ ID NO: 35486 - DNA, 4074 bp, Artificial Sequence
  derived and/or modified sequence
atggagttttatgaaagtgcctattttatagttctcatcccttccattgtgatcaccgtcatctttctcttcttctggctgttcatgaaggagacgctgtatgacgaggtgctggccaagcaaaaacgagagcaaaagcttattccgacgaagaccgacaagaagaaagctgagaagaagaagaacaaaaagaaggagattcagaatggaaacttacacgagtctgattctgagtcagttccacgcgacttcaagctttctgatgctctggctgtggaagacgaccaggtagcgcccgtgccgttgaatgtcgtagaaaccagtagttctgtgagagagcggaagaagaaagagaagaagcaaaagccggtgctggaagaacaggttatcaaggagagcgacgcctcgaaaatcccggggaagaaggttgagcctgtaccggtcactaaacagcctactccgcccagcgaggcagcagcctccaaaaagaaaccgggccagaaaaaaagtaagaatggatccgatgaccaggataagaaagtagaaaccctaatggtgccatcaaagcgccaggaggctctgccgcttcatcaggaaactaaacaggaaagcgggtccggcaaaaaaaaggcctcatccaaaaagcagaagactgaaaatgtcttcgtggacgagcccctcattcacgcaaccacatatatccctctaatggataatgctgactcatcaccagttgtcgacaagcgggaggtgatcgacctcctgaaacccgaccaagtcgaagggatccagaagtccggtacgaagaagctgaagactgagactgataaagaaaatgcagaagtgaagtttaaggatttcctcctttccctgaagactatgatgtttagtgaagatgaggcactctgcgtggtggatcttctgaaagagaagagcggggtcatccaggatgccctgaagaagtcaagcaagggcgaactaactaccctgattcatcagctgcaggagaaggataagctgctagcagcagtgaaagaagacgcagctgcgacaaaagatcgatgtaaacagctaacacaggagatgatgacagaaaaggaacgttccaacgttgttattacgagaatgaaagatcgaattggtactctggaaaaagagcacaatgtgttccagaataaaatacacgtgtcatatcaggagacccagcagatgcaaatgaaattccagcaagtgagagagcaaatggaagcagaaatcgctcatctgaagcaagaaaacggcatattgagagacgcggtttcaaataccacaaaccagctcgagtctaagcaaagtgcagaactcaataagctgcgccaggattacgccagactggtgaacgaattgactgaaaaaacgggaaagctgcagcaggaggaggttcaaaaaaagaacgcagagcaagcagcgacacagctgaaggtccagctccaggaagctgaacgaagatgggaagaagtgcagtcttacatacgaaagcgcacagccgaacacgaggcagctcagcaggacctacagtccaagttcgtggcaaaagaaaatgaagtccagagcctacacagcaaattgacagatacactggtctcaaaacagcagctggaacagaggctgatgcagctaatggagtctgaacagaagcgggtcaataaagaggaatctcttcaaatgcaggtgcaggacatcttagagcagaatgaggctcttaaggcgcagatacagcagttccactcccaaatcgccgcccagacttcagcaagtgtgctagcagaagaactgcataaggtgattgcggagaaggacaagcaaattaaacaaacagaagactcattggcgtcagagcgagataggctgacttccaaggaagaggaactgaaggatatccaaaatatgaatttcctgcttaaggcggaggtgcagaagctccaggcgttagccaacgaacaagccgctgccgcgcatgagctggaaaaaatgcagcagagtgtctatgtcaaggatgacaagatcaggctcctcgaggaacagcttcaacatgagataagtaataagatggaagagttcaaaatcctcaacgaccagaacaaagctctaaaaagcgaagtgcaaaagctccaaactctggtctccgagcagcccaataaagacgtggtagagcagatggaaaagtgcattcaagagaaggacgagaagctgaagaccgttgaggaactgttggaaactggactcattcaggttgccactaaagaggaggaactgaacgccatacggaccgagaatagctcactcactaaggaagtgcaggatctcaaggccaaacagaacgaccaggtcagtttcgctagcttggtggaagaactgaagaaagtcatccatgaaaaggatggtaaaataaaatccgttgaggaacttctggaggctgaactgctgaaggtcgccaacaaggaaaagactgtgcaggaccttaaacaggagatcaaagccctgaaggaggaaatcggtaatgtgcagctagaaaaggcacagcagctgtcgatcacctcaaaagtgcaggagcttcagaatttgctcaagggcaaagaagagcaaatgaatacaatgaaagccgtgctagaggaaaaagagaaagacctcgctaatacaggtaaatggctccaggatctccaagaggaaaatgaatcactgaaagcgcacgttcaggaggttgcgcagcataacctcaaagaagcctcatccgcttcccagttcgaggaactagaaatcgtcctaaaggagaaagaaaacgaactcaaacggctggaggctatgctcaaagagagagaaagtgatttatccagcaaaacgcagctgctgcaggatgtacaagatgagaataagctgtttaagtcacagatcgagcagctgaaacaacagaactaccagcaagcttccagttttccacctcatgaagagctgctgaaggtaatatcagagcgcgagaaagagatcagcgggctgtggaatgaactggacagtctgaaagatgcagtggaacatcagagaaaaaagaacaacgaccttcgggagaaaaactgggaagcaatggaggcactcgcttccactgaaaagatgttgcaggataaggtgaacaaaacctccaaagagagacaacagcaagtggaagcggtcgagcttgaggcgaaagaagtcctaaagaagctgtttccgaaggtcagcgtcccttccaatctctcctatggcgaatggctgcacggttttgaaaagaaagccaaagagtgcatggcaggcacctctggctctgaagaggtcaaagtgctggagcataagttgaaggaggccgacgaaatgcataccttattgcagctggaatgtgagaagtataagtcagtcctggctgagacggagggtattttgcagaaactccagaggagtgtggaacaagaagaaaataaatggaaagtgaaagttgacgaatctcacaagacaataaagcagatgcagagctctttcacctccagcgaacaagagctggaaagattacgaagtgagaacaaggatatagaaaatctgagacgagaacgcgaacaccttgagatggaattagaaaaggccgagatggaacggagcacatacgtgacagaggtgagggagctcaaggacctcctcacagaactgcagaaaaaacttgacgattcatatagtgaagctgtccggcagaacgaagagttaaaccttctcaaagcgcagcttaatgagacactgacgaagctgcgaacggagcagaacgagcgacaaaaagtggcgggagacctccataaggcccagcagtctcttgagctgattcagtctaagattgttaaggccgccggcgatactaccgtgatcgaaaattctgatgtgtctcccgagactgagtcttcagagaaggaaacaatgtcggtttctctcaaccagacggtgactcagctccaacagcttctgcaggccgtgaaccagcagctaacgaaagaaaaggagcactatcaagtcctggagtag

SEQ ID NO: 35487 - DNA, 4252 bp, Artificial Sequence
  derived and/or modified sequence
gaagccgcccgtttcctgccgagcggcgcgacggcacctgagcgactgcggcggcggcggcggcggcggcggcgcctcggagcgggcggcccgggctgtagtgccggcgccgccgcgtcttcccggtctcctttcccggccgcacagggttttataggatcacattgacaaaagtaccatggagttttatgagtcagcatattttattgttcttattccttcaatagttattacagtaattttcctcttcttctggcttttcatgaaagaaacattatatgatgaagttcttgcaaaacagaaaagagaacaaaagcttattcctaccaaaacagataaaaagaaagcagaaaagaaaaagaataaaaagaaagaaatccagaatggaaacctccatgaatccgactctgagagtgtacctcgagactttaaattatcagatgctttggcagtagaagatgatcaagttgcacctgttccattgaatgtcgttgaaacttcaagtagtgttagggaaagaaaaaagaaggaaaagaaacaaaagcctgtgcttgaagagcaggtcatcaaagaaagtgacgcatcaaagattcctggcaaaaaagtagaacctgtcccagttactaaacagcccacccctccctctgaagcagctgcctcgaagaagaaaccagggcagaagaagtctaaaaatggaagcgatgaccaggataaaaaggtggaaactctcatggtaccatcaaaaaggcaagaagcattgcccctccaccaagagactaaacaagaaagtggatcagggaagaagaaagcttcatcaaagaaacaaaagacagaaaatgtcttcgtagatgaaccccttattcatgcaactacttatattcctttgatggataatgctgactcaagtcctgtggtagataagagagaggttattgatttgcttaaacctgaccaagtagaagggatccagaaatctgggactaaaaaactgaagaccgaaactgacaaagaaaatgctgaagtgaagtttaaagattttcttctgtccttgaagactatgatgttttctgaagatgaggctctttgtgttgtagacttgctaaaggagaagtctggtgtaatacaagatgctttaaagaagtcaagtaagggagaattgactacgcttatacatcagcttcaagaaaaggacaagttactcgctgctgtgaaggaagatgctgctgctacaaaggatcggtgtaagcagttaacccaggaaatgatgacagagaaagaaagaagcaatgtggttataacaaggatgaaagatcgaattggaacattagaaaaggaacataatgtatttcaaaacaaaatacatgtcagttatcaagagactcaacagatgcagatgaagtttcagcaagttcgtgagcagatggaggcagagatagctcacttgaagcaggaaaatggtatactgagagatgcagtcagcaacactacaaatcaactggaaagcaagcagtctgcagaactaaataaactacgccaggattatgctaggttggtgaatgagctgactgagaaaacaggaaagctacagcaagaggaagtccaaaagaagaatgctgagcaagcagctactcagttgaaggttcaactacaagaagctgagagaaggtgggaagaagttcagagctacatcaggaagagaacagcggaacatgaggcagcacagcaagatttacagagtaaatttgtggccaaagaaaatgaagtacagagtctgcatagtaagcttacagataccttggtatcaaaacaacagttggagcaaagactaatgcagttaatggaatcagagcagaaaagggtgaacaaagaagagtctctacaaatgcaggttcaggatattttggagcagaatgaggctttgaaagctcaaattcagcagttccattcccagatagcagcccagacctccgcttcagttctagcagaagaattacataaagtgattgcagaaaaggataagcagataaaacagactgaagattctttagcaagtgaacgtgatcgtttaacaagtaaagaagaggaacttaaggatatacagaatatgaatttcttattaaaagctgaagtgcagaaattacaggccctggcaaatgagcaggctgctgctgcacatgaattggagaagatgcaacaaagtgtttatgttaaagatgataaaataagattgctggaagagcaactacaacatgaaatttcaaacaaaatggaagaatttaagattctaaatgaccaaaacaaagcattaaaatcagaagttcagaagctacagactcttgtttctgaacagcctaataaggatgttgtggaacaaatggaaaaatgcattcaagaaaaagatgagaagttaaagactgtggaagaattacttgaaactggacttattcaggtggcaactaaagaagaggagctgaatgcaataagaacagaaaattcatctctgacaaaagaagttcaagacttaaaagctaagcaaaatgatcaggtttcttttgcctctctagttgaagaacttaagaaagtgatccatgagaaagatggaaagatcaagtctgtagaagagcttctggaggcagaacttctcaaagttgctaacaaggagaaaactgttcaggatttgaaacaggaaataaaggctctaaaagaagaaataggaaatgtccagcttgaaaaggctcaacagttatctatcacttccaaagttcaggagcttcagaacttattaaaaggaaaagaggaacagatgaataccatgaaggctgttttggaagagaaagagaaagacctagccaatacagggaagtggttacaggatcttcaagaagaaaatgaatctttaaaagcacatgttcaggaagtagcacaacataacttgaaagaggcctcttctgcatcacagtttgaagaacttgagattgtgttgaaagaaaaggaaaatgaattgaagaggttagaagccatgctaaaagagagggagagtgatctttctagcaaaacacagctgttacaggatgtacaagatgaaaacaaattgtttaagtcccaaattgagcagcttaaacaacaaaactaccaacaggcatcttcttttccccctcatgaagaattattaaaagtaatttcagaaagagagaaagaaataagtggtctctggaatgagttagattctttgaaggatgcagttgaacaccagaggaagaaaaacaatgaccttcgggagaaaaactgggaagcaatggaagcattggcatcaactgaaaaaatgctgcaggacaaagtgaacaagacttccaaggaaaggcagcaacaggtggaagctgttgagttggaggctaaagaagttctcaaaaaattatttccaaaggtgtctgtcccttctaatttgagttatggtgaatggttgcatggatttgaaaaaaaggcaaaagaatgtatggctggaacttcagggtcagaggaggttaaggttctagagcacaagttgaaagaagctgatgaaatgcacacattgttacagctagagtgtgaaaaatacaaatccgtccttgcagaaacagaaggaattttacagaagctacagagaagtgttgagcaagaagaaaataaatggaaagttaaggtcgatgaatcacacaagactattaaacagatgcagtcatcatttacatcttcagaacaagagctagagcgattaagaagcgaaaataaggatattgaaaatctgagaagagaacgagaacatttggaaatggaactagaaaaggcagagatggaacgatctacctatgttacagaagtcagagagctgaaagatctgttgactgaattgcagaaaaaacttgatgattcatattctgaagcagtaagacagaatgaagagctaaatttgttgaaggcacagttaaatgaaacactcacaaaacttagaactgaacaaaatgaaagacagaaggtagctggtgatttgcataaggctcaacagtcactggagcttatccagtcaaaaatagtaaaagctgctggagacactactgttattgaaaatagtgatgtttccccagaaacggagtcttctgagaaggagacaatgtctgtaagtctaaatcagactgtaacacagttacagcagttgcttcaggcggtaaaccaacagctcacaaaggagaaagagcactaccaggtgttagagtga

SEQ ID NO: 35488 - DNA, 4618 bp, Artificial Sequence
  derived and/or modified sequence
cgccgcgtcttcccggtctcctttcccggccgcacagggttttataggatcacattgacaaaagtaccatggagttttatgagtcagcatattttattgttcttattccttcaatagttattacagtaattttcctcttcttctggcttttcatgaaagaaacattatatgatgaagttcttgcaaaacagaaaagagaacaaaagcttattcctaccaaaacagataaaaagaaagcagaaaagaaaaagaataaaaagaaagaaatccagaatggaaacctccatgaatccgactctgagagtgtacctcgagactttaaattatcagatgctttggcagtagaagatgatcaagttgcacctgttccattgaatgtcgttgaaacttcaagtagtgttagggaaagaaaaaagaaggaaaagaaacaaaagcctgtgcttgaagagcaggtcatcaaagaaagtgacgcatcaaagattcctggcaaaaaagtagaacctgtcccagttactaaacagcccacccctccctctgaagcagctgcctcgaagaagaaaccagggcagaagaagtctaaaaatggaagcgatgaccaggataaaaaggtggaaactctcatggtaccatcaaaaaggcaagaagcattgcccctccaccaagagactaaacaagaaagtggatcagggaagaagaaagcttcatcaaagaaacaaaagacagaaaatgtcttcgtagatgaaccccttattcatgcaactacttatattcctttgatggataatgctgactcaagtcctgtggtagataagagagaggttattgatttgcttaaacctgaccaagtagaagggatccagaaatctgggactaaaaaactgaagaccgaaactgacaaagaaaatgctgaagtgaagtttaaagattttcttctgtccttgaagactatgatgttttctgaagatgaggctctttgtgttgtagacttgctaaaggagaagtctggtgtaatacaagatgctttaaagaagtcaagtaagggagaattgactacgcttatacatcagcttcaagaaaaggacaagttactcgctgctgtgaaggaagatgctgctgctacaaaggatcggtgtaagcagttaacccaggaaatgatgacagagaaagaaagaagcaatgtggttataacaaggatgaaagatcgaattggaacattagaaaaggaacataatgtatttcaaaacaaaatacatgtcagttatcaagagactcaacagatgcagatgaagtttcagcaagttcgtgagcagatggaggcagagatagctcacttgaagcaggaaaatggtatactgagagatgcagtcagcaacactacaaatcaactggaaagcaagcagtctgcagaactaaataaactacgccaggattatgctaggttggtgaatgagctgactgagaaaacaggaaagctacagcaagaggaagtccaaaagaagaatgctgagcaagcagctactcagttgaaggttcaactacaagaagctgagagaaggtgggaagaagttcagagctacatcaggaagagaacagcggaacatgaggcagcacagcaagatttacagagtaaatttgtggccaaagaaaatgaagtacagagtctgcatagtaagcttacagataccttggtatcaaaacaacagttggagcaaagactaatgcagttaatggaatcagagcagaaaagggtgaacaaagaagagtctctacaaatgcaggttcaggatattttggagcagaatgaggctttgaaagctcaaattcagcagttccattcccagatagcagcccagacctccgcttcagttctagcagaagaattacataaagtgattgcagaaaaggataagcagataaaacagactgaagattctttagcaagtgaacgtgatcgtttaacaagtaaagaagaggaacttaaggatatacagaatatgaatttcttattaaaagctgaagtgcagaaattacaggccctggcaaatgagcaggctgctgctgcacatgaattggagaagatgcaacaaagtgtttatgttaaagatgataaaataagattgctggaagagcaactacaacatgaaatttcaaacaaaatggaagaatttaagattctaaatgaccaaaacaaagcattaaaatcagaagttcagaagctacagactcttgtttctgaacagcctaataaggatgttgtggaacaaatggaaaaatgcattcaagaaaaagatgagaagttaaagactgtggaagaattacttgaaactggacttattcaggtggcaactaaagaagaggagctgaatgcaataagaacagaaaattcatctctgacaaaagaagttcaagacttaaaagctaagcaaaatgatcaggtttcttttgcctctctagttgaagaacttaagaaagtgatccatgagaaagatggaaagatcaagtctgtagaagagcttctggaggcagaacttctcaaagttgctaacaaggagaaaactgttcaggatttgaaacaggaaataaaggctctaaaagaagaaataggaaatgtccagcttgaaaaggctcaacagttatctatcacttccaaagttcaggagcttcagaacttattaaaaggaaaagaggaacagatgaataccatgaaggctgttttggaagagaaagagaaagacctagccaatacagggaagtggttacaggatcttcaagaagaaaatgaatctttaaaagcacatgttcaggaagtagcacaacataacttgaaagaggcctcttctgcatcacagtttgaagaacttgagattgtgttgaaagaaaaggaaaatgaattgaagaggttagaagccatgctaaaagagagggagagtgatctttctagcaaaacacagctgttacaggatgtacaagatgaaaacaaattgtttaagtcccaaattgagcagcttaaacaacaaaactaccaacaggcatcttcttttccccctcatgaagaattattaaaagtaatttcagaaagagagaaagaaataagtggtctctggaatgagttagattctttgaaggatgcagttgaacaccagaggaagaaaaacaatgaccttcgggagaaaaactgggaagcaatggaagcattggcatcaactgaaaaaatgctgcaggacaaagtgaacaagacttccaaggaaaggcagcaacaggtggaagctgttgagttggaggctaaagaagttctcaaaaaattatttccaaaggtgtctgtcccttctaatttgagttatggtgaatggttgcatggatttgaaaaaaaggcaaaagaatgtatggctggaacttcagggtcagaggaggttaaggttctagagcacaagttgaaagaagctgatgaaatgcacacattgttacagctagagtgtgaaaaatacaaatccgtccttgcagaaacagaaggaattttacagaagctacagagaagtgttgagcaagaagaaaataaatggaaagttaaggtcgatgaatcacacaagactattaaacagatgcagtcatcatttacatcttcagaacaagagctagagcgattaagaagcgaaaataaggatattgaaaatctgagaagagaacgagaacatttggaaatggaactagaaaaggcagagatggaacgatctacctatgttacagaagtcagagagctgaaagatctgttgactgaattgcagaaaaaacttgatgattcatattctgaagcagtaagacagaatgaagagctaaatttgttgaaggcacagttaaatgaaacactcacaaaacttagaactgaacaaaatgaaagacagaaggtagctggtgatttgcataaggctcaacagtcactggagcttatccagtcaaaaatagtaaaagctgctggagacactactgttattgaaaatagtgatgtttccccagaaacggagtcttctgagaaggagacaatgtctgtaagtctaaatcagactgtaacacagttacagcagttgcttcaggcggtaaaccaacagctcacaaaggagaaagagcactaccaggtgttagagtgaagtaattgggaaactgttcatttgaggataaaaaaggcattgtattatattttgccaaattaaagccttatttatgttttcaccctttctactttgtcagaaacactgaacagagttttgtcttttctaatccttgttagactactgatttaaagaaggaaaaaaaaaagccaactctgtagacaccttcagagtttagttttataataaaaactgtttgaataattagacctttacattcctgaagataaacatgtaatcttttatcttattttgctcaataaaattgttcagaagatcaaagtggtaaagacaatgtaaaatttaacattttaatactgatgttgtacactgttttacttaacattttgggaagtaactgcctctgacttcaactcaagaaaacacttttttgttgctaatgtaatcggtttttgtaatggcgtcagcaaataaaaggatgcttattattcaaa

SEQ ID NO: 35489 - DNA, 4682 bp, Artificial Sequence
  derived and/or modified sequence
ggttctttttttttttttgtccccaccttcttccctatttaggttttataggatcacattgacaaaagtaccatggagttttatgagtcagcatattttattgttcttattccttcaatagttattacagtaattttcctcttcttctggcttttcatgaaagaaacattatatgatgaagttcttgcaaaacagaaaagagaacaaaagcttattcctaccaaaacagataaaaagaaagcagaaaagaaaaagaataaaaagaaagaaatccagaatggaaacctccatgaatccgactctgagagtgtacctcgagactttaaattatcagatgctttggcagtagaagatgatcaagttgcacctgttccattgaatgtcgttgaaacttcaagtagtgttagggaaagaaaaaagaaggaaaagaaacaaaagcctgtgcttgaagagcaggtcatcaaagaaagtgacgcatcaaagattcctggcaaaaaagtagaacctgtcccagttactaaacagcccacccctccctctgaagcagctgcctcgaagaagaaaccagggcagaagaagtctaaaaatggaagcgatgaccaggataaaaaggtggaaactctcatggtaccatcaaaaaggcaagaagcattgcccctccaccaagagactaaacaagaaagtggatcagggaagaagaaagcttcatcaaagaaacaaaagacagaaaatgtcttcgtagatgaaccccttattcatgcaactacttatattcctttgatggataatgctgactcaagtcctgtggtagataagagagaggttattgatttgcttaaacctgaccaagtagaagggatccagaaatctgggactaaaaaactgaagaccgaaactgacaaagaaaatgctgaagtgaagtttaaagattttcttctgtccttgaagactatgatgttttctgaagatgaggctctttgtgttgtagacttgctaaaggagaagtctggtgtaatacaagatgctttaaagaagtcaagtaagggagaattgactacgcttatacatcagcttcaagaaaaggacaagttactcgctgctgtgaaggaagatgctgctgctacaaaggatcggtgtaagcagttaacccaggaaatgatgacagagaaagaaagaagcaatgtggttataacaaggatgaaagatcgaattggaacattagaaaaggaacataatgtatttcaaaacaaaatacatgtcagttatcaagagactcaacagatgcagatgaagtttcagcaagttcgtgagcagatggaggcagagatagctcacttgaagcaggaaaatggtatactgagagatgcagtcagcaacactacaaatcaactggaaagcaagcagtctgcagaactaaataaactacgccaggattatgctaggttggtgaatgagctgactgagaaaacaggaaagctacagcaagaggaagtccaaaagaagaatgctgagcaagcagctactcagttgaaggttcaactacaagaagctgagagaaggtgggaagaagttcagagctacatcaggaagagaacagcggaacatgaggcagcacagcaagatttacagagtaaatttgtggccaaagaaaatgaagtacagagtctgcatagtaagcttacagataccttggtatcaaaacaacagttggagcaaagactaatgcagttaatggaatcagagcagaaaagggtgaacaaagaagagtctctacaaatgcaggttcaggatattttggagcagaatgaggctttgaaagctcaaattcagcagttccattcccagatagcagcccagacctccgcttcagttctagcagaagaattacataaagtgattgcagaaaaggataagcagataaaacagactgaagattctttagcaagtgaacgtgatcgtttaacaagtaaagaagaggaacttaaggatatacagaatatgaatttcttattaaaagctgaagtgcagaaattacaggccctggcaaatgagcaggctgctgctgcacatgaattggagaagatgcaacaaagtgtttatgttaaagatgataaaataagattgctggaagagcaactacaacatgaaatttcaaacaaaatggaagaatttaagattctaaatgaccaaaacaaagcattaaaatcagaagttcagaagctacagactcttgtttctgaacagcctaataaggatgttgtggaacaaatggaaaaatgcattcaagaaaaagatgagaagttaaagactgtggaagaattacttgaaactggacttattcaggtggcaactaaagaagaggagctgaatgcaataagaacagaaaattcatctctgacaaaagaagttcaagacttaaaagctaagcaaaatgatcaggtttcttttgcctctctagttgaagaacttaagaaagtgatccatgagaaagatggaaagatcaagtctgtagaagagcttctggaggcagaacttctcaaagttgctaacaaggagaaaactgttcaggatttgaaacaggaaataaaggctctaaaagaagaaataggaaatgtccagcttgaaaaggctcaacagttatctatcacttccaaagttcaggagcttcagaacttattaaaaggaaaagaggaacagatgaataccatgaaggctgttttggaagagaaagagaaagacctagccaatacagggaagtggttacaggatcttcaagaagaaaatgaatctttaaaagcacatgttcaggaagtagcacaacataacttgaaagaggcctcttctgcatcacagtttgaagaacttgagattgtgttgaaagaaaaggaaaatgaattgaagaggttagaagccatgctaaaagagagggagagtgatctttctagcaaaacacagctgttacaggatgtacaagatgaaaacaaattgtttaagtcccaaattgagcagcttaaacaacaaaactaccaacaggcatcttcttttccccctcatgaagaattattaaaagtaatttcagaaagagagaaagaaataagtggtctctggaatgagttagattctttgaaggatgcagttgaacaccagaggaagaaaaacaatgaccttcgggagaaaaactgggaagcaatggaagcattggcatcaactgaaaaaatgctgcaggacaaagtgaacaagacttccaaggaaaggcagcaacaggtggaagctgttgagttggaggctaaagaagttctcaaaaaattatttccaaaggtgtctgtcccttctaatttgagttatggtgaatggttgcatggatttgaaaaaaaggcaaaagaatgtatggctggaacttcagggtcagaggaggttaaggttctagagcacaagttgaaagaagctgatgaaatgcacacattgttacagctagagtgtgaaaaatacaaatccgtccttgcagaaacagaaggaattttacagaagctacagagaagtgttgagcaagaagaaaataaatggaaagttaaggtcgatgaatcacacaagactattaaacagatgcagtcatcatttacatcttcagaacaagagctagagcgattaagaagcgaaaataaggatattgaaaatctgagaagagaacgagaacatttggaaatggaactagaaaaggcagagatggaacgatctacctatgttacagaagtcagagagctgaaagatctgttgactgaattgcagaaaaaacttgatgattcatattctgaagcagtaagacagaatgaagagctaaatttgttgaaggcacagttaaatgaaacactcacaaaacttagaactgaacaaaatgaaagacagaaggtagctggtgatttgcataaggctcaacagtcactggagcttatccagtcaaaaatagtaaaagctgctggagacactactgttattgaaaatagtgatgtttccccagaaacggagtcttctgagaaggagacaatgtctgtaagtctaaatcagactgtaacacagttacagcagttgcttcaggcggtaaaccaacagctcacaaaggagaaagagcactaccaggtgttagagtgatcatcctctggcctaccttgacacatgctctccttcaaaatgctaattcagagtgaagtaattgggaaactgttcatttgaggataaaaaaggcattgtattatattttgccaaattaaagccttatttatgttttcaccctttctactttgtcagaaacactgaacagagttttgtcttttctaatccttgttagactactgatttaaagaaggaaaaaaaaaagccaactctgtagacaccttcagagtttagttttataataaaaactgtttgaataattagacctttacattcctgaagataaacatgtaatcttttatcttattttgctcaataaaattgttcagaagatcaaagtggtaaagacaatgtaaaatttaacattttaatactgatgttgtacactgttttacttaacattttgggaagtaactgcctctgacttcaactcaagaaaacacttttttgttgctaatgtaatcggtttttgtaatggcgtcagcaaataaaaggatgcttattattcaaacttg

SEQ ID NO: 35490 - DNA, 4793 bp, Artificial Sequence
  derived and/or modified sequence
cgtcttcccggtctcctttcccggccgcacagggtagattttcgttccgtcacccaggctggagtgcagtggtgtgaccttggcttgctgcaaccctttgcctcctgggttcaagtgattctcattgcctcagcctcctaagtagctgggattacaggttttataggatcacattgacaaaagtaccatggagttttatgagtcagcatattttattgttcttattccttcaatagttattacagtaattttcctcttcttctggcttttcatgaaagaaacattatatgatgaagttcttgcaaaacagaaaagagaacaaaagcttattcctaccaaaacagataaaaagaaagcagaaaagaaaaagaataaaaagaaagaaatccagaatggaaacctccatgaatccgactctgagagtgtacctcgagactttaaattatcagatgctttggcagtagaagatgatcaagttgcacctgttccattgaatgtcgttgaaacttcaagtagtgttagggaaagaaaaaagaaggaaaagaaacaaaagcctgtgcttgaagagcaggtcatcaaagaaagtgacgcatcaaagattcctggcaaaaaagtagaacctgtcccagttactaaacagcccacccctccctctgaagcagctgcctcgaagaagaaaccagggcagaagaagtctaaaaatggaagcgatgaccaggataaaaaggtggaaactctcatggtaccatcaaaaaggcaagaagcattgcccctccaccaagagactaaacaagaaagtggatcagggaagaagaaagcttcatcaaagaaacaaaagacagaaaatgtcttcgtagatgaaccccttattcatgcaactacttatattcctttgatggataatgctgactcaagtcctgtggtagataagagagaggttattgatttgcttaaacctgaccaagtagaagggatccagaaatctgggactaaaaaactgaagaccgaaactgacaaagaaaatgctgaagtgaagtttaaagattttcttctgtccttgaagactatgatgttttctgaagatgaggctctttgtgttgtagacttgctaaaggagaagtctggtgtaatacaagatgctttaaagaagtcaagtaagggagaattgactacgcttatacatcagcttcaagaaaaggacaagttactcgctgctgtgaaggaagatgctgctgctacaaaggatcggtgtaagcagttaacccaggaaatgatgacagagaaagaaagaagcaatgtggttataacaaggatgaaagatcgaattggaacattagaaaaggaacataatgtatttcaaaacaaaatacatgtcagttatcaagagactcaacagatgcagatgaagtttcagcaagttcgtgagcagatggaggcagagatagctcacttgaagcaggaaaatggtatactgagagatgcagtcagcaacactacaaatcaactggaaagcaagcagtctgcagaactaaataaactacgccaggattatgctaggttggtgaatgagctgactgagaaaacaggaaagctacagcaagaggaagtccaaaagaagaatgctgagcaagcagctactcagttgaaggttcaactacaagaagctgagagaaggtgggaagaagttcagagctacatcaggaagagaacagcggaacatgaggcagcacagcaagatttacagagtaaatttgtggccaaagaaaatgaagtacagagtctgcatagtaagcttacagataccttggtatcaaaacaacagttggagcaaagactaatgcagttaatggaatcagagcagaaaagggtgaacaaagaagagtctctacaaatgcaggttcaggatattttggagcagaatgaggctttgaaagctcaaattcagcagttccattcccagatagcagcccagacctccgcttcagttctagcagaagaattacataaagtgattgcagaaaaggataagcagataaaacagactgaagattctttagcaagtgaacgtgatcgtttaacaagtaaagaagaggaacttaaggatatacagaatatgaatttcttattaaaagctgaagtgcagaaattacaggccctggcaaatgagcaggctgctgctgcacatgaattggagaagatgcaacaaagtgtttatgttaaagatgataaaataagattgctggaagagcaactacaacatgaaatttcaaacaaaatggaagaatttaagattctaaatgaccaaaacaaagcattaaaatcagaagttcagaagctacagactcttgtttctgaacagcctaataaggatgttgtggaacaaatggaaaaatgcattcaagaaaaagatgagaagttaaagactgtggaagaattacttgaaactggacttattcaggtggcaactaaagaagaggagctgaatgcaataagaacagaaaattcatctctgacaaaagaagttcaagacttaaaagctaagcaaaatgatcaggtttcttttgcctctctagttgaagaacttaagaaagtgatccatgagaaagatggaaagatcaagtctgtagaagagcttctggaggcagaacttctcaaagttgctaacaaggagaaaactgttcaggatttgaaacaggaaataaaggctctaaaagaagaaataggaaatgtccagcttgaaaaggctcaacagttatctatcacttccaaagttcaggagcttcagaacttattaaaaggaaaagaggaacagatgaataccatgaaggctgttttggaagagaaagagaaagacctagccaatacagggaagtggttacaggatcttcaagaagaaaatgaatctttaaaagcacatgttcaggaagtagcacaacataacttgaaagaggcctcttctgcatcacagtttgaagaacttgagattgtgttgaaagaaaaggaaaatgaattgaagaggttagaagccatgctaaaagagagggagagtgatctttctagcaaaacacagctgttacaggatgtacaagatgaaaacaaattgtttaagtcccaaattgagcagcttaaacaacaaaactaccaacaggcatcttcttttccccctcatgaagaattattaaaagtaatttcagaaagagagaaagaaataagtggtctctggaatgagttagattctttgaaggatgcagttgaacaccagaggaagaaaaacaatgaccttcgggagaaaaactgggaagcaatggaagcattggcatcaactgaaaaaatgctgcaggacaaagtgaacaagacttccaaggaaaggcagcaacaggtggaagctgttgagttggaggctaaagaagttctcaaaaaattatttccaaaggtgtctgtcccttctaatttgagttatggtgaatggttgcatggatttgaaaaaaaggcaaaagaatgtatggctggaacttcagggtcagaggaggttaaggttctagagcacaagttgaaagaagctgatgaaatgcacacattgttacagctagagtgtgaaaaatacaaatccgtccttgcagaaacagaaggaattttacagaagctacagagaagtgttgagcaagaagaaaataaatggaaagttaaggtcgatgaatcacacaagactattaaacagatgcagtcatcatttacatcttcagaacaagagctagagcgattaagaagcgaaaataaggatattgaaaatctgagaagagaacgagaacatttggaaatggaactagaaaaggcagagatggaacgatctacctatgttacagaagtcagagagctgaaagatctgttgactgaattgcagaaaaaacttgatgattcatattctgaagcagtaagacagaatgaagagctaaatttgttgaaggcacagttaaatgaaacactcacaaaacttagaactgaacaaaatgaaagacagaaggtagctggtgatttgcataaggctcaacagtcactggagcttatccagtcaaaaatagtaaaagctgctggagacactactgttattgaaaatagtgatgtttccccagaaacggagtcttctgagaaggagacaatgtctgtaagtctaaatcagactgtaacacagttacagcagttgcttcaggcggtaaaccaacagctcacaaaggagaaagagcactaccaggtgttagagtgatcatcctctggcctaccttgacacatgctctccttcaaaatgctaattcagagtgaagtaattgggaaactgttcatttgaggataaaaaaggcattgtattatattttgccaaattaaagccttatttatgttttcaccctttctactttgtcagaaacactgaacagagttttgtcttttctaatccttgttagactactgatttaaagaaggaaaaaaaaaagccaactctgtagacaccttcagagtttagttttataataaaaactgtttgaataattagacctttacattcctgaagataaacatgtaatcttttatcttattttgctcaataaaattgttcagaagatcaaagtggtaaagacaatgtaaaatttaacattttaatactgatgttgtacactgttttacttaacattttgggaagtaactgcctctgacttcaactcaagaaaacacttttttgttgctaatgtaatcggtttttgtaatggcgtcagcaaataaaaggatgcttattattcaaa

SEQ ID NO: 35491 - DNA, 4074 bp, Artificial Sequence
  derived and/or modified sequence
atggagttctatgagagcgcctacttcatcgtgctgatccccagcatcgtcatcaccgtcatcttcctgttcttctggctgttcatgaaggagaccctgtatgatgaggtgctggccaagcagaagcgggagcagaagctgatccccaccaagacagacaagaagaaggccgagaagaagaagaacaagaagaaggagatccagaatggaaacctgcatgaaagtgacagcgagagcgtgccccgggacttcaagctgagtgatgccctggccgtggaggatgaccaggtggcccctgtgcccctgaatgtggtggagaccagcagctctgtgcgggagaggaagaagaaggagaagaagcagaagcctgtgctggaggagcaggtgatcaaggagagtgatgccagcaagatccctgggaagaaggtggagcctgtgcctgtgaccaagcagcccaccccacccagcgaggccgccgccagcaagaagaagccaggccagaagaagagcaagaatggaagtgatgaccaggacaagaaggtggagaccctgatggtgcccagcaagaggcaggaggccctgcccctgcaccaggagaccaagcaggagagcggcagcggcaagaagaaggccagcagcaagaagcagaagacagaaaatgtgtttgtggatgagcccctcatccacgccaccacctacatccccctgatggacaatgctgacagcagccctgtggtggacaagcgggaggtgattgacctgctgaagccagaccaggtggagggcatccagaagagcggcaccaagaagctgaagacagaaacagacaaggaaaatgctgaggtgaagttcaaggacttcctgctgagcctgaagaccatgatgttttctgaagatgaggccctgtgtgtggtggacctgctgaaggagaagagcggggtcatccaggatgccctgaagaagagcagcaagggggagctgaccaccctcatccaccagctgcaggagaaggacaagctgctggccgctgtgaaggaggatgctgctgccaccaaggaccgctgcaagcagctgacccaggagatgatgacagagaaggagaggagcaatgtggtgatcaccaggatgaaggaccgcatcggcaccctggagaaggagcacaacgtgttccagaacaagatccacgtgtcctaccaggagacccagcagatgcagatgaagttccagcaggtgcgggagcagatggaggccgagatcgcccacctgaagcaggagaatggcatcctgagagatgctgtgagcaacaccaccaaccagctggagagcaagcagagcgctgagctgaacaagctgcggcaggactatgcccggctggtgaatgagctgacagagaagacaggcaagctgcagcaggaggaggtgcagaagaagaatgctgagcaggccgccacccagctgaaggtgcagctgcaggaggccgagcggcgctgggaggaggtgcagagctacatcaggaagaggacagctgagcatgaagctgcccagcaggacctgcagagcaagtttgtggccaaggaaaatgaggtgcagagcctgcacagcaagctgacagacaccctggtgtccaagcagcagctggagcagaggctgatgcagctgatggagagcgagcagaagagggtgaacaaggaggagagcctgcagatgcaggtgcaggacatcctggagcagaatgaggccctgaaggcccagatccagcagttccacagccagattgctgcccagaccagcgcctctgtgctggccgaggagctgcacaaggtgattgctgagaaggacaagcagatcaagcagacagaggacagcctggccagcgagcgggaccggctgaccagcaaggaggaggagctgaaggacatccagaacatgaacttcctgctgaaggccgaggtgcagaagctgcaggccctggccaatgagcaggccgccgccgcccacgagctggagaagatgcagcagagcgtgtatgtgaaggatgacaagatccggctgctggaggagcagctgcagcacgagatcagcaacaagatggaggagttcaagatcctgaatgaccagaacaaggccctgaagtctgaggtgcagaagctgcagaccctggtgtctgagcagcccaacaaggatgtggtggagcagatggagaagtgcatccaggagaaggatgagaagctgaagacagtggaggagctgctggagaccggcctcatccaggtggccaccaaggaggaggagctgaatgccatcagaacagagaacagcagcctgaccaaggaggtgcaggacctgaaggccaagcagaatgaccaggtgtcctttgccagcctggtggaggagctgaagaaggtgatccacgagaaggatggcaagatcaagtctgtggaggagctgctggaggccgagctgctgaaggtggccaacaaggagaagacagtgcaggacctgaagcaggagatcaaggccctgaaggaggagattggaaatgtgcagctggagaaggcccagcagctgagcatcaccagcaaggtgcaggagctgcagaacctgctgaagggcaaggaggagcagatgaacaccatgaaggctgtgctggaggagaaggagaaggacctggccaacacaggcaagtggctgcaggacctgcaggaggagaatgaaagcctgaaggcccacgtgcaggaggtggcccagcacaacctgaaggaggccagcagcgccagccagtttgaggagctggagatcgtgctgaaggagaaggaaaatgagctgaagaggctggaggccatgctgaaggagcgggagagtgacctgagcagcaagacccagctgctgcaggatgtgcaggatgagaacaagctgttcaagagccagatcgagcagctgaagcagcagaactaccagcaggccagcagcttcccccctcatgaggagctgctgaaggtgatcagcgagcgggagaaggagatcagcggcctgtggaatgagctggacagcctgaaggatgctgtggagcaccagaggaagaagaacaatgacctgcgggagaagaactgggaggccatggaggccctggccagcacagagaagatgctgcaggacaaggtgaacaagaccagcaaggagcggcagcagcaggtggaggccgtggagctggaggccaaggaggtgctgaagaagctgttccccaaggtgtctgtgcccagcaacctgtcctatggagagtggctgcacggctttgagaagaaggccaaggagtgcatggccggcaccagcggcagcgaggaggtgaaggtgctggagcacaagctgaaggaggctgatgagatgcacaccctgctgcagctggagtgtgagaagtacaagtctgtgctggccgagacagagggcatcctgcagaagctgcagaggtctgtggagcaggaggagaacaagtggaaggtgaaggtggatgagagccacaagaccatcaagcagatgcagagcagcttcaccagcagcgagcaggagctggagcggctgcggtctgagaacaaggacatcgagaacctgcggcgggagcgggagcacctggagatggagctggagaaggccgagatggagaggagcacctacgtgacagaggtgcgggagctgaaggacctgctgacagagctgcagaagaagctggatgacagctacagcgaggccgtgcggcagaatgaggagctgaacctgctgaaggcccagctgaatgagaccctgaccaagctgaggacagagcagaatgaaaggcagaaggtggccggggacctgcacaaggcccagcagagcctggagctgatccagagcaagatcgtgaaggctgctggggacaccaccgtgattgagaacagtgatgtgtccccagagacagagagcagcgagaaggagaccatgtctgtgtccctgaaccagacagtgacccagctgcagcagctgctgcaggccgtgaaccagcagctgaccaaggagaaggagcactaccaggtgctggagtag

SEQ ID NO: 35492 - DNA, 4074 bp, Artificial Sequence
  derived and/or modified sequence
atggagttctacgagagcgcctacttcatcgtgctgatccccagcatcgttataactgttatcttccttttcttctggctgttcatgaaagagaccctgtacgacgaagttctagcgaaacagaagagggagcagaagttgatccctacaaaaacagataaaaaaaaagccgaaaaaaaaaagaataagaaaaaggaaattcagaacggcaatctgcatgaatccgatagtgagtccgtcccacgcgactttaagctgtcagacgcactcgccgtcgaggatgatcaggtcgcgcccgtccctctcaacgtggtcgagaccagcagttcagtcagggaaaggaagaagaaggagaagaagcagaaacctgtgctggaggaacaggtcatcaaggagtctgatgctagcaaaatccctggcaaaaaggttgagcccgtgccagtgaccaaacaacctaccccgccctcagaagcggccgcatccaaaaagaagcctggacagaagaaatcgaagaacggctcggacgaccaggacaagaaagtggaaacacttatggttccctcgaaacgtcaggaagccctgccactccatcaggagacgaagcaggagtcaggcagcggcaaaaaaaaggcttccagcaagaagcaaaagaccgagaacgtcttcgtagatgagccgctgattcatgcaaccacgtacatccctctgatggataacgcagatagttcccccgtcgtcgataaaagggaagtaattgaccttttaaaaccagaccaggtcgagggcatccagaaaagcggcacaaagaaactcaagaccgaaaccgacaaagaaaatgctgaagtgaaattcaaagacttcctcttaagcttgaagacgatgatgttctccgaggacgaagcactgtgtgtcgtcgatttgctgaaagagaaatctggagtgatccaagatgccctcaagaagagcagcaagggcgagctgacaacgctgatacaccagctgcaagagaaggataaactgctggcagcggtcaaagaagacgccgctgctaccaaagacaggtgcaaacaactgactcaggaaatgatgaccgagaaggaacgttccaatgttgtgatcaccaggatgaaggacagaattggcactctggagaaggagcacaacgtgttccagaacaagatccacgtgtcctaccaggagacccagcaaatgcagatgaagttccaacaggtgcgagaacagatggaggctgagatcgcgcacctgaagcaggagaatggaatcctcagagatgcagtttctaacacaaccaaccaactggagagtaagcagtccgcggaactcaacaaactccgccaggactatgcaaggctggtcaatgaacttacagagaaaaccggcaagctgcagcaggaagaagtgcagaagaaaaacgccgaacaagccgcaacacaacttaaggtgcagttgcaggaggccgagaggagatgggaggaagtgcagtcttacatccgtaagagaaccgccgagcatgaagcagctcagcaagacctccagagtaagttcgtggccaaggagaacgaagttcagtctctgcactcaaagctcaccgacacactggtgtcgaaacaacagctggagcaacgcctcatgcaactaatggaaagcgagcaaaagagagtaaacaaagaagagagtctgcagatgcaagtacaggacatactcgagcagaatgaagcattaaaggctcaaatccagcaatttcatagtcagatcgctgctcagaccagcgcctccgtcctggccgaggagctgcacaaggttattgccgagaaggataagcagataaagcagacggaggattccctcgccagcgagagggatcggttgacttcaaaggaggaggaactcaaagacatccagaacatgaactttctccttaaggccgaagtgcagaaactgcaggcactggctaatgagcaggcagccgcagctcatgaattggaaaagatgcagcagagcgtttacgtgaaggacgacaagattcgtctcctggaagagcagctgcagcacgagatttctaataaaatggaggaattcaaaattctgaacgaccagaacaaagccctgaagagcgaggtgcagaaactacagactctggtgagcgagcagccaaacaaagatgtggtcgagcaaatggagaaatgcattcaggaaaaggatgaaaaactcaagactgtggaggaactcctggaaactggactgatccaggtcgccaccaaggaggaggagttgaatgccattcggacagaaaactcttcgcttacaaaggaggtccaagacttgaaggctaaacagaacgaccaggtttcattcgcatcattggtggaagagttgaagaaagtcattcatgagaaggacggaaagataaaatctgttgaagaactactagaagcagagttacttaaggtggccaacaaggaaaagacagtccaagatctcaaacaggaaatcaaagctttaaaggaagaaatcggcaatgtgcagctggaaaaagctcagcagctgtccatcactagcaaggtgcaagagctgcagaaccttctgaagggcaaagaggagcaaatgaatacgatgaaagccgtgctcgaagagaaagaaaaagatctggccaatacggggaagtggctgcaagatctccaggaggaaaacgagtccctcaaggctcatgtgcaggaagtggcacagcacaacctcaaagaggccagctcagcctcacaattcgaagagctcgaaatagtgctgaaagagaaagaaaatgagcttaagcgactcgaagctatgttgaaggaacgtgagtccgatttgtcttcaaaaacacagctgttacaagacgtgcaggatgaaaacaagctcttcaagtcacagattgaacagctcaaacagcaaaactaccagcaggcaagctcatttccccctcacgaggaactactgaaggtgatatctgagcgcgagaaagagataagcgggctctggaacgagttagattcactcaaagacgccgtcgagcaccagcgtaaaaagaacaatgacctaagagaaaagaactgggaagcaatggaagctctggccagtaccgagaaaatgcttcaggacaaggtgaacaagacgagcaaagaacggcagcagcaggtggaagccgttgagttggaagccaaagaggtcctcaaaaagctgtttcccaaggtgtcagttccatccaatctgagctatggagagtggctgcatggcttcgaaaaaaaagccaaggaatgcatggccggcacttccggcagcgaagaggtgaaagtcctggagcataagcttaaagaggcggacgagatgcatacccttcttcaattggagtgcgaaaaatacaaatcagtcctggccgagactgaaggtattctacagaaactacagaggagcgtcgagcaggaagagaacaagtggaaggtgaaggtggatgagtcgcataagacgatcaagcagatgcaaagtagcttcaccagctcagagcaggagctcgagcgcctgcggtccgaaaacaaagatatcgagaacctgaggagagagagagaacaccttgagatggagttggagaaagctgagatggaaaggtcgacatacgtaacagaggtgagggaattaaaggatctcctaaccgagctgcagaagaaactcgacgattcgtattctgaagcagtgagacaaaatgaagaattgaacctcctgaaagcccagctgaacgaaactctcacgaagctacggaccgagcaaaacgaaaggcagaaagtcgcaggggacctccataaagcacagcagtccctcgaattgatccagagtaaaattgtcaaagctgctggcgatacgacagttatagagaactctgacgtgagtccagagacagaaagcagcgagaaagagaccatgtccgtcagcttgaaccaaaccgtgacgcaactgcagcaattactccaagcagtcaaccagcaactgactaaggagaaggaacactatcaagtgctggaatag

SEQ ID NO: 35493 - DNA, 4074 bp, Artificial Sequence
  derived and/or modified sequence
atggagttctacgagagcgcctacttcatcgtgctgatccccagcatcgtcatcactgtcatttttttattcttctggttatttatgaaagagactctctacgacgaagtacttgcaaaacagaaacgagaacagaagctgatcccgaccaagacagacaaaaagaaagccgagaagaagaaaaataaaaagaaagagattcagaatggcaatttgcacgagagtgatagcgagtctgttcctcgtgattttaagctatccgatgctctcgccgttgaggacgatcaggtggccccagtgccactaaacgtcgtggaaacaagttcatcagtccgtgagcgcaagaagaaggaaaagaagcagaaaccagtcttggaggagcaagtgattaaggaatcggatgcttccaaaattcctggcaaaaaggtggagccagtgcctgtcacaaagcagccaactccaccgtcagaggcagccgcgtctaaaaagaagcctggtcagaagaaatccaaaaacggaagcgatgatcaggataagaaggtggagaccctcatggtgccatcaaagaggcaggaggccctccctcttcatcaggagactaagcaggaaagcgggagtggcaagaagaaagcctcctccaagaagcagaagacagagaacgtcttcgttgatgaaccactaattcatgctactacatacatccctctgatggacaatgctgatagctcacccgtggttgataagcgcgaggttattgatttgctgaagcctgatcaggtggagggcattcaaaaatcgggaacaaaaaagcttaagaccgagactgataaggaaaatgctgaggttaagttcaaggactttcttttgagcttgaagacgatgatgttctccgaggacgaagccttgtgcgttgtcgatttgctgaaagaaaagtctggcgttatccaggacgctctcaaaaaaagctcaaagggcgagctaacaaccttgatccaccagctccaggagaaggataagctgttagctgcagtgaaagaggatgcggccgcaacaaaagacaggtgcaagcagttgacacaagaaatgatgacagagaaagagagatcaaatgtggtgatcacccgcatgaaagaccgcatcggcacgctggagaaagagcataatgtgttccagaacaagatccacgtgtcgtatcaggagactcagcaaatgcagatgaaatttcagcaggttagagagcagatggaggctgaaatcgctcatcttaagcaggaaaatgggatccttagagacgcagtgtccaacaccacaaaccaattggagtccaaacagtccgccgaactcaacaagttaaggcaggactacgccagactggttaacgagctcacagaaaaaacggggaagctgcagcaggaggaggtccagaaaaagaacgcagagcaagctgctacccagctgaaggtgcagctgcaagaagctgagaggcggtgggaagaggtgcagtcttatattcggaaaaggaccgctgagcatgaggcagcccagcaggaccttcagtccaagtttgtggcgaaagaaaatgaggttcagtctctgcacagtaagttaacagacacattagtgtcaaaacagcagctggagcagaggctgatgcaactgatggagtctgaacagaagcgagtcaacaaagaggagtctttgcagatgcaagtgcaggatattctcgagcagaatgaagcactgaaggcgcaaatacaacagtttcacagccagatcgcagcccaaacatctgcctcagtgctcgcagaagagctgcataaagtgattgctgagaaggacaagcagatcaaacagaccgaggactcattggccagcgagcgggatcgactcacgtcaaaagaggaagaactgaaagacatccagaacatgaattttctgttaaaggctgaggttcagaagctgcaggcactggccaatgaacaggcagccgccgcccatgagctcgaaaagatgcagcaatcagtctatgtgaaggatgataagatcaggctcctagaggaacagttgcagcatgaaataagtaataaaatggaggagttcaagatcctgaacgatcagaataaggcactaaaaagcgaagtacagaagcttcagacactcgtgagcgaacagcccaataaagatgtggtggagcagatggaaaaatgcatccaggagaaggacgagaaattaaagactgttgaggaattgctggagaccggccttatccaagtggccacgaaggaagaagagctgaacgccattcgcaccgagaattcctcgctcaccaaggaggtgcaggatctgaaggccaagcagaacgaccaagtgtcatttgcaagtctagttgaggaactgaagaaagttattcatgaaaaagacgggaaaatcaaatctgttgaagaacttcttgaggccgagctcttgaaggtggctaataaagaaaaaacagtgcaagacttaaaacaagagatcaaagccctgaaggaggagataggaaacgtacagctggagaaggcccagcagttgtcaatcacgtccaaagttcaggagttacagaacctcctcaaaggcaaggaggagcagatgaacacaatgaaagccgtgctcgaggagaaagaaaaagaccttgcaaatacaggtaagtggctccaagatctccaggaggagaatgagtcactgaaggctcatgtccaggaagttgcgcaacacaacctgaaagaagcctcatctgcatctcagtttgaagaactggaaattgttcttaaagagaaggaaaacgaacttaaacgcctggaggcgatgctaaaagagcgagagtccgatctgtcatccaagacccagctgctgcaagacgtgcaggatgagaacaagctgtttaagagccaaatagaacagctcaaacagcaaaactatcaacaggcctccagtttccccccacacgaggagctcctcaaggtgattagtgaaagggaaaaagaaattagcggcctgtggaatgagcttgattcactcaaggacgcagtagagcaccagagaaaaaagaataatgatcttcgggaaaaaaattgggaagcaatggaagcactggcttcgaccgagaagatgttacaagacaaagtgaataagacatcgaaggagcggcaacaacaggtggaggcggtggagttggaagctaaggaggtcctgaagaaactcttccccaaggtgtccgtgccgtccaacctatcttacggtgaatggctacatgggttcgaaaagaaagctaaggaatgtatggccggaacctccggatccgaagaggtgaaagtgctcgagcataagttgaaagaagctgacgaaatgcataccctactgcagctggagtgtgaaaaatataagagtgtcctcgcagagacagagggaattctccaaaagcttcagcgcagcgtcgaacaagaagaaaacaagtggaaggtgaaagttgacgagagccataagactattaaacaaatgcagagttccttcacttcatcagagcaggagcttgagcggctcagatccgagaataaggacatcgagaatctccgcagggaacgagaacacctcgagatggagcttgagaaggcagagatggaaaggagcacatatgtcacagaagtccgagagctgaaggatttacttacagagctccagaaaaaactagatgacagctattccgaagctgttcgtcaaaacgaggagctgaacctcctcaaggctcaacttaacgagactctaacgaagctccgcaccgaacagaacgagagacagaaggtagctggagacctccacaaagcccagcagagtctggagttgatacaaagcaaaatcgtcaaggctgccggcgatactaccgttatagagaacagtgacgtgtcacccgaaacggagtcttctgagaaagaaacaatgtctgtgagtctgaatcagacagtgactcagctccaacagctcctgcaggccgttaatcagcagctgactaaggagaaagagcattatcaagtgttagagtag

SEQ ID NO: 35494 - DNA, 4074 bp, Artificial Sequence
  derived and/or modified sequence
atggagttctacgagagcgcctacttcatcgtgctgatccccagcatcgttatcaccgtgatttttttgttcttttggctgttcatgaaggagaccctttatgacgaggtgctggccaaacagaagagagaacagaaattgatacccaccaaaactgacaagaaaaaggctgagaaaaaaaagaataaaaaaaaagaaattcagaacggaaacctccatgagagcgactcagagtccgtgccacgggacttcaagctgagcgatgctctggccgtggaagatgaccaggtcgctcccgtccccttgaacgtcgtcgagacttcatcctccgtgcgcgagagaaaaaagaaggagaaaaaacagaagcctgtcttggaggaacaagtcatcaaggaaagcgacgcctctaagatacccggcaaaaaggtggagccagtccccgtaaccaaacagcccaccccaccgtccgaagctgcagcttccaaaaagaagccaggacaaaagaagagcaaaaatgggtcagacgaccaagacaaaaaagtggagaccctgatggtcccaagcaaaaggcaggaagccctaccgctccatcaggaaacgaagcaggagtccggttcagggaaaaaaaaggccagttctaaaaaacagaaaaccgagaacgttttcgttgatgagccgctgattcatgcaacaacatatattcccttgatggataacgctgactcctcccctgtcgtagacaaacgcgaagttatcgacctattaaaaccggaccaggtagaaggtattcaaaagtcgggaaccaagaagcttaaaaccgaaaccgacaaagagaacgcagaagtcaagttcaaggacttcctgctgagtctgaaaactatgatgttttcagaggacgaagcactgtgtgtagtggacctactcaaggaaaagtctggcgttattcaggacgcactgaaaaaatcttctaaaggcgaactgaccacactgatccaccagctgcaggaaaaagacaagttgctcgcagctgtgaaagaagacgccgcagcaacgaaagaccggtgcaagcagctgacccaggaaatgatgacagagaaagaacgcagcaacgtggttatcaccaggatgaaggaccgaatcggtaccctcgaaaaggagcataacgtctttcagaacaagatccacgtatcctaccaagagacacagcagatgcagatgaagttccaacaggtgagagagcagatggaagccgaaatagcacacttgaagcaagagaacggcatcctgagggacgccgtatctaacaccaccaaccagcttgagtcaaagcagtcagcagaactgaacaaactgaggcaggattatgctcgccttgtcaacgagctaaccgagaaaacgggaaagttacagcaagaagaggtccagaagaaaaatgcggagcaagctgcaactcagttgaaggtacagctgcaggaagccgagagacgatgggaggaagtccagagctatattcgaaaacgtaccgccgaacatgaggccgcccaacaggacctgcagagcaagtttgtggcaaaggagaacgaggttcagtcactgcattccaagctgacagatacactggtgtctaagcaacagttagagcagcgattaatgcaattaatggaatccgagcagaaacgagtgaataaagaggagtcactccaaatgcaggttcaggatatcctggagcaaaatgaggccctgaaagcgcaaatccagcaattccactcccaaattgcagcccagacatctgcctcagtactggccgaggagctccataaagtgattgcagagaaagacaaacagatcaaacaaaccgaggacagtctggctagcgagcgggaccggctgacatcaaaggaggaggaacttaaggacatccaaaacatgaactttctcctaaaagctgaagttcaaaagctgcaggcgttggctaacgaacaggccgccgctgctcatgaactggaaaagatgcaacagtctgtgtacgtgaaggacgacaaaattaggctgctcgaagagcagcttcagcatgagatctccaataagatggaggagttcaagattcttaatgaccaaaacaaggccctcaagagtgaggtgcaaaagctgcagacattggttagtgagcagccaaacaaggatgtcgttgaacagatggaaaaatgtattcaggagaaagacgaaaaacttaagacagtcgaagagttgcttgagacaggccttatccaggtggctacaaaggaagaggagctgaatgccatccgcaccgagaatagcagcttgaccaaggaggtacaagacttgaaggcaaagcagaacgaccaggtcagctttgccagtctcgttgaggagctgaaaaaagtgattcatgagaaggacgggaagataaagtccgtggaagagctgttggaggcggaactcctcaaggttgcaaataaggagaagacagtgcaagaccttaagcaagaaattaaggctttgaaggaggagatagggaacgtacagctcgaaaaggcccagcagctcagtataacctctaaggtccaagaactgcagaatctgctaaaaggcaaagaggagcaaatgaacaccatgaaggcagttctggaggagaaggagaaagacctggctaacaccggaaaatggctgcaggacttacaggaggagaacgaaagtctcaaggctcacgtgcaggaagttgctcagcataacctgaaggaggcctctagtgcgagccaattcgaggaattagaaattgtgctgaaggaaaaagagaatgagctcaagaggctggaagccatgctgaaggaacgagagtccgatctgagttcgaagacacagctattacaggacgtgcaggatgagaacaaactgtttaaatcccagatagagcagctgaaacagcagaactaccaacaggcttcctcgtttcctcctcatgaagagctgctgaaagtaatttccgagcgcgaaaaagagatcagcggcctttggaacgagcttgattctttgaaggacgcagtggaacaccagcgcaaaaaaaacaatgacctacgtgagaagaactgggaggcgatggaggccctcgcatcaaccgagaaaatgttacaggacaaggttaacaagacctccaaggagcggcagcaacaggtcgaggcggtggagctggaggccaaggaggttctgaagaagcttttcccgaaggtctcagtgcctagcaatttgagctacggggagtggttacacggttttgagaaaaaagcgaaggaatgcatggcaggcacaagcggttccgaagaggtgaaggttctcgagcacaagctcaaggaggccgatgagatgcacacgcttctgcaactggagtgtgaaaagtacaagagtgtgctggctgagaccgaaggtattctgcagaagctacagcgcagcgtggagcaggaggagaacaaatggaaggtcaaagttgacgagtcacataagacgatcaagcagatgcagagctcttttacaagcagcgagcaagagctggaaaggctgagatctgagaacaaagatattgagaacttgagaagggagcgcgagcacttggaaatggagctggaaaaggccgagatggagcgctccacctatgtcaccgaggtaagagaactgaaagacctgctcactgagctgcagaagaagctcgacgactcgtacagtgaagccgtgcgtcagaacgaagaactgaaccttctgaaggcccagctcaatgaaacgctaacgaagttacgcactgaacagaatgagcgccaaaaagtggctggcgacctgcacaaagcccagcagagccttgaactgattcaatcaaagatagtgaaagcagctggcgatacaacagtgatagaaaactctgatgtatcgcctgagacagagtcatcagagaaggaaaccatgagcgtctctctaaaccagacagtgacccagctgcaacagttactccaggctgtgaaccagcagctgactaaagagaaggaacattatcaggtgttggaatag

SEQ ID NO: 35495 - DNA, 4074 bp, Artificial Sequence
  derived and/or modified sequence
atggagttctacgagagcgcctacttcatcgtgctgatccccagcattgtgattacagttatctttctgtttttttggctgttcatgaaggaaacactttatgatgaggtgttggcgaagcagaaacgggaacagaagcttatccctaccaagaccgacaagaagaaggctgaaaagaaaaaaaacaagaagaaggaaattcagaatggtaaccttcacgagagcgacagcgagagcgtgcctagagactttaagctgagcgacgcgctggccgttgaggacgaccaggtagctcccgtgcccctgaatgtggtggaaacttcaagctcagtgagggagagaaaaaaaaaggaaaagaagcagaagccggttctggaagagcaggtgatcaaggaatccgacgcctctaaaatcccaggtaagaaggtggaacccgtccccgtcacgaagcagcccacacccccttcagaggctgcagctagcaagaaaaagccaggccagaaaaagagtaaaaacgggtctgacgaccaggataaaaaagtagagacactaatggtgccaagcaaacgccaagaggctctgccactgcatcaagagactaagcaagagagcggctccggcaaaaagaaggcttcttcaaaaaagcagaaaacggagaacgtttttgttgacgaaccccttatccatgccactacttacatcccactgatggataacgctgactcatccccagtggtagataaacgcgaggtgatcgacctcctgaagccagaccaggtggaaggcatacaaaaatccgggaccaaaaagctgaagaccgagaccgataaggagaacgcagaggttaagtttaaagatttcctactgagcctgaaaactatgatgttctccgaggacgaggcgctttgcgtcgtggatctgctgaaggagaaaagtggagtaatacaggacgccctgaaaaagtcatcgaagggggagctgaccaccctcattcaccagctacaggagaaggacaaacttctcgcagctgtgaaagaagacgcagcagccaccaaggatcgctgcaaacagctcacacaggagatgatgaccgaaaaggagcgtagcaacgtggttatcactaggatgaaggaccggatcggcacactggagaaggagcataacgtgtttcaaaacaagatacatgtgtcctaccaggaaacacagcagatgcagatgaaattccagcaggtcagagagcagatggaagcagaaattgcacacctaaagcaggaaaacggcattctgagagacgcggtgagcaacacgacaaaccagctggagagtaagcaatcagctgaactcaataagctgcgtcaggactatgctaggctggtcaatgagctgactgagaaaaccggtaagctgcagcaggaagaagtgcagaagaaaaatgctgagcaggccgctacccaactgaaggttcagctgcaggaagccgagcgaaggtgggaagaggttcagtcctatatcagaaagcggacagctgagcatgaagccgcccagcaggacttgcaatcaaaatttgtggcaaaggagaatgaggtccagagcctccactcaaaactcacggatacgctggtgtctaagcaacagctcgagcagcggcttatgcagcttatggaatcggagcagaagcgtgtgaataaagaagagtcgctgcaaatgcaagttcaagacatattggagcaaaacgaggcattaaaggcccagatccagcagttccattcccagatagcagcccagacctcagcatccgtgctcgccgaggagctccacaaagttattgctgagaaggataagcaaattaaacagactgaagactcgctagcgtccgagcgcgatcgactgaccagcaaagaagaagagctgaaggacatacagaacatgaactttctcctcaaggcagaggtacagaagcttcaggccctggctaacgagcaagcggctgcagcccacgaactggagaaaatgcagcagagcgtgtacgtcaaagatgacaagatccgactgctagaggagcaattacagcacgagatctccaacaagatggaggaattcaaaatcctgaacgaccaaaacaaggctctgaagtctgaggtgcaaaaattgcagacgctcgtgagtgagcagccgaacaaggacgtcgttgagcagatggagaagtgcatccaggagaaggacgagaagctgaagacggtagaggagctcctcgagaccggtctcatccaagttgcaaccaaggaagaagagcttaacgctatccgtacggagaactcttcattgacaaaagaggttcaggaccttaaggctaagcagaatgatcaagtctcctttgcttctcttgtggaggagctgaagaaggtcatccacgagaaggatggcaagatcaaaagcgtggaagagttactggaggcagagttactcaaggtggctaacaaggagaagaccgttcaggatctcaaacaggagatcaaggctctgaaggaggagatcggaaacgtgcagctggagaaagcccagcaactgagtattacatcgaaggtgcaagagctgcagaaccttcttaagggaaaagaagagcagatgaacacaatgaaggctgtgctggaggagaaggaaaaggatctcgccaataccggaaaatggcttcaagaccttcaagaggagaatgaatcattgaaggcgcacgtgcaagaggtcgcccaacataacctcaaggaagcaagtagtgcaagtcaatttgaagaactggagattgtgcttaaggagaaagaaaatgagctgaagaggctggaagccatgctgaaggagagggaatctgatctgtcttccaagacccagctactccaggacgtgcaggacgaaaacaaactcttcaaaagtcaaatcgagcaactgaaacagcagaattatcagcaggcaagctcctttccaccacacgaagaactccttaaggtgatatcagagagggagaaggagattagcgggctctggaacgaactggattcactgaaggatgccgtggagcatcagcggaagaaaaacaacgatctcagggagaaaaactgggaagcaatggaggcacttgcctcaacagagaaaatgcttcaggataaggtgaataagacgagcaaggagaggcagcagcaggtagaggcagtggagctggaagcaaaggaggttctgaaaaaactgttcccgaaggtaagtgtcccatctaatctgtcctatggggagtggctacacgggttcgaaaaaaaggctaaggagtgcatggccggcacttccggctccgaggaagtgaaggtgctggagcacaaattgaaggaggctgacgaaatgcacacactcttacagctggagtgtgagaaatataagtcggtcctagccgagactgagggaattctacaaaagcttcagcggtctgtggagcaagaggaaaacaagtggaaggttaaagttgatgagagccacaaaacgatcaaacaaatgcagtcttctttcacgtccagcgagcaggagttagaacgtctgagatccgaaaacaaagatattgaaaacctgcggcgcgagcgagagcacctcgaaatggagctggagaaagccgagatggagcgtagtacctatgttacggaagtgcgtgaactcaaggacctcctgaccgaattacaaaaaaaactggatgatagttactccgaggcggtaagacagaatgaggagctgaatctcctgaaggcccagctcaatgagaccttgaccaaacttaggacggagcagaacgaacggcagaaggttgccggcgatctgcataaagcacagcaaagtctagaacttatccaatcaaagattgttaaggccgctggtgataccactgttatcgagaactctgatgttagtccagagactgagagttccgaaaaggagaccatgtccgtgagtttgaaccagaccgtgacccaactgcagcagttgctgcaggccgtcaatcagcaattgacaaaggaaaaggaacactaccaggtgttagaatag

SEQ ID NO: 35496 - DNA, 4074 bp, Artificial Sequence
  derived and/or modified sequence
atggagttctatgagagcgcttactttattgttctgattccatcaatcgttatcacagtgatcttcctgtttttctggctctttatgaaggaaaccttgtatgacgaagtgctggccaaacaaaagagggagcagaaactgattcctactaagaccgacaagaagaaagctgagaaaaagaaaaataaaaaaaaagaaatccagaatggcaatctccacgaatccgattccgagagcgtgcccagggatttcaaactgagcgatgcactggcagtggaagatgaccaggtggccccagtgcctttgaatgttgtggaaacgagttccagtgttagggaacggaagaagaaagaaaaaaagcagaaacccgtccttgaggaacaggtcataaaagaatcggacgcatcgaagatacccggaaaaaaagtagagcctgtgcccgtgactaagcagcccacaccacccagcgaagccgctgcatcaaagaagaagccaggccagaaaaagtcaaagaatggctcagacgatcaggacaaaaaagtggaaaccctgatggttccatccaagagacaggaggctttaccactgcaccaggaaacaaagcaagaatctggctccggaaagaagaaggctagcagcaaaaaacagaagactgagaatgtgttcgtcgacgagcctctgattcacgcaaccacatatatccccctgatggataatgcggatagttcgcctgttgtggataagcgagaagtgatagatctgctcaagccggaccaggtggagggcattcagaaatccggcacaaagaagttaaagaccgagacagacaaagaaaatgccgaggtgaaattcaaggatttcctgctctctctgaagaccatgatgttcagcgaggatgaggctctttgtgtggtggacctcctgaaggagaaaagtggagtgattcaggacgctctcaaaaaatccagtaaaggggaattgacaactcttattcatcagctgcaagagaaggacaagctcctcgctgccgtcaaagaggacgcggcagctaccaaagacagatgcaagcagttgactcaggagatgatgaccgaaaaggaaagatctaatgttgtaattactcgaatgaaagacagaattggtacccttgagaaggaacacaacgtatttcaaaacaaaattcatgtctcttatcaggaaactcagcagatgcagatgaaatttcagcaggttcgtgaacagatggaggccgagatcgcacatctaaagcaggagaacgggattcttcgagatgccgtgtccaacaccactaatcaattagagagcaaacagtccgcggaactgaataaacttagacaggactatgccagattggtaaacgagcttacagagaagaccggcaaactacagcaggaggaagtgcaaaaaaagaacgctgagcaggcggctactcagctgaaagtacaattgcaagaggcagagcggagatgggaggaggttcagtcgtacattcggaagcgcaccgctgaacacgaggccgcacagcaggatctacagtctaaatttgtagccaaagaaaatgaggtgcagtctctccactctaagctaactgatactctagtgtctaaacagcagctagagcagcggttaatgcaactaatggaatctgagcagaaacgggtgaataaggaagaaagtctacagatgcaggtacaggacatccttgaacagaatgaggcactaaaggcacagatccagcagttccattcacagatcgccgcacaaacctccgcctcagtgctggcagaagagctgcacaaagtgatcgctgaaaaagacaagcagatcaagcagacagaggattccctggcgagtgaacgagaccgactcacgtccaaggaggaggaactcaaagacattcagaatatgaacttcttactgaaagccgaggtacagaaactgcaagctcttgccaatgaacaggccgctgctgctcatgaactggagaaaatgcagcagagcgtgtacgtcaaagatgataaaatccgtctgttagaggagcagctgcagcacgagatctctaacaagatggaagaatttaagatcttaaacgaccagaataaggccctaaagagcgaggtgcagaaactccagaccttggtctctgagcagccaaacaaagacgtggtcgaacagatggaaaaatgtattcaagagaaagacgaaaagctgaaaacggttgaggaactgcttgagacaggactcatccaggtggccaccaaggaggaggaactgaacgcaataaggacggagaactcaagcctgaccaaggaggtccaggacctgaaggccaaacagaatgaccaagtgagcttcgcctctttggttgaagagctgaagaaagtgattcatgaaaaggatggcaaaatcaaatccgtggaggagctgttggaagctgagctcctgaaagtggccaacaaggagaaaaccgttcaagatttgaagcaggaaatcaaggcgcttaaagaggaaattggcaatgtacagctcgagaaagcacaacagctctcgataactagcaaggtgcaagagctgcagaacctgctaaagggcaaggaggaacagatgaacacaatgaaagcagttcttgaggagaaagagaaagacttagctaatacaggcaaatggctccaggatctgcaggaggagaatgagtccctgaaagcccatgttcaggaggtagcacagcacaacctgaaggaggcaagtagcgcttcacaattcgaggagctagagatcgttttgaaggaaaaagagaatgaactgaagaggttagaagccatgctcaaggagcgagaatcagatctgtcctctaagactcaactcctgcaggatgtgcaggacgaaaataagctttttaaaagtcaaatcgagcagctcaaacagcaaaattaccagcaagcatcgagtttcccgccacatgaggagctgctgaaagtgatttcggaaagagagaaagagattagtggactctggaacgagctagacagcctgaaagacgcagtggagcaccagcgaaaaaagaacaatgacctccgagagaagaactgggaagcaatggaggctctggcctccacagaaaagatgctacaagataaggttaacaaaaccagcaaagagaggcagcagcaggtcgaggccgtcgaactggaagccaaagaggtgttgaagaaattgttccctaaggtgagtgtgccttccaatcttagctacggcgagtggcttcatggtttcgagaagaaagccaaagagtgtatggcagggacaagcgggtctgaagaggtgaaggttctggagcacaagctcaaagaagctgatgaaatgcacacactgctgcagcttgagtgtgagaagtacaaatccgtgcttgccgagacagaagggatcttacagaaactgcagcgaagtgtcgagcaggaagaaaataagtggaaggtcaaggtggacgagtcacacaagaccattaagcaaatgcagagtagtttcacctcctctgaacaggagctcgagcggcttcgttcagagaataaggatattgagaacttacggagagaaagagagcacctggagatggaattggagaaagccgagatggaaaggtctacctacgtgaccgaagttcgagagcttaaagacctgctgaccgaattgcaaaaaaagttagacgatagttatagcgaagctgtgcgacagaacgaggagctcaacctgctgaaagcccagctgaatgaaacgctcactaaactaaggaccgagcagaacgaacgccagaaggtggccggtgatctacacaaagcccagcaatctctcgaactcattcagtccaaaatcgtgaaagcggctggagatacaaccgtcattgagaattcagacgtgtccccagagacagagagctccgagaaggagaccatgtcagtatccctgaatcagacagtgacgcagctccagcagttactccaggccgtgaaccaacagcttactaaggaaaaagaacactatcaagtccttgaatag

SEQ ID NO: 35497 - DNA, 4074 bp, Artificial Sequence
  derived and/or modified sequence
atggagttctacgaaagtgcctacttcatcgtgcttattccatccatcgtgatcacagttatttttttgtttttctggctcttcatgaaggaaactctgtacgatgaggtgctagcaaagcagaagagagagcagaagctcatccctacaaaaactgataagaaaaaagccgagaaaaaaaaaaacaaaaagaaagaaatccagaatgggaacttgcacgaatctgattcagagtctgtccccagagacttcaagttatctgatgcgttggccgtggaagacgaccaggtcgctcctgtcccactcaacgtagtggaaacctctagctcggttcgggagcggaaaaagaaggaaaagaagcaaaagcccgtcttagaagagcaagtgattaaggaatcggacgccagtaagattcccggaaagaaggttgagcctgtgcctgtgacaaaacaacctacccctccctccgaggccgctgctagtaagaagaaacctggccagaaaaagagcaagaatgggtccgatgaccaggataagaaggtcgaaacactcatggtgccatccaagaggcaggaagctctccctctgcatcaggaaaccaagcaggagtcggggagcggaaagaagaaggccagtagcaagaaacagaaaactgaaaacgtttttgtggacgagcccttgatccacgccactacgtatatcccacttatggacaatgcagacagtagtccggtggtagataaaagggaagttattgacctccttaagcccgatcaagtagaaggaattcagaagtccggcaccaagaaattaaaaaccgagactgacaaagagaacgccgaagtgaagtttaaggactttctgctgtcactaaagacgatgatgttttccgaagatgaagccctgtgtgtggtagacctgctgaaagaaaaatctggggtgatccaggacgctctgaagaagagttctaagggcgagctgacaacactgattcatcagctgcaagaaaaggacaaattgcttgctgcagtgaaagaagatgccgcagctactaaagataggtgcaagcagctgacccaggaaatgatgaccgagaaggaaaggtcaaacgttgtgattactagaatgaaagaccgcatagggacactggaaaaggaacacaacgtgttccagaacaaaatccacgtgtcatatcaagaaacccagcaaatgcagatgaagtttcagcaggtccgcgaacagatggaagccgagatcgctcacctcaagcaggagaacggcatcctccgggacgcagtttccaacacaaccaaccagctcgaatccaagcagtcagccgagctcaacaaacttcgtcaggattacgcacgcctggtcaacgaactgacagagaagaccgggaagctgcagcaagaggaggttcaaaaaaaaaatgctgagcaggccgctacccaactcaaagtccagctgcaggaggcggagagacgctgggaggaagtccagtcttatatcaggaagagaactgcagagcacgaagccgcacagcaggatctccagtccaaattcgtggctaaagagaacgaagtccagagcttgcatagcaagctaaccgatacgcttgtgtcaaaacagcagcttgagcagcgcctcatgcagctgatggaatcagagcagaagcgtgtaaacaaggaggagagtctccagatgcaggtgcaggatatcctcgagcagaatgaggccttgaaagcccaaatccagcagttccatagtcaaatcgctgctcaaacctctgcgtctgttctggctgaagagctgcataaagttattgccgaaaaagacaagcagattaaacagaccgaagatagcttggcgagcgagcgcgatcgactgacgtctaaggaggaggagctcaaggatattcagaatatgaattttcttctgaaggctgaagtccagaaattgcaggccctggcaaatgaacaggctgccgctgctcacgagctggagaagatgcagcaatccgtctatgtcaaagacgataagattcgattactagaagagcagttgcagcatgaaatcagtaacaagatggaagaattcaagattttgaacgaccagaacaaagcgctgaagtctgaagtgcaaaaattgcaaacccttgtcagtgaacagcccaataaagacgtcgtagaacagatggagaagtgcatccaggagaaagatgagaaactgaagacagtcgaggagctgcttgagactggcttaatccaggttgccaccaaggaggaagaactcaacgccattagaaccgaaaacagtagcctgaccaaggaagttcaggatttgaaagcaaaacagaatgatcaggtgagctttgcctcgcttgtggaagaattgaagaaagttattcacgagaaagatggaaagattaagagtgtagaggagctccttgaggctgagttactcaaagtagcaaataaagagaagacagttcaggaccttaagcaagagatcaaagctttgaaagaagagatcggcaatgttcaattggaaaaggcccagcagctgagcatcacaagcaaggttcaggaactgcaaaacctgttgaaggggaaagaagaacagatgaataccatgaaggccgttttggaagaaaaagaaaaggacctcgcgaatactggaaaatggctgcaagatctacaagaggagaacgaatcactgaaggcgcatgtgcaggaagtggctcagcataatctgaaagaagcatccagcgcaagtcagttcgaagaactggagatcgttctgaaggagaaggagaatgagttgaaacgactggaagccatgctgaaagaaagagaaagcgacctttcatccaagacccagcttttacaggatgtgcaagatgagaacaagctgttcaaaagtcagattgaacaactcaagcagcagaactatcaacaggctagttcatttccccctcatgaagaactgctgaaagtgattagcgaacgagagaaagagatttctggcctctggaacgaacttgactctttgaaagacgccgtggagcaccagcgcaaaaagaataacgacttgagggagaaaaattgggaggctatggaagccctggcatccacggagaagatgttgcaagacaaggtgaacaagacatctaaagagcgccagcagcaggtggaagcggtggagctggaggccaaagaggtgctgaaaaaactgtttcctaaagtgtcggtcccttccaatctgagttatggagagtggctgcacggatttgagaaaaaggctaaggaatgtatggctggtacctcaggaagtgaagaggtcaaagttttagaacacaaactgaaagaggcagacgagatgcataccctcctgcagcttgagtgcgagaagtataaatccgttctggctgaaaccgagggtattcttcaaaagcttcaacggtctgtagagcaggaagaaaataaatggaaagtcaaagttgacgagtcacacaaaacaattaaacaaatgcagtcgagcttcacttctagcgagcaggagttggagaggctgcgctccgaaaacaaagacatcgagaacctgcgtcgagaacgagagcacctggaaatggaactggagaaggccgagatggagcggtctacctatgtgaccgaagtccgtgaactgaaggacctcctcaccgagcttcagaaaaaactggatgattcgtattctgaggccgtccggcagaacgaggagttaaacctccttaaagcacagcttaatgaaaccctgactaaactgcggaccgaacaaaatgagcgccagaaggttgcaggtgacctgcataaagctcagcagtctctggaactgattcagtccaagattgtcaaagccgcaggggacactacagtcatcgaaaactccgatgtcagtcctgagacagaatctagtgaaaaggaaacgatgagtgtttcactgaatcagaccgtaactcagctacagcagctcctgcaggccgtcaaccagcagcttacgaaagagaaggaacactaccaggtgctggagtag

SEQ ID NO: 35498 - DNA, 4074 bp, Artificial Sequence
  derived and/or modified sequence
atggagttctacgagagcgcctatttcattgtgctgatccctagcattgtgattacagtgattttcctctttttttggctgtttatgaaggagaccctctacgatgaagtgctggccaaacagaaaagggaacagaagctgatcccaacgaagaccgataagaaaaaagcagagaaaaaaaagaataagaaaaaagaaatccagaacggaaacttgcacgaatccgattctgagtccgtgccccgagatttcaagctgagcgatgccctggcagttgaggacgaccaggtggcccctgtccccctgaacgtagtcgaaactagctcaagcgtgcgcgagcgcaaaaaaaaggaaaaaaaacaaaaaccagttctcgaggagcaagttataaaggagagtgacgcaagtaaaatccccggtaagaaggtggaaccagtgcctgtgaccaaacagccaactccaccttccgaggccgcagcgtccaagaaaaaacctggtcaaaaaaaaagcaaaaacggatctgacgaccaggacaagaaagttgaaactctcatggtgccaagtaagcggcaggaggctcttcccctgcatcaggaaactaaacaggaaagtgggtctggaaagaaaaaagccagctcaaaaaaacagaaaacagagaatgtatttgtggacgaaccacttatacatgcaactacctacatcccacttatggacaacgcggacagcagccctgtggtggacaagagagaagtgattgatcttctgaagcctgatcaggtggagggtatccaaaaatctggcactaagaaacttaagacagagaccgacaaggagaacgctgaggtgaagttcaaggattttttgctgtccctcaaaaccatgatgttctctgaggatgaggccctttgtgtggttgacctgctgaaggagaagtctggagtgatacaggacgccctgaaaaagtcaagcaagggagaacttactaccctcatccaccagctgcaggaaaaggataagctcttagcggctgtaaaggaggacgccgcagccacgaaggacagatgcaagcagcttacccaggaaatgatgacagaaaaagaaagatcaaatgttgtgatcacccgcatgaaagaccggatcggaaccttagagaaggagcacaatgtctttcagaacaagattcatgtctcttaccaggagacgcagcagatgcagatgaagttccagcaggttcgcgagcagatggaggccgaaatcgctcatttgaaacaggagaatggcatattgagggacgccgtgtctaatactaccaaccagcttgaatcgaagcaatcagcggaattaaataagctgcggcaggactatgcgcgactggtgaatgagctgaccgaaaagaccgggaagctgcaacaagaggaggtccagaaaaaaaatgctgagcaggccgcaactcagttgaaggtgcagctccaggaggccgagcggcgatgggaggaagttcagtcttacatcagaaagcggaccgccgagcacgaggctgcgcagcaggatcttcagagcaaattcgttgctaaagagaacgaggtgcaatcgcttcactcgaaactcactgatactctcgtcagcaagcagcaacttgagcagaggctgatgcaattaatggagagcgaacagaagcgagtcaacaaagaggagagcctgcagatgcaggttcaggatatcctcgaacagaacgaagcactgaaggcccagatccagcaattccacagccagattgcagcacagactagtgcatccgtcctcgcagaagagctgcataaggtgattgctgagaaggataaacagatcaaacagacagaggactccctggcttccgagagagatagattaacttcaaaggaagaggagctgaaggacatccagaacatgaacttcctcctaaaggcagaggtgcagaagctgcaggctctcgctaacgaacaggcagccgcagcccacgagttggaaaagatgcagcagtccgtgtatgtcaaggatgacaagattcgacttttggaggagcagctacagcacgaaatttccaataagatggaggaattcaaaattctcaatgaccagaataaggctctcaaatcggaggtccagaagctgcagactctcgtttccgaacagccgaataaagacgtggttgagcagatggagaagtgtatccaagaaaaagatgaaaaattgaaaactgtggaggaattgctggaaaccggcctgatccaggtcgccactaaggaggaggagctcaacgctattcgcaccgagaattcaagcctcacaaaggaagtacaggatctgaaagctaaacagaacgaccaggtttcgtttgcctcactggttgaagaactcaaaaaggtgatacatgagaaggacggcaagatcaaaagcgttgaggagctgttagaagccgagctgctgaaagtggccaataaagagaaaacagtgcaggatctaaaacaagagattaaagccctgaaagaagaaattgggaacgtgcagcttgagaaggcacagcagctgagcatcaccagcaaggtgcaggaactgcagaacctcctgaagggtaaggaagagcagatgaacacaatgaaggcagtccttgaagagaaggagaaggacctggcgaacacggggaagtggctacaagacctgcaggaagagaatgagtccctgaaagcccacgttcaggaagtggcccaacacaacttgaaggaggctagttctgcatcacagtttgaggaattagaaatcgttctgaaagagaaggaaaacgagttgaagaggctcgaagcaatgctcaaagaacgggagtcagacctgagctccaaaacccaacttctgcaggatgtgcaagacgaaaataaattgtttaaatctcagatcgagcaactcaagcaacagaattatcagcaggcctcatcctttccccctcacgaggaactcctgaaagtcatatctgaaagggagaaagagatctccggtctctggaatgagctcgatagcctgaaagatgcagtggagcaccagcgcaaaaaaaacaatgacctgcgggagaagaactgggaggccatggaggccctcgctagtaccgagaagatgctgcaagataaagtgaacaaaacatccaaggagaggcagcagcaggtggaggccgtggagcttgaggccaaggaggtcttaaagaaactgtttcctaaggtgtccgtgccctctaatctatcctacggagagtggctccacggctttgagaagaaggcaaaggaatgcatggccggtacgagtgggagcgaagaagtcaaggtcctggaacataagctgaaggaggcagatgaaatgcataccctcctccagcttgagtgtgaaaaatataaatctgtcctggcagaaacagaaggtattctacaaaaactccagcgtagcgttgagcaagaagagaataaatggaaggtcaaggtcgacgaatcccataaaactatcaaacagatgcagagcagctttacttcctcagagcaagagttggagcggctgcggtcggagaacaaggacatcgagaacctgcggcgagaaagggagcacctcgagatggaacttgaaaaagccgagatggaacgttccacctacgtcactgaggttcgcgagttgaaagacctcctcaccgagctccaaaagaagttggacgattcttattccgaagccgtgagacagaatgaggaacttaacctactcaaggcccagctgaacgaaacactcactaagctcagaaccgaacaaaatgaacggcagaaagttgctggagatctgcacaaggctcagcagagtctcgagttgatacagtcgaagattgtgaaagccgctggggatactacggtgattgagaactccgacgtgtcacctgagaccgaatcctcggaaaaggagacaatgtcggtgagcctgaatcagacagtcacccagctgcagcagttgctccaggcagttaaccagcagctgacaaaagaaaaggaacattaccaggttctggagtag

SEQ ID NO: 35499 - DNA, 4074 bp, Artificial Sequence
  derived and/or modified sequence
atggagttctacgagtcagcatattttatcgtgctgattccttcgatagttataaccgtaatattccttttcttctggctgttcatgaaggaaacactgtacgacgaagtcctggccaaacagaagcgggaacagaagctaatcccaacaaagacagataagaaaaaggctgaaaaaaagaagaataaaaagaaggaaatccagaacggaaatctgcatgagagcgattccgaatccgtgccccgtgacttcaagctgagtgacgcattggctgtggaggatgaccaggtggctccggtcccactgaatgtcgtagaaaccagtagctcagtgagggaacgcaagaagaaggaaaagaagcagaaacctgtccttgaggagcaggtcataaaggaatctgatgcctccaagatccccggaaaaaaggtagaacctgtgccagtgacaaaacagcccacccctcctagcgaggccgctgctagcaaaaagaaacccggtcaaaagaaaagcaaaaacggatccgacgatcaggacaaaaaggtggaaactctgatggtcccgtcaaaacgccaggaggcactccccctccatcaggaaacaaagcaagagagcgggtctggcaagaagaaagctagcagcaagaagcaaaagacagagaacgtttttgtggatgaacccctgattcacgccacaacttacatacctctgatggataacgccgactcctctcctgtagttgacaagcgcgaagtgattgatctgcttaaaccagatcaggttgaaggaatccagaagtccggtaccaaaaaactcaaaaccgaaacagacaaggagaacgccgaggttaaattcaaggattttcttctgtcgctaaaaacaatgatgttcagcgaggacgaagccctgtgcgtcgtcgacttgctgaaggaaaaatccggggtaattcaagatgccctgaaaaaatccagtaagggagagctcacaacattgatccaccagctccaggaaaaagataagctgctggccgctgttaaggaagatgctgcagcaaccaaagatagatgcaagcagttaacacaggaaatgatgacagagaaggaacggtctaacgtggttattaccagaatgaaagataggatcggcacgctagagaaagagcacaacgtctttcagaataagatccacgtatcgtaccaggagacgcaacaaatgcaaatgaaattccagcaggttagggagcaaatggaagccgagatcgcccatctcaaacaggaaaacgggatcctgagagatgcagtctctaacaccacaaatcagctcgaaagcaagcaatccgctgagctcaacaaactccggcaggattatgctcggttagtcaacgagctcacagagaaaacaggcaaactgcagcaggaggaagttcagaagaagaacgccgaacaggcggctacccagctcaaggttcaacttcaggaagcagagcggcgttgggaggaggtccagtcttacatcagaaagcgaaccgcagaacacgaggccgctcagcaggacttgcaatcaaagttcgtggctaaagaaaatgaggttcagtcactacattccaagctaaccgataccttggtctcaaaacagcagctcgagcagaggctaatgcaactgatggaaagcgaacagaagcgggttaataaggaagagagtctacagatgcaagtgcaggacatcctggagcagaatgaggctctcaaagcacagatccaacaattccatagtcagatcgcagctcaaactagcgccagtgtcttggccgaagagctccacaaggtgattgccgaaaaggacaagcagataaagcagactgaggacagtctggccagtgagcgagatagattgacctccaaggaagaagaactgaaggatatccagaatatgaattttttgcttaaagctgaggtgcagaagttacaggcactggcaaatgaacaagccgcagccgctcatgagctagagaagatgcagcagagcgtatacgttaaggacgataaaatccgcctcctggaggagcaactgcagcatgagattagcaacaaaatggaggagtttaagatccttaatgaccagaacaaggcactgaaaagtgaggtccaaaagcttcagactctcgtgagcgagcaacctaacaaggacgttgttgaacaaatggagaagtgcattcaggagaaagatgaaaagttgaagaccgtcgaagagctgctggagaccggcctgattcaagtcgccaccaaggaggaggaattaaacgcaatcaggaccgagaacagcagccttaccaaagaagtccaggacctgaaggccaaacagaatgaccaggtgtccttcgctagtttagtagaggaactgaaaaaggtgattcatgagaaagacggcaagattaagtctgttgaggaactcctggaagccgagttgctgaaggtggcaaacaaggaaaaaacagtccaggatctgaagcaagagatcaaggcccttaaagaagaaatcggcaacgttcagcttgagaaggcacagcagctgtccatcacctccaaggtgcaggagctgcagaatttgttaaaggggaaagaagaacagatgaatactatgaaagctgtgctggaagagaaagaaaaagacctggccaacaccggcaaatggctacaagacctgcaggaggagaatgaatcacttaaagcccacgtgcaagaagtcgctcaacacaatctcaaggaggcatccagtgccagccagtttgaggaacttgagatcgtactgaaggaaaaagaaaacgagctcaagcgcctcgaagctatgctaaaagaacgcgagagtgacctcagctccaaaacccagctattgcaggacgtgcaagacgagaacaagctgtttaaaagccagattgagcaactcaagcagcagaactatcagcaggcctcatcatttccccctcacgaggagctgctgaaggtcatttcggagagggagaaggagatcagcggcctttggaacgaactcgatagcctgaaggatgccgtcgagcatcagcggaagaagaacaacgacctgagggagaaaaattgggaggcgatggaagccctggctagcaccgagaagatgctacaggacaaggtcaataagacttccaaagagaggcagcagcaggtggaggctgtcgagctcgaagccaaggaagtactgaagaaactctttccgaaggtcagcgtcccaagtaacctgagttatggggagtggctacatggctttgagaaaaaagccaaggagtgcatggctggtacctcaggtagtgaggaagtgaaggtgttagaacataaactgaaggaggccgatgaaatgcacaccctgctgcagctagaatgtgagaaatataaatccgttctagcggaaacagagggcatactgcagaaactacagcggtctgttgagcaagaagagaacaagtggaaggtgaaggtggatgagtcgcacaagaccatcaaacagatgcagtccagcttcacctctagtgagcaagagctggaacgtcttcgttccgagaataaagacatagaaaatcttcgtcgcgagcgagaacatttagagatggaactggaaaaggctgagatggagagaagtacttatgttacggaagtgcgggaactcaaggacctgctgactgagcttcaaaaaaagctagatgattcctattctgaggctgtccgtcaaaacgaagaactgaatttgctgaaagcacagttaaacgagactctgaccaaactgcgcacagagcagaatgagcgccagaaagtggcaggagatttgcacaaagcacagcagagcctcgaattgattcaatccaaaatcgtaaaggctgctggtgatacaaccgttattgaaaattccgatgtgagccccgagactgaatcatctgagaaggaaaccatgagtgtgtcattaaatcagactgtcacgcagctgcagcagctcttgcaagccgtgaatcagcagttgaccaaagagaaggaacactaccaggttctagagtag

SEQ ID NO: 35500 - DNA, 4074 bp, Artificial Sequence
  derived and/or modified sequence
atggagttctacgagagcgcctacttcatcgtgctgatccccagcatcgtgatcaccgtgatcttcctgttcttctggctgttcatgaaggagaccctgtacgacgaggtgctggccaagcagaagagagagcagaagctgatccccaccaagaccgacaagaagaaggccgagaagaagaagaacaagaagaaggagatccagaacggcaacctgcacgagagcgacagcgagagcgtgcccagagacttcaagctgagcgacgccctggccgtggaggacgaccaggtggcccccgtgcccctgaacgtggtggagaccagcagcagcgtgagagagagaaagaagaaggagaagaagcagaagcccgtgctggaggagcaggtgatcaaggagagcgacgccagcaagatccccggcaagaaggtggagcccgtgcccgtgaccaagcagcccaccccccccagcgaggccgccgccagcaagaagaagcccggccagaagaagagcaagaacggcagcgacgaccaggacaagaaggtggagaccctgatggtgcccagcaagagacaggaggccctgcccctgcaccaggagaccaagcaggagagcggcagcggcaagaagaaggccagcagcaagaagcagaagaccgagaacgtgttcgtggacgagcccctgatccacgccaccacctacatccccctgatggacaacgccgacagcagccccgtggtggacaagagagaggtgatcgacctgctgaagcccgaccaggtggagggcatccagaagagcggcaccaagaagctgaagaccgagaccgacaaggagaacgccgaggtgaagttcaaggacttcctgctgagcctgaagaccatgatgttcagcgaggacgaggccctgtgcgtggtggacctgctgaaggagaagagcggcgtgatccaggacgccctgaagaagagcagcaagggcgagctgaccaccctgatccaccagctgcaggagaaggacaagctgctggccgccgtgaaggaggacgccgccgccaccaaggacagatgcaagcagctgacccaggagatgatgaccgagaaggagagaagcaacgtggtgatcaccagaatgaaggacagaatcggcaccctggagaaggagcacaacgtgttccagaacaagatccacgtgagctaccaggagacccagcagatgcagatgaagttccagcaggtgagagagcagatggaggccgagatcgcccacctgaagcaggagaacggcatcctgagagacgccgtgagcaacaccaccaaccagctggagagcaagcagagcgccgagctgaacaagctgagacaggactacgccagactggtgaacgagctgaccgagaagaccggcaagctgcagcaggaggaggtgcagaagaagaacgccgagcaggccgccacccagctgaaggtgcagctgcaggaggccgagagaagatgggaggaggtgcagagctacatcagaaagagaaccgccgagcacgaggccgcccagcaggacctgcagagcaagttcgtggccaaggagaacgaggtgcagagcctgcacagcaagctgaccgacaccctggtgagcaagcagcagctggagcagagactgatgcagctgatggagagcgagcagaagagagtgaacaaggaggagagcctgcagatgcaggtgcaggacatcctggagcagaacgaggccctgaaggcccagatccagcagttccacagccagatcgccgcccagaccagcgccagcgtgctggccgaggagctgcacaaggtgatcgccgagaaggacaagcagatcaagcagaccgaggacagcctggccagcgagagagacagactgaccagcaaggaggaggagctgaaggacatccagaacatgaacttcctgctgaaggccgaggtgcagaagctgcaggccctggccaacgagcaggccgccgccgcccacgagctggagaagatgcagcagagcgtgtacgtgaaggacgacaagatcagactgctggaggagcagctgcagcacgagatcagcaacaagatggaggagttcaagatcctgaacgaccagaacaaggccctgaagagcgaggtgcagaagctgcagaccctggtgagcgagcagcccaacaaggacgtggtggagcagatggagaagtgcatccaggagaaggacgagaagctgaagaccgtggaggagctgctggagaccggcctgatccaggtggccaccaaggaggaggagctgaacgccatcagaaccgagaacagcagcctgaccaaggaggtgcaggacctgaaggccaagcagaacgaccaggtgagcttcgccagcctggtggaggagctgaagaaggtgatccacgagaaggacggcaagatcaagagcgtggaggagctgctggaggccgagctgctgaaggtggccaacaaggagaagaccgtgcaggacctgaagcaggagatcaaggccctgaaggaggagatcggcaacgtgcagctggagaaggcccagcagctgagcatcaccagcaaggtgcaggagctgcagaacctgctgaagggcaaggaggagcagatgaacaccatgaaggccgtgctggaggagaaggagaaggacctggccaacaccggcaagtggctgcaggacctgcaggaggagaacgagagcctgaaggcccacgtgcaggaggtggcccagcacaacctgaaggaggccagcagcgccagccagttcgaggagctggagatcgtgctgaaggagaaggagaacgagctgaagagactggaggccatgctgaaggagagagagagcgacctgagcagcaagacccagctgctgcaggacgtgcaggacgagaacaagctgttcaagagccagatcgagcagctgaagcagcagaactaccagcaggccagcagcttccccccccacgaggagctgctgaaggtgatcagcgagagagagaaggagatcagcggcctgtggaacgagctggacagcctgaaggacgccgtggagcaccagagaaagaagaacaacgacctgagagagaagaactgggaggccatggaggccctggccagcaccgagaagatgctgcaggacaaggtgaacaagaccagcaaggagagacagcagcaggtggaggccgtggagctggaggccaaggaggtgctgaagaagctgttccccaaggtgagcgtgcccagcaacctgagctacggcgagtggctgcacggcttcgagaagaaggccaaggagtgcatggccggcaccagcggcagcgaggaggtgaaggtgctggagcacaagctgaaggaggccgacgagatgcacaccctgctgcagctggagtgcgagaagtacaagagcgtgctggccgagaccgagggcatcctgcagaagctgcagagaagcgtggagcaggaggagaacaagtggaaggtgaaggtggacgagagccacaagaccatcaagcagatgcagagcagcttcaccagcagcgagcaggagctggagagactgagaagcgagaacaaggacatcgagaacctgagaagagagagagagcacctggagatggagctggagaaggccgagatggagagaagcacctacgtgaccgaggtgagagagctgaaggacctgctgaccgagctgcagaagaagctggacgacagctacagcgaggccgtgagacagaacgaggagctgaacctgctgaaggcccagctgaacgagaccctgaccaagctgagaaccgagcagaacgagagacagaaggtggccggcgacctgcacaaggcccagcagagcctggagctgatccagagcaagatcgtgaaggccgccggcgacaccaccgtgatcgagaacagcgacgtgagccccgagaccgagagcagcgagaaggagaccatgagcgtgagcctgaaccagaccgtgacccagctgcagcagctgctgcaggccgtgaaccagcagctgaccaaggagaaggagcactaccaggtgctggagtag

SEQ ID NO: 35501 - protein, 1306 aa, Artificial Sequence
  derived and/or modified sequence
MEFYESAYFIVLIPSIVITVIFLFFWLFMKETLYDEVLAKQKREQKLIPTKTDKKKAEKKKNKKKEIQNGNLHESDSESVPRDFKLSDALAVEDDQVAPVPLNVVETSSSVRERKKKEKKQKPVLEEQVIKESDASKIPGKKVEPVPVTKQPTPPSEAAASKKKPGQKKSKNGSDDQDKKVETLMVPSKRQEALPLHQETKQESGSGKKKASSKKQKTENVFVDEPLIHATTYIPLMDNADSSPVVDKREVIDLLKPDQVEGIQKSGTKKLKTETDKENAEVKFKDFLLSLKTMMFSEDEALCVVDLLKEKSGVIQDALKKSSKGELTTLIHQLQEKDKLLAAVKEDAAATKDRCKQLTQEMMTEKERSNVVITRMKDRIGTLEKEHNVFQNKIHVSYQETQQMQMKFQQVREQMEAEIAHLKQENGILRDAVSNTTNQLESKQSAELNKLRQDYARLVNELTEKTGKLQQEEVQKKNAEQAATQLKVQLQEAERRWEEVQSYIRKRTAEHEAAQQDLQSKFVAKENEVQSLHSKLTDTLVSKQQLEQRLMQLMESEQKRVNKEESLQMQVQDILEQNEALKAQIQQFHSQIAAQTSASVLAEELHKVIAEKDKQIKQTEDSLASERDRLTSKEEELKDIQNMNFLLKAEVQKLQALANEQAAAAHELEKMQQSVYVKDDKIRLLEEQLQHEISNKMEEFKILNDQNKALKSEVQKLQTLVSEQPNKDVVEQMEKCIQEKDEKLKTVEELLETGLIQVATKEEELNAIRTENSSLTKEVQDLKAKQNDQVSFASLVEELKKVIHEKDGKIKSVEELLEAELLKVANKEKTVQLSITSKVQELQNLLKGKEEQMNTMKAVLEEKEKDLANTGKWLQDLQEENESLKAHVQEVAQHNLKEASSASQFEELEIVLKEKENELKRLEAMLKERESDLSSKTQLLQDVQDENKLFKSQIEQLKQQNYQQASSFPPHEELLKVISEREKEISGLWNELDSLKDAVEHQRKKNNDLREKNWEAMEALASTEKMLQDKVNKTSKERQQQVEAVELEAKEVLKKLFPKVSVPSNLSYGEWLHGFEKKAKECMAGTSGSEEVKVLEHKLKEADEMHTLLQLECEKYKSVLAETEGILQKLQRSVEQEENKWKVKVDESHKTIKQMQSSFTSSEQELERLRSENKDIENLRREREHLEMELEKAEMERSTYVTEVRELKAQLNETLTKLRTEQNERQKVAGDLHKAQQSLELIQSKIVKAAGDTTVIENSDVSPETESSEKETMSVSLNQTVTQLQQLLQAVNQQLTKEKEHYQVLE

SEQ ID NO: 35502 - DNA, 3921 bp, Artificial Sequence
  derived and/or modified sequence
atggaattctacgagtctgcctacttcatcgtgttaatcccttcaatagtaattactgtaatcttcctgtttttttggctgtttatgaaagaaaccctctacgacgaggttttggccaaacagaagcgcgaacagaagctgattcctactaaaactgacaaaaaaaaggccgagaagaagaaaaataagaaaaaagaaattcaaaatggcaacctgcacgagagtgactcagagtccgtgcccagggatttcaaactgtctgacgcgctagctgtggaggatgatcaagtggctcccgtgccgctgaatgtagtcgaaactagtagctcagtccgcgagagaaaaaaaaaggaaaaaaagcagaagcctgtgttggaggagcaggtcataaaagagtcagacgcctctaaaatccccggtaaaaaggtcgagcccgtgcctgtcacaaagcagcccactccaccaagcgaagcagctgctagcaagaagaaacctggacagaagaagtctaaaaacggcagcgatgaccaggacaaaaaggtggaaaccctcatggtgccttcaaaacggcaggaggcactgcctctacaccaggagaccaaacaagagagtggatcagggaagaagaaagcatcttctaagaagcagaaaacagagaacgtctttgtggacgaacctttaatccatgctactacctatatcccccttatggacaacgcagattcttctccagtggtggataagagggaagtgatcgaccttctgaagccggatcaagtcgaaggtatacagaaatccggcacaaagaagttaaaaaccgagaccgataaggaaaatgccgaggtaaaattcaaagactttctgttgagcttgaagaccatgatgtttagtgaggacgaggccttgtgtgtcgtcgatttgctgaaagagaaaagcggagtaattcaagacgcccttaagaagtcaagcaaaggagagctcacaacacttattcatcagctccaggagaaggacaaacttctggccgccgtaaaagaagatgctgccgctacaaaggatagatgcaagcagctgacccaagaaatgatgactgagaaggaacggagcaatgtcgtaatcactcggatgaaggatcggattggcaccctggaaaaagaacacaatgtcttccagaataagatacacgtgtcctaccaggaaacacaacagatgcagatgaaattccagcaagtgcgagagcaaatggaagccgagattgcccatctaaagcaggagaacgggattcttagggacgcagtgagcaatacaacgaatcagctggagtctaagcaaagtgccgagctcaataaactgaggcaagattacgcccgcttggtcaacgaactgacggaaaagaccgggaaattacagcaggaagaagtacagaaaaagaacgccgagcaggctgctactcaactgaaggttcagctgcaggaggccgagagacgctgggaggaagtgcagtcctatatcaggaaacgcacggcagaacacgaggcagcccagcaggacctccagtcaaagtttgtggccaaagagaatgaggtgcaatctctccactctaagctaacggataccctcgtgtctaagcagcaacttgaacagagactgatgcagctgatggaatcagagcagaaacgcgtgaacaaagaggaaagcctgcagatgcaggtgcaggatatccttgagcagaacgaggccctcaaagcccaaattcaacagtttcatagtcagattgcggcgcaaacctccgctagtgtactggctgaggaattgcacaaggttatcgcagaaaaggacaaacagatcaaacagacggaagacagtcttgcttctgagagagaccggctgactagcaaagaagaggaactgaaagacatccagaacatgaatttcctcctgaaagccgaggtccagaagctccaggctttggccaacgaacaggcagcggccgcacacgagctcgagaaaatgcaacagtctgtgtacgttaaagatgacaaaatcagactgcttgaagagcagctccagcatgagatcagcaataagatggaagagtttaaaatcctgaacgatcagaacaaagccctgaaatctgaggtgcaaaaactgcagacattagtttcagaacaacccaacaaagacgtggttgaacagatggaaaaatgcatacaggaaaaagatgaaaaattaaagactgttgaggaactgctggagaccgggctgattcaggtggctaccaaggaggaggaactgaatgccatccgcacggaaaacagtagtctgacaaaagaggtacaagatctcaaggccaagcagaacgatcaggtgtcgttcgcctctttagtagaggagctaaagaaagtcatacatgaaaaggatggaaagattaaaagcgtggaagagctactggaggccgaactgctcaaagtggccaataaggaaaagacagttcagctgtctatcacttccaaagtacaagaactgcagaatctactgaaggggaaggaggaacaaatgaataccatgaaggccgtcctggaagaaaaggaaaaggacctggcaaacactggaaaatggctccaggatttacaagaggaaaatgagtcactgaaagcccatgtacaggaagtcgctcagcacaatctcaaagaagcatcctccgcctctcagttcgaggaacttgaaatagttttgaaggaaaaagagaacgaacttaaaagattggaggccatgctgaaagaacgtgaaagtgacctgtcaagtaaaactcaactactccaggatgtgcaagatgagaataagctctttaagtcccagattgagcagctgaagcaacagaactaccagcaggcgagcagttttccaccgcatgaagaattactgaaagttatctctgagcgggagaaagaaatctctggcctttggaatgagctggactctttgaaagatgctgttgagcatcagagaaagaagaataatgatctgagggaaaagaattgggaggccatggaggcacttgcaagcacagagaagatgttacaggacaaggtgaacaaaacttcgaaagaacgccagcagcaggtggaagccgtggaacttgaagcaaaagaagtgctaaagaagctattccccaaggtgagcgtgccgagtaacctgtcctacggtgagtggctgcatggttttgaaaagaaagccaaggaatgtatggccggcaccagtggctccgaggaggtgaaggtcctggaacacaagctgaaagaggcagatgagatgcacactctgttgcagttggaatgtgagaagtacaagtccgtccttgccgagacagagggtatcttgcagaaactgcagagatcagtagagcaggaagagaataagtggaaggtcaaggtcgatgaaagccacaagaccatcaagcagatgcagagctcttttacatcaagtgaacaggagttagagcggctccggagcgaaaacaaagacattgagaacctgagaagggaacgggagcatctcgagatggaattagagaaggctgaaatggagcggtccacgtacgttactgaggtgagggaactgaaggctcagctcaacgaaactctcacaaaacttcgaaccgagcagaacgagcggcaaaaggtggcaggcgatctgcacaaagctcagcagagtctggagctgattcagtctaagattgtcaaagcagcgggcgacacaaccgttatcgaaaattcagatgtgagtcccgaaacagaaagcagtgagaaggaaactatgtctgtgagcctgaatcagacagtgacacagctccaacagctgctgcaggccgtgaatcaacaattgacaaaagaaaaagaacactatcaagtcctggagtag

SEQ ID NO: 35503 - DNA, 3921 bp, Artificial Sequence
  derived and/or modified sequence
atggaattctatgagagtgcatacttcatcgtgttgatcccgtctatagttatcaccgtgatctttctcttcttctggttgtttatgaaggagacattgtacgatgaggtgttggcgaagcagaaaagggagcaaaagctcattcccaccaaaaccgataaaaaaaaggcagaaaagaaaaagaataagaaaaaagagatccaaaacggcaacctgcacgagtctgactccgaatcagtcccccgcgattttaaactctctgatgccctggctgtggaggatgatcaggtggcccctgtaccgctgaatgtagtggagacaagcagttcggtgagagagaggaaaaagaaggagaagaaacagaagccagtgttggaagaacaggtgatcaaagagagtgacgcaagcaaaattccaggaaagaaggtagaacccgtacccgtgacaaagcaaccaacccctccaagcgaggctgctgcttccaaaaaaaaacccggccaaaaaaagtccaaaaacgggtcagacgatcaggacaagaaggtcgaaaccctgatggtgccatccaagcggcaagaggccttaccattacatcaagaaacaaagcaagaatctggcagcggtaagaaaaaagcttcatccaaaaagcagaaaacagagaacgtgttcgttgatgagcccctgatccacgcgacaacttatattccgctgatggacaacgcggacagttccccagtggtagataagagggaagtgatcgacctattaaagcccgaccaggtagaaggaatccaaaaatccgggactaaaaaattaaagacagagacagacaaggagaatgccgaggtgaagtttaaggacttcctcctgtcgctcaaaactatgatgtttagcgaagatgaagcactgtgtgtggtggatctgctgaaggagaaaagtggtgttatacaggacgcactaaaaaaatcgtctaaaggagagctgaccacccttattcatcagttgcaggaaaaggataagcttctggccgccgtaaaagaagacgctgcggctacaaaggaccggtgtaaacagctgacccaagaaatgatgacagaaaaggagaggagcaatgtcgtaattaccaggatgaaggatagaataggaactctggaaaaggaacacaatgtgtttcagaataagatccatgtgtcctaccaagaaacccagcaaatgcagatgaagttccagcaggtccgagaacagatggaggctgaaatagcccatctcaaacaggagaacggcatactgcgagatgcagtaagtaacacgaccaaccaactggagtctaagcagtctgccgaactcaataagctgcgccaggattatgctcgccttgtgaatgaattaactgaaaagactggcaagctgcaacaggaggaggtacagaagaaaaacgccgaacaagctgcaacccagctgaaagtacagctccaggaagcagaaaggcggtgggaggaagtacaatcttacatacgcaaaagaaccgcggaacacgaagctgcccaacaggatctccaaagcaaattcgtggccaaggaaaacgaagtccagagcctccactccaagcttaccgacaccctggtctctaagcagcaactggagcaacggctgatgcagttgatggagtcagaacagaaacgagtgaataaggaggaatccctgcaaatgcaagtccaagacattcttgaacagaatgaggccttaaaggcacaaattcagcagtttcactctcagattgctgcccagacgagtgccagcgtgcttgccgaagagcttcataaggtgatcgccgagaaggacaagcagattaagcagaccgaggactctttggccagcgaacgcgaccgattgacgagtaaggaggaggagttgaaggatatccagaatatgaatttcctcctgaaggcagaggtccagaaacttcaagctctggcgaacgagcaggcagccgcggcgcacgagctggagaaaatgcagcagagcgtgtacgtcaaagacgacaagattaggttattagaggaacagctccaacacgagataagcaataaaatggaggagttcaagattctgaatgatcagaataaggccctgaagtccgaagtccagaaattgcagaccttggtaagtgagcagcctaataaggacgtggtggaacagatggagaagtgcatacaggaaaaagacgagaagctgaagactgtggaagagctgctggagactggcctgattcaagtcgccaccaaagaagaggagttgaacgctatccggacagaaaacagttcactcacaaaggaggtacaggatttaaaagccaagcagaacgaccaggtgagctttgcctccttagtggaagaactgaagaaggtaatccacgagaaggatggaaaaataaagagtgtggaggagttgttggaagctgagcttcttaaagttgccaataaggaaaaaacggtccagttgtccattacctctaaagtccaggagttgcaaaaccttcttaagggcaaagaggagcagatgaacacgatgaaagcagtgctggaggagaaagaaaaggacctagcaaatactgggaagtggcttcaagatctgcaagaagagaacgaaagcttgaaggcccacgtgcaggaggtcgcccagcataacctcaaagaggcctcatcagcgtcccaattcgaggagctcgagattgtcctgaaagagaaagagaacgagttgaagcggttagaggcgatgcttaaagagagggaatcggacctgtcctctaagacccaactcctgcaagatgtgcaggatgagaataaactcttcaagtcgcagatcgaacagctcaagcaacaaaattatcagcaagcctcttcttttcccccccacgaagagctactgaaggtgatcagcgagagagagaaagagatctcaggtttgtggaacgagcttgactccctcaaggatgccgtagaacaccagcggaagaaaaataacgacctgcgtgagaagaactgggaggccatggaggctttggcatctactgaaaagatgctacaggacaaagttaataagacctcaaaagaaagacaacaacaggttgaggctgtggaattggaggctaaagaggtgctgaaaaaacttttccccaaggttagcgtgcctagcaacttgtcttacggggagtggctacatgggttcgagaaaaaagccaaggagtgcatggcaggaaccagcggctctgaggaggtgaaagtcctggagcataagttgaaggaggccgacgaaatgcataccctcttacagctcgaatgcgaaaaatataaatctgtgttggcagagaccgaaggcattctccaaaaactccagagaagtgttgaacaggaggaaaataagtggaaggtaaaagttgacgaatcccacaagactatcaaacagatgcaatccagcttcaccagctccgagcaagaactggaacgcttaaggtccgagaataaggatatagaaaatctgcgacgtgagagggaacatcttgagatggaacttgaaaaagccgaaatggaaagatctacatacgtcacagaagttcgggaacttaaggctcagctcaacgaaactctcacgaagctgcggaccgagcagaatgaaaggcaaaaggttgccggggacctgcacaaggcccagcagagtttggagctgattcagtccaagatagtgaaggctgccggcgacacgacggttattgagaatagcgacgtatcacctgagaccgagtcttccgaaaaagagacgatgagcgtctcactgaaccagacagtaacccagcttcaacagctcctacaggccgtgaatcagcagctcaccaaggaaaaggagcactatcaagtgctggaatag

SEQ ID NO: 35504 - DNA, 3921 bp, Artificial Sequence
  derived and/or modified sequence
atggagttctatgagagtgcgtactttattgttctgatcccctctatagtgattacagtcatattcctgtttttctggcttttcatgaaggaaactctttacgatgaggtcttggcaaaacagaagagggaacagaagctgattccaacaaaaacggataagaaaaaagcagagaagaaaaagaacaagaaaaaagagatacagaatggaaaccttcacgagtccgattccgagagtgtccctagagatttcaagctgtcagacgccctggctgttgaggacgaccaagtggcgccagtgcctctgaacgtggtggagacaagttcctcagtacgggaaagaaagaagaaggagaaaaaacaaaaaccagttctggaggaacaggtgattaaagaatcagatgcctccaagatcccgggaaagaaagtggaaccggtacctgtgacaaagcagcccactcccccctcagaggctgctgcatccaaaaaaaaacccgggcagaaaaagtccaaaaatggcagcgatgaccaggacaagaaggttgagacccttatggtaccttcaaagcgccaagaagccttaccgctccaccaggaaactaagcaggaatccggatcggggaagaagaaggcctcttcgaaaaaacagaagacagagaatgttttcgtggacgagccactgatacatgccactacctacatcccactgatggataacgccgatagtagccccgtggtagacaagagagaggtcatagacctgcttaaaccagaccaggttgaggggatccagaagtccggtacgaaaaaactgaagacagaaacagataaagaaaacgcagaggtgaaatttaaggacttcctgctgtcactgaaaaccatgatgttctcagaggacgaagcgctgtgtgtcgtggatcttctgaaagaaaagtcaggcgtcatccaagatgcccttaagaagagttccaagggcgagctgaccactctgattcatcagttgcaggagaaagataaactcctggctgcggtgaaagaggacgcggccgcgacaaaggaccggtgcaagcaactcacccaggaaatgatgacggagaaggaaagaagcaacgtggtgattacccgcatgaaggaccgcattggaaccctagagaaggaacacaatgtcttccaaaacaaaattcatgtgagctaccaggaaactcaacaaatgcagatgaagttccagcaggtccgcgagcagatggaagccgaaatagcacatcttaagcaggagaatggcattctaagggatgcagtctccaataccacaaaccagttagagtcaaaacagtcagccgaactgaacaagctgcgccaggactatgcccgtctggttaacgagttgacagagaagacagggaagttgcaacaggaagaagtgcagaagaagaatgccgagcaggcagccacgcagctgaaagtgcagctgcaagaggcggagcgcaggtgggaagaagtgcaatcatacataaggaaacggactgccgagcatgaagcagcccagcaggacctccagtctaaatttgtggccaaagagaatgaggtacaaagtcttcattctaagctaactgacacccttgtttccaaacaacaactagagcagagactcatgcagctaatggaatcagagcagaagcgcgtaaacaaggaagaatccttacagatgcaggtccaggacatcctggagcaaaacgaggccctaaaagcccagatccagcagttccacagccagatagctgctcaaacaagtgcatccgtgcttgctgaggagctgcataaggttatcgccgagaaagataagcagattaagcaaaccgaggactcacttgcaagtgaaagagacagactcaccagtaaggaagaagagttgaaagacatccaaaatatgaattttctattaaaggctgaggtgcagaaactccaggccttggctaacgagcaggccgcggctgctcatgaactggagaagatgcagcagagcgtttacgtgaaagatgacaagattaggctacttgaggagcaactgcagcatgaaatctccaataagatggaggagttcaagattctcaatgaccagaacaaggctttaaaatcggaagtgcagaaacttcagacacttgtatcagaacagcccaacaaagatgtggttgaacagatggaaaagtgcattcaggaaaaagatgagaagctgaagactgtagaagagctgttggaaaccggtctgatccaggtggctacgaaggaagaagaacttaacgcaattcgcaccgagaattcgtcccttaccaaggaagttcaagatctgaaagcaaagcagaatgaccaggtatcctttgccagcctcgttgaggagctcaagaaggtgatacatgagaaagatggtaagatcaaatcagtggaggagctcctggaggccgagctgctaaaggtggccaacaaagagaagactgtgcagctctcaattacctctaaggtgcaggagctgcagaatctcctcaagggaaaggaggaacagatgaatacaatgaaagctgtgctcgaggagaaggagaaggatctggctaacaccggcaagtggctgcaggacttgcaagaggaaaatgagagtcttaaagctcacgttcaggaggtggcccagcacaatcttaaagaagcgtcttcagctagtcagttcgaggagttagaaatcgtgctgaaggaaaaagaaaacgagctgaagcgtctggaggctatgttgaaggagcgcgagagtgatctgagctctaaaacccagcttctgcaagacgtgcaagacgaaaataagctgttcaagagccagatcgagcagctgaagcagcagaattaccagcaagctagttccttcccaccacacgaagagcttctgaaggtgatctccgagagagagaaagaaatttctggtttatggaacgagttggactctcttaaagatgccgtggagcaccaacgtaagaaaaataacgatttacgggagaagaactgggaagccatggaggccctggctagtactgaaaagatgctgcaggacaaggtcaataagacctccaaagaaagacagcaacaggtcgaggccgtggaactggaagctaaagaagtgctaaaaaaattatttccaaaggtgtctgttccatccaacctctcctatggggagtggttacacggcttcgaaaaaaaagcaaaggaatgcatggcgggcacctctgggagtgaggaggtgaaagttttggagcacaagctgaaggaagctgatgaaatgcacacattgctccagctggagtgtgaaaaatataagtccgtgctggccgagacggaagggatactgcaaaaacttcagaggtctgttgaacaagaagagaataagtggaaagtgaaagtcgacgagtcacataaaaccattaagcagatgcagtcttccttcaccagtagcgagcaggagctcgagcgcttgcgttctgagaacaaggacatcgagaacctgcgtcgcgaaagagagcatctggagatggaactcgagaaggctgagatggagagatcaacctatgtcaccgaagtgcgggaactcaaagcccaactgaatgagactctcaccaagcttcggactgaacaaaatgaacgacagaaagttgcaggcgacctgcataaagcacagcagtccctagagctgattcagtctaagatcgttaaagctgccggcgataccactgtgatcgagaactctgacgtgagccctgagacagaaagtagtgaaaaggaaactatgtccgtatccttgaaccagacggtgacccagctccagcagctcttacaagctgtcaatcagcagttgacgaaggaaaaggaacactaccaagtgctcgagtag

SEQ ID NO: 35505 - DNA, 4134 bp, Artificial Sequence
  derived and/or modified sequence
tcttcccggtctcctttcccggccgcacagggtagattttcgttccgtcacccaggctggagtgcagtggtgtgaccttggcttgctgcaaccctttgcctcctgggttcaagtgattctcattgcctcagcctcctaagtagctgggattacaggttttataggatcacattgacaaaagtaccatggagttttatgagtcagcatattttattgttcttattccttcaatagttattacagtaattttcctcttcttctggcttttcatgaaagaaacattatatgatgaagttcttgcaaaacagaaaagagaacaaaagcttattcctaccaaaacagataaaaagaaagcagaaaagaaaaagaataaaaagaaagaaatccagaatggaaacctccatgaatccgactctgagagtgtacctcgagactttaaattatcagatgctttggcagtagaagatgatcaagttgcacctgttccattgaatgtcgttgaaacttcaagtagtgttagggaaagaaaaaagaaggaaaagaaacaaaagcctgtgcttgaagagcaggtcatcaaagaaagtgacgcatcaaagattcctggcaaaaaagtagaacctgtcccagttactaaacagcccacccctccctctgaagcagctgcctcgaagaagaaaccagggcagaagaagtctaaaaatggaagcgatgaccaggataaaaaggtggaaactctcatggtaccatcaaaaaggcaagaagcattgcccctccaccaagagactaaacaagaaagtggatcagggaagaagaaagcttcatcaaagaaacaaaagacagaaaatgtcttcgtagatgaaccccttattcatgcaactacttatattcctttgatggataatgctgactcaagtcctgtggtagataagagagaggttattgatttgcttaaacctgaccaagtagaagggatccagaaatctgggactaaaaaactgaagaccgaaactgacaaagaaaatgctgaagtgaagtttaaagattttcttctgtccttgaagactatgatgttttctgaagatgaggctctttgtgttgtagacttgctaaaggagaagtctggtgtaatacaagatgctttaaagaagtcaagtaagggagaattgactacgcttatacatcagcttcaagaaaaggacaagttactcgctgctgtgaaggaagatgctgctgctacaaaggatcggtgtaagcagttaacccaggaaatgatgacagagaaagaaagaagcaatgtggttataacaaggatgaaagatcgaattggaacattagaaaaggaacataatgtatttcaaaacaaaatacatgtcagttatcaagagactcaacagatgcagatgaagtttcagcaagttcgtgagcagatggaggcagagatagctcacttgaagcaggaaaatggtatactgagagatgcagtcagcaacactacaaatcaactggaaagcaagcagtctgcagaactaaataaactacgccaggattatgctaggttggtgaatgagctgactgagaaaacaggaaagctacagcaagaggaagtccaaaagaagaatgctgagcaagcagctactcagttgaaggttcaactacaagaagctgagagaaggtgggaagaagttcagagctacatcaggaagagaacagcggaacatgaggcagcacagcaagatttacagagtaaatttgtggccaaagaaaatgaagtacagagtctgcatagtaagcttacagataccttggtatcaaaacaacagttggagcaaagactaatgcagttaatggaatcagagcagaaaagggtgaacaaagaagagtctctacaaatgcaggttcaggatattttggagcagaatgaggctttgaaagctcaaattcagcagttccattcccagatagcagcccagacctccgcttcagttctagcagaagaattacataaagtgattgcagaaaaggataagcagataaaacagactgaagattctttagcaagtgaacgtgatcgtttaacaagtaaagaagaggaacttaaggatatacagaatatgaatttcttattaaaagctgaagtgcagaaattacaggccctggcaaatgagcaggctgctgctgcacatgaattggagaagatgcaacaaagtgtttatgttaaagatgataaaataagattgctggaagagcaactacaacatgaaatttcaaacaaaatggaagaatttaagattctaaatgaccaaaacaaagcattaaaatcagaagttcagaagctacagactcttgtttctgaacagcctaataaggatgttgtggaacaaatggaaaaatgcattcaagaaaaagatgagaagttaaagactgtggaagaattacttgaaactggacttattcaggtggcaactaaagaagaggagctgaatgcaataagaacagaaaattcatctctgacaaaagaagttcaagacttaaaagctaagcaaaatgatcaggtttcttttgcctctctagttgaagaacttaagaaagtgatccatgagaaagatggaaagatcaagtctgtagaagagcttctggaggcagaacttctcaaagttgctaacaaggagaaaactgttcagttatctatcacttccaaagttcaggagcttcagaacttattaaaaggaaaagaggaacagatgaataccatgaaggctgttttggaagagaaagagaaagacctagccaatacagggaagtggttacaggatcttcaagaagaaaatgaatctttaaaagcacatgttcaggaagtagcacaacataacttgaaagaggcctcttctgcatcacagtttgaagaacttgagattgtgttgaaagaaaaggaaaatgaattgaagaggttagaagccatgctaaaagagagggagagtgatctttctagcaaaacacagctgttacaggatgtacaagatgaaaacaaattgtttaagtcccaaattgagcagcttaaacaacaaaactaccaacaggcatcttcttttccccctcatgaagaattattaaaagtaatttcagaaagagagaaagaaataagtggtctctggaatgagttagattctttgaaggatgcagttgaacaccagaggaagaaaaacaatgaccttcgggagaaaaactgggaagcaatggaagcattggcatcaactgaaaaaatgctgcaggacaaagtgaacaagacttccaaggaaaggcagcaacaggtggaagctgttgagttggaggctaaagaagttctcaaaaaattatttccaaaggtgtctgtcccttctaatttgagttatggtgaatggttgcatggatttgaaaaaaaggcaaaagaatgtatggctggaacttcagggtcagaggaggttaaggttctagagcacaagttgaaagaagctgatgaaatgcacacattgttacagctagagtgtgaaaaatacaaatccgtccttgcagaaacagaaggaattttacagaagctacagagaagtgttgagcaagaagaaaataaatggaaagttaaggtcgatgaatcacacaagactattaaacagatgcagtcatcatttacatcttcagaacaagagctagagcgattaagaagcgaaaataaggatattgaaaatctgagaagagaacgagaacatttggaaatggaactagaaaaggcagagatggaacgatctacctatgttacagaagtcagagagttgaaggcacagttaaatgaaacactcacaaaacttagaactgaacaaaatgaaagacagaaggtagctggtgatttgcataaggctcaacagtcactggagcttatccagtcaaaaatagtaaaagctgctggagacactactgttattgaaaatagtgatgtttccccagaaacggagtcttctgagaaggagacaatgtctgtaagtctaaatcagactgtaacacagttacagcagttgcttcaggcggtaaaccaacagctcacaaaggagaaagagcactaccaggtgttagagtgatcatcctctggcctaccttgacacatgc

SEQ ID NO: 35506 - DNA, 4516 bp, Artificial Sequence
  derived and/or modified sequence
gtggtgtgaccttggcttgctgcaaccctttgcctcctgggttcaagtgattctcattgcctcagcctcctaagtagctgggattacaggttttataggatcacattgacaaaagtaccatggagttttatgagtcagcatattttattgttcttattccttcaatagttattacagtaattttcctcttcttctggcttttcatgaaagaaacattatatgatgaagttcttgcaaaacagaaaagagaacaaaagcttattcctaccaaaacagataaaaagaaagcagaaaagaaaaagaataaaaagaaagaaatccagaatggaaacctccatgaatccgactctgagagtgtacctcgagactttaaattatcagatgctttggcagtagaagatgatcaagttgcacctgttccattgaatgtcgttgaaacttcaagtagtgttagggaaagaaaaaagaaggaaaagaaacaaaagcctgtgcttgaagagcaggtcatcaaagaaagtgacgcatcaaagattcctggcaaaaaagtagaacctgtcccagttactaaacagcccacccctccctctgaagcagctgcctcgaagaagaaaccagggcagaagaagtctaaaaatggaagcgatgaccaggataaaaaggtggaaactctcatggtaccatcaaaaaggcaagaagcattgcccctccaccaagagactaaacaagaaagtggatcagggaagaagaaagcttcatcaaagaaacaaaagacagaaaatgtcttcgtagatgaaccccttattcatgcaactacttatattcctttgatggataatgctgactcaagtcctgtggtagataagagagaggttattgatttgcttaaacctgaccaagtagaagggatccagaaatctgggactaaaaaactgaagaccgaaactgacaaagaaaatgctgaagtgaagtttaaagattttcttctgtccttgaagactatgatgttttctgaagatgaggctctttgtgttgtagacttgctaaaggagaagtctggtgtaatacaagatgctttaaagaagtcaagtaagggagaattgactacgcttatacatcagcttcaagaaaaggacaagttactcgctgctgtgaaggaagatgctgctgctacaaaggatcggtgtaagcagttaacccaggaaatgatgacagagaaagaaagaagcaatgtggttataacaaggatgaaagatcgaattggaacattagaaaaggaacataatgtatttcaaaacaaaatacatgtcagttatcaagagactcaacagatgcagatgaagtttcagcaagttcgtgagcagatggaggcagagatagctcacttgaagcaggaaaatggtatactgagagatgcagtcagcaacactacaaatcaactggaaagcaagcagtctgcagaactaaataaactacgccaggattatgctaggttggtgaatgagctgactgagaaaacaggaaagctacagcaagaggaagtccaaaagaagaatgctgagcaagcagctactcagttgaaggttcaactacaagaagctgagagaaggtgggaagaagttcagagctacatcaggaagagaacagcggaacatgaggcagcacagcaagatttacagagtaaatttgtggccaaagaaaatgaagtacagagtctgcatagtaagcttacagataccttggtatcaaaacaacagttggagcaaagactaatgcagttaatggaatcagagcagaaaagggtgaacaaagaagagtctctacaaatgcaggttcaggatattttggagcagaatgaggctttgaaagctcaaattcagcagttccattcccagatagcagcccagacctccgcttcagttctagcagaagaattacataaagtgattgcagaaaaggataagcagataaaacagactgaagattctttagcaagtgaacgtgatcgtttaacaagtaaagaagaggaacttaaggatatacagaatatgaatttcttattaaaagctgaagtgcagaaattacaggccctggcaaatgagcaggctgctgctgcacatgaattggagaagatgcaacaaagtgtttatgttaaagatgataaaataagattgctggaagagcaactacaacatgaaatttcaaacaaaatggaagaatttaagattctaaatgaccaaaacaaagcattaaaatcagaagttcagaagctacagactcttgtttctgaacagcctaataaggatgttgtggaacaaatggaaaaatgcattcaagaaaaagatgagaagttaaagactgtggaagaattacttgaaactggacttattcaggtggcaactaaagaagaggagctgaatgcaataagaacagaaaattcatctctgacaaaagaagttcaagacttaaaagctaagcaaaatgatcaggtttcttttgcctctctagttgaagaacttaagaaagtgatccatgagaaagatggaaagatcaagtctgtagaagagcttctggaggcagaacttctcaaagttgctaacaaggagaaaactgttcagttatctatcacttccaaagttcaggagcttcagaacttattaaaaggaaaagaggaacagatgaataccatgaaggctgttttggaagagaaagagaaagacctagccaatacagggaagtggttacaggatcttcaagaagaaaatgaatctttaaaagcacatgttcaggaagtagcacaacataacttgaaagaggcctcttctgcatcacagtttgaagaacttgagattgtgttgaaagaaaaggaaaatgaattgaagaggttagaagccatgctaaaagagagggagagtgatctttctagcaaaacacagctgttacaggatgtacaagatgaaaacaaattgtttaagtcccaaattgagcagcttaaacaacaaaactaccaacaggcatcttcttttccccctcatgaagaattattaaaagtaatttcagaaagagagaaagaaataagtggtctctggaatgagttagattctttgaaggatgcagttgaacaccagaggaagaaaaacaatgaccttcgggagaaaaactgggaagcaatggaagcattggcatcaactgaaaaaatgctgcaggacaaagtgaacaagacttccaaggaaaggcagcaacaggtggaagctgttgagttggaggctaaagaagttctcaaaaaattatttccaaaggtgtctgtcccttctaatttgagttatggtgaatggttgcatggatttgaaaaaaaggcaaaagaatgtatggctggaacttcagggtcagaggaggttaaggttctagagcacaagttgaaagaagctgatgaaatgcacacattgttacagctagagtgtgaaaaatacaaatccgtccttgcagaaacagaaggaattttacagaagctacagagaagtgttgagcaagaagaaaataaatggaaagttaaggtcgatgaatcacacaagactattaaacagatgcagtcatcatttacatcttcagaacaagagctagagcgattaagaagcgaaaataaggatattgaaaatctgagaagagaacgagaacatttggaaatggaactagaaaaggcagagatggaacgatctacctatgttacagaagtcagagagttgaaggcacagttaaatgaaacactcacaaaacttagaactgaacaaaatgaaagacagaaggtagctggtgatttgcataaggctcaacagtcactggagcttatccagtcaaaaatagtaaaagctgctggagacactactgttattgaaaatagtgatgtttccccagaaacggagtcttctgagaaggagacaatgtctgtaagtctaaatcagactgtaacacagttacagcagttgcttcaggcggtaaaccaacagctcacaaaggagaaagagcactaccaggtgttagagtgaagtaattgggaaactgttcatttgaggataaaaaaggcattgtattatattttgccaaattaaagccttatttatgttttcaccctttctactttgtcagaaacactgaacagagttttgtcttttctaatccttgttagactactgatttaaagaaggaaaaaaaaaagccaactctgtagacaccttcagagtttagttttataataaaaactgtttgaataattagacctttacattcctgaagataaacatgtaatcttttatcttattttgctcaataaaattgttcagaagatcaaagtggtaaagacaatgtaaaatttaacattttaatactgatgttgtacactgttttacttaacattttgggaagtaactgcctctgacttcaactcaagaaaacacttttttgttgctaatgtaatcggtttttgtaatggcgtcagcaaataaaaggatgcttattattcaaa

SEQ ID NO: 35507 - DNA, 4579 bp, Artificial Sequence
  derived and/or modified sequence
gaagccgcccgtttcctgccgagcggcgcgacggcacctgagcgactgcggcggcggcggcggcggcggcggcgcctcggagcgggcggcccgggctgtagtgccggcgccgccgcgtcttcccggtctcctttcccggccgcacagggttttataggatcacattgacaaaagtaccatggagttttatgagtcagcatattttattgttcttattccttcaatagttattacagtaattttcctcttcttctggcttttcatgaaagaaacattatatgatgaagttcttgcaaaacagaaaagagaacaaaagcttattcctaccaaaacagataaaaagaaagcagaaaagaaaaagaataaaaagaaagaaatccagaatggaaacctccatgaatccgactctgagagtgtacctcgagactttaaattatcagatgctttggcagtagaagatgatcaagttgcacctgttccattgaatgtcgttgaaacttcaagtagtgttagggaaagaaaaaagaaggaaaagaaacaaaagcctgtgcttgaagagcaggtcatcaaagaaagtgacgcatcaaagattcctggcaaaaaagtagaacctgtcccagttactaaacagcccacccctccctctgaagcagctgcctcgaagaagaaaccagggcagaagaagtctaaaaatggaagcgatgaccaggataaaaaggtggaaactctcatggtaccatcaaaaaggcaagaagcattgcccctccaccaagagactaaacaagaaagtggatcagggaagaagaaagcttcatcaaagaaacaaaagacagaaaatgtcttcgtagatgaaccccttattcatgcaactacttatattcctttgatggataatgctgactcaagtcctgtggtagataagagagaggttattgatttgcttaaacctgaccaagtagaagggatccagaaatctgggactaaaaaactgaagaccgaaactgacaaagaaaatgctgaagtgaagtttaaagattttcttctgtccttgaagactatgatgttttctgaagatgaggctctttgtgttgtagacttgctaaaggagaagtctggtgtaatacaagatgctttaaagaagtcaagtaagggagaattgactacgcttatacatcagcttcaagaaaaggacaagttactcgctgctgtgaaggaagatgctgctgctacaaaggatcggtgtaagcagttaacccaggaaatgatgacagagaaagaaagaagcaatgtggttataacaaggatgaaagatcgaattggaacattagaaaaggaacataatgtatttcaaaacaaaatacatgtcagttatcaagagactcaacagatgcagatgaagtttcagcaagttcgtgagcagatggaggcagagatagctcacttgaagcaggaaaatggtatactgagagatgcagtcagcaacactacaaatcaactggaaagcaagcagtctgcagaactaaataaactacgccaggattatgctaggttggtgaatgagctgactgagaaaacaggaaagctacagcaagaggaagtccaaaagaagaatgctgagcaagcagctactcagttgaaggttcaactacaagaagctgagagaaggtgggaagaagttcagagctacatcaggaagagaacagcggaacatgaggcagcacagcaagatttacagagtaaatttgtggccaaagaaaatgaagtacagagtctgcatagtaagcttacagataccttggtatcaaaacaacagttggagcaaagactaatgcagttaatggaatcagagcagaaaagggtgaacaaagaagagtctctacaaatgcaggttcaggatattttggagcagaatgaggctttgaaagctcaaattcagcagttccattcccagatagcagcccagacctccgcttcagttctagcagaagaattacataaagtgattgcagaaaaggataagcagataaaacagactgaagattctttagcaagtgaacgtgatcgtttaacaagtaaagaagaggaacttaaggatatacagaatatgaatttcttattaaaagctgaagtgcagaaattacaggccctggcaaatgagcaggctgctgctgcacatgaattggagaagatgcaacaaagtgtttatgttaaagatgataaaataagattgctggaagagcaactacaacatgaaatttcaaacaaaatggaagaatttaagattctaaatgaccaaaacaaagcattaaaatcagaagttcagaagctacagactcttgtttctgaacagcctaataaggatgttgtggaacaaatggaaaaatgcattcaagaaaaagatgagaagttaaagactgtggaagaattacttgaaactggacttattcaggtggcaactaaagaagaggagctgaatgcaataagaacagaaaattcatctctgacaaaagaagttcaagacttaaaagctaagcaaaatgatcaggtttcttttgcctctctagttgaagaacttaagaaagtgatccatgagaaagatggaaagatcaagtctgtagaagagcttctggaggcagaacttctcaaagttgctaacaaggagaaaactgttcagttatctatcacttccaaagttcaggagcttcagaacttattaaaaggaaaagaggaacagatgaataccatgaaggctgttttggaagagaaagagaaagacctagccaatacagggaagtggttacaggatcttcaagaagaaaatgaatctttaaaagcacatgttcaggaagtagcacaacataacttgaaagaggcctcttctgcatcacagtttgaagaacttgagattgtgttgaaagaaaaggaaaatgaattgaagaggttagaagccatgctaaaagagagggagagtgatctttctagcaaaacacagctgttacaggatgtacaagatgaaaacaaattgtttaagtcccaaattgagcagcttaaacaacaaaactaccaacaggcatcttcttttccccctcatgaagaattattaaaagtaatttcagaaagagagaaagaaataagtggtctctggaatgagttagattctttgaaggatgcagttgaacaccagaggaagaaaaacaatgaccttcgggagaaaaactgggaagcaatggaagcattggcatcaactgaaaaaatgctgcaggacaaagtgaacaagacttccaaggaaaggcagcaacaggtggaagctgttgagttggaggctaaagaagttctcaaaaaattatttccaaaggtgtctgtcccttctaatttgagttatggtgaatggttgcatggatttgaaaaaaaggcaaaagaatgtatggctggaacttcagggtcagaggaggttaaggttctagagcacaagttgaaagaagctgatgaaatgcacacattgttacagctagagtgtgaaaaatacaaatccgtccttgcagaaacagaaggaattttacagaagctacagagaagtgttgagcaagaagaaaataaatggaaagttaaggtcgatgaatcacacaagactattaaacagatgcagtcatcatttacatcttcagaacaagagctagagcgattaagaagcgaaaataaggatattgaaaatctgagaagagaacgagaacatttggaaatggaactagaaaaggcagagatggaacgatctacctatgttacagaagtcagagagttgaaggcacagttaaatgaaacactcacaaaacttagaactgaacaaaatgaaagacagaaggtagctggtgatttgcataaggctcaacagtcactggagcttatccagtcaaaaatagtaaaagctgctggagacactactgttattgaaaatagtgatgtttccccagaaacggagtcttctgagaaggagacaatgtctgtaagtctaaatcagactgtaacacagttacagcagttgcttcaggcggtaaaccaacagctcacaaaggagaaagagcactaccaggtgttagagtgaagtaattgggaaactgttcatttgaggataaaaaaggcattgtattatattttgccaaattaaagccttatttatgttttcaccctttctactttgtcagaaacactgaacagagttttgtcttttctaatccttgttagactactgatttaaagaaggaaaaaaaaaagccaactctgtagacaccttcagagtttagttttataataaaaactgtttgaataattagacctttacattcctgaagataaacatgtaatcttttatcttattttgctcaataaaattgttcagaagatcaaagtggtaaagacaatgtaaaatttaacattttaatactgatgttgtacactgttttacttaacattttgggaagtaactgcctctgacttcaactcaagaaaacacttttttgttgctaatgtaatcggtttttgtaatggcgtcagcaaataaaaggatgcttattattcaaacttg

SEQ ID NO: 35508 - DNA, 3921 bp, Artificial Sequence
  derived and/or modified sequence
atggagttctatgagagcgcctacttcatcgtgctgatccccagcatcgtcatcaccgtcatcttcctgttcttctggctgttcatgaaggagaccctgtatgatgaggtgctggccaagcagaagcgggagcagaagctgatccccaccaagacagacaagaagaaggccgagaagaagaagaacaagaagaaggagatccagaatggaaacctgcatgaaagtgacagcgagagcgtgccccgggacttcaagctgagtgatgccctggccgtggaggatgaccaggtggcccctgtgcccctgaatgtggtggagaccagcagctctgtgcgggagaggaagaagaaggagaagaagcagaagcctgtgctggaggagcaggtgatcaaggagagtgatgccagcaagatccctgggaagaaggtggagcctgtgcctgtgaccaagcagcccaccccacccagcgaggccgccgccagcaagaagaagccaggccagaagaagagcaagaatggaagtgatgaccaggacaagaaggtggagaccctgatggtgcccagcaagaggcaggaggccctgcccctgcaccaggagaccaagcaggagagcggcagcggcaagaagaaggccagcagcaagaagcagaagacagaaaatgtgtttgtggatgagcccctcatccacgccaccacctacatccccctgatggacaatgctgacagcagccctgtggtggacaagcgggaggtgattgacctgctgaagccagaccaggtggagggcatccagaagagcggcaccaagaagctgaagacagaaacagacaaggaaaatgctgaggtgaagttcaaggacttcctgctgagcctgaagaccatgatgttttctgaagatgaggccctgtgtgtggtggacctgctgaaggagaagagcggggtcatccaggatgccctgaagaagagcagcaagggggagctgaccaccctcatccaccagctgcaggagaaggacaagctgctggccgctgtgaaggaggatgctgctgccaccaaggaccgctgcaagcagctgacccaggagatgatgacagagaaggagaggagcaatgtggtgatcaccaggatgaaggaccgcatcggcaccctggagaaggagcacaacgtgttccagaacaagatccacgtgtcctaccaggagacccagcagatgcagatgaagttccagcaggtgcgggagcagatggaggccgagatcgcccacctgaagcaggagaatggcatcctgagagatgctgtgagcaacaccaccaaccagctggagagcaagcagagcgctgagctgaacaagctgcggcaggactatgcccggctggtgaatgagctgacagagaagacaggcaagctgcagcaggaggaggtgcagaagaagaatgctgagcaggccgccacccagctgaaggtgcagctgcaggaggccgagcggcgctgggaggaggtgcagagctacatcaggaagaggacagctgagcatgaagctgcccagcaggacctgcagagcaagtttgtggccaaggaaaatgaggtgcagagcctgcacagcaagctgacagacaccctggtgtccaagcagcagctggagcagaggctgatgcagctgatggagagcgagcagaagagggtgaacaaggaggagagcctgcagatgcaggtgcaggacatcctggagcagaatgaggccctgaaggcccagatccagcagttccacagccagattgctgcccagaccagcgcctctgtgctggccgaggagctgcacaaggtgattgctgagaaggacaagcagatcaagcagacagaggacagcctggccagcgagcgggaccggctgaccagcaaggaggaggagctgaaggacatccagaacatgaacttcctgctgaaggccgaggtgcagaagctgcaggccctggccaatgagcaggccgccgccgcccacgagctggagaagatgcagcagagcgtgtatgtgaaggatgacaagatccggctgctggaggagcagctgcagcacgagatcagcaacaagatggaggagttcaagatcctgaatgaccagaacaaggccctgaagtctgaggtgcagaagctgcagaccctggtgtctgagcagcccaacaaggatgtggtggagcagatggagaagtgcatccaggagaaggatgagaagctgaagacagtggaggagctgctggagaccggcctcatccaggtggccaccaaggaggaggagctgaatgccatcagaacagagaacagcagcctgaccaaggaggtgcaggacctgaaggccaagcagaatgaccaggtgtcctttgccagcctggtggaggagctgaagaaggtgatccacgagaaggatggcaagatcaagtctgtggaggagctgctggaggccgagctgctgaaggtggccaacaaggagaagacagtgcagctgagcatcaccagcaaggtgcaggagctgcagaacctgctgaagggcaaggaggagcagatgaacaccatgaaggctgtgctggaggagaaggagaaggacctggccaacacaggcaagtggctgcaggacctgcaggaggagaatgaaagcctgaaggcccacgtgcaggaggtggcccagcacaacctgaaggaggccagcagcgccagccagtttgaggagctggagatcgtgctgaaggagaaggaaaatgagctgaagaggctggaggccatgctgaaggagcgggagagtgacctgagcagcaagacccagctgctgcaggatgtgcaggatgagaacaagctgttcaagagccagatcgagcagctgaagcagcagaactaccagcaggccagcagcttcccccctcatgaggagctgctgaaggtgatcagcgagcgggagaaggagatcagcggcctgtggaatgagctggacagcctgaaggatgctgtggagcaccagaggaagaagaacaatgacctgcgggagaagaactgggaggccatggaggccctggccagcacagagaagatgctgcaggacaaggtgaacaagaccagcaaggagcggcagcagcaggtggaggccgtggagctggaggccaaggaggtgctgaagaagctgttccccaaggtgtctgtgcccagcaacctgtcctatggagagtggctgcacggctttgagaagaaggccaaggagtgcatggccggcaccagcggcagcgaggaggtgaaggtgctggagcacaagctgaaggaggctgatgagatgcacaccctgctgcagctggagtgtgagaagtacaagtctgtgctggccgagacagagggcatcctgcagaagctgcagaggtctgtggagcaggaggagaacaagtggaaggtgaaggtggatgagagccacaagaccatcaagcagatgcagagcagcttcaccagcagcgagcaggagctggagcggctgcggtctgagaacaaggacatcgagaacctgcggcgggagcgggagcacctggagatggagctggagaaggccgagatggagaggagcacctacgtgacagaggtgcgggagctgaaggcccagctgaatgagaccctgaccaagctgaggacagagcagaatgaaaggcagaaggtggccggggacctgcacaaggcccagcagagcctggagctgatccagagcaagatcgtgaaggccgccggggacaccaccgtgattgaaaattctgatgtgtccccagagacagagagcagcgagaaggagaccatgtctgtgtccctgaaccagacagtgacccagctgcagcagctgctgcaggccgtgaaccagcagctgaccaaggagaaggagcactaccaggtgctggagtag

SEQ ID NO: 35509 - DNA, 3921 bp, Artificial Sequence
  derived and/or modified sequence
atggagttctacgagagcgcctacttcatcgtgctgatccccagcatcgtcataacagttatcttcctgttcttctggcttttcatgaaggagacattgtatgatgaggtgctcgccaagcagaagagagagcaaaagctcatcccaaccaagaccgataaaaagaaggcagaaaagaaaaagaacaagaagaaggaaatacaaaatgggaacctccacgaaagtgactcggagtcagtgccacgggattttaaactcagcgatgcattagccgtggaagatgatcaagtggcaccagtgccccttaatgtggtggagacatcaagcagcgttcgagagagaaaaaaaaaggaaaagaagcagaagcccgtacttgaggagcaagttatcaaagagtccgatgccagcaagattcccggaaaaaaggtggaacccgtacctgtgaccaagcagcccacccctccttccgaggccgccgcgtccaagaaaaaaccagggcagaaaaagagtaagaatggcagcgatgatcaggacaaaaaagtggagaccctgatggtgcccagcaaaagacaggaggctctcccgctgcatcaggaaaccaaacaagagagcggctctggaaagaaaaaggctagcagcaagaaacagaagacagagaacgtctttgtggacgagcccctgatacacgcaaccacatacattcccctgatggataatgccgacagttctcccgtcgtcgacaagcgtgaggtgattgacttgttgaagcctgatcaagtggaggggatccagaagtctggaactaagaagctgaaaacagagactgacaaggaaaacgctgaagttaaattcaaagatttcctgctgtccttaaagacaatgatgttctccgaggatgaagcgctgtgtgtagtggacctactgaaagagaagtccggggtgatccaagacgcactgaaaaagtcctctaagggcgaacttaccaccctgatacatcagctacaggaaaaagacaagctcctcgccgctgtgaaggaagacgcagccgccaccaaagaccgctgcaaacaactcacgcaggagatgatgactgagaaagagcgatcaaacgtcgtcatcacccggatgaaagaccgcatcggcacccttgagaaagagcacaatgtgtttcagaacaaaatccacgtgtcctatcaggaaacacagcagatgcaaatgaagtttcaacaagtgcgcgagcaaatggaggccgagatcgcccacttaaaacaggaaaatggcatcctgcgagatgctgtcagcaataccactaaccagctggaatctaaacagtctgctgagctgaataagttacgtcaggattatgcaagattggtgaatgaactaaccgagaagaccggtaagctgcagcaagaagaggtgcaaaagaagaatgccgagcaggcagctacccagctgaaggtgcagttgcaagaggccgaacggcgttgggaagaggtgcagagctacatcagaaaaagaacagctgagcacgaagcagctcagcaggatttacagtccaagtttgtggccaaagaaaacgaggtacagtccttgcacagcaaactcaccgatacgctcgtgagcaaacagcagttggagcagaggctgatgcagttaatggaatccgaacagaagcgagtgaataaagaagaaagccttcagatgcaggtacaagacatactggaacagaacgaggctttaaaagcacagatccagcagtttcactcccaaatcgctgcccagacaagtgcttccgtactcgctgaggagctacataaagtgattgcggaaaaagacaaacagattaagcagacagaggactcactggccagcgagcgggatcgcctgaccagtaaagaggaggaactgaaagatatccaaaatatgaactttctgctgaaagccgaagtacagaagctgcaagcactcgctaacgaacaggcagccgctgcgcacgagcttgaaaagatgcaacagtcagtctatgtgaaggacgacaaaattaggttgctggaagagcaattacaacacgagatttcaaataaaatggaagaatttaaaatccttaacgaccagaacaaagcactgaaatcggaagtacagaaactccaaacactggtcagtgagcagcccaacaaggacgtagtggagcagatggagaagtgcattcaggaaaaagacgaaaaactgaaaaccgtcgaggaactgttggaaactggactgatccaggtggcaacaaaagaggaagagctaaacgccattaggacagagaactccagtttaacgaaggaggtccaggacttgaaagcaaagcagaacgaccaggtgtcatttgcgtccctcgtggaggaactcaaaaaggtgatccacgaaaaggatggcaagatcaagtccgtcgaggaactgctagaagctgagctgctgaaggttgcaaataaagagaagactgtacagctctcgatcacttcgaaggtacaggagctgcaaaacttactgaagggaaaagaagaacagatgaataccatgaaagctgttttggaagagaaggaaaaggaccttgctaatacaggaaaatggctgcaagatctccaagaagaaaatgaatcacttaaggcgcacgtgcaagaggtcgcccagcataaccttaaggaggcatcttccgcctcacagttcgaagagttagagatcgtcctgaaagagaaggaaaatgagctcaaaagactcgaggctatgttgaaagagcgcgagtcagacttgagcagcaagactcagcttctccaggacgtccaggacgaaaacaagttgtttaaaagtcagatcgagcagctgaagcagcagaactatcagcaggcctcttcatttccacctcacgaagaactgcttaaagtcatctcagaaagggagaaagagatcagtggattatggaacgagcttgactcgctgaaagacgccgtggagcaccaacgaaagaaaaacaacgacctgagggaaaaaaactgggaggctatggaggccctagcgtctacagaaaagatgctgcaggacaaggtcaacaaaacctcaaaagagcggcagcagcaagtggaagcagttgaactggaggcaaaagaggttctaaaaaagcttttccccaaggtctcagtcccctccaatctctcttacggtgagtggctgcacggatttgagaaaaaggctaaggaatgtatggcaggcaccagcgggtcagaagaagtcaaagtgctcgaacacaaactgaaagaagccgatgaaatgcacactctcctgcagcttgagtgcgagaaatacaagagcgttctggcagagactgagggaattctgcagaaactacagcgctccgtggaacaggaggaaaacaaatggaaggtgaaggtggatgagagccacaagacaataaaacagatgcagagctctttcacctccagtgagcaggagctcgagagattgcgatccgaaaacaaggatatcgagaatttgagaagggagcgagagcacctggagatggagctcgagaaggccgagatggagaggtctacgtatgtgactgaagtgagagagctgaaggcccaactgaatgaaaccttaaccaagcttcggaccgagcagaacgaacggcagaaggtcgctggagacctccataaggcgcagcaaagtctggagcttattcagtctaagatcgtcaaagctgcaggagatactaccgtgatagagaactcggatgtgtctcccgaaaccgagtcttcagagaaagagaccatgagtgtcagtctgaaccaaactgtgactcaactgcagcagctccttcaggcagtcaatcagcagcttaccaaggaaaaagagcattaccaggtacttgagtag

SEQ ID NO: 35510 - DNA, 3921 bp, Artificial Sequence
  derived and/or modified sequence
atggagttctacgagagcgcctacttcatcgtgctgatccccagcatcgtgatcaccgttatatttctattcttctggctgtttatgaaggaaaccctatacgatgaggttcttgccaagcagaaaagagagcaaaaactgatccctactaagactgacaagaagaaagccgaaaagaagaaaaacaagaaaaaggaaattcagaacggtaatctccacgaaagtgacagcgagtctgtgcctcgcgactttaagctctctgatgccctcgcagtggaagacgatcaggtggcacccgtgcccctcaatgttgttgaaaccagctcgtccgtccgtgaaagaaagaagaaggaaaaaaaacagaaacccgttctcgaggaacaggttatcaaagagagtgacgcaagcaagataccaggcaagaaggtcgaacccgtaccagttacaaagcagccaactcccccctccgaagccgccgcaagcaaaaaaaaacccggacagaaaaagtccaagaacgggagtgacgaccaggacaagaaagtagaaacactgatggtcccctccaaacgtcaggaagcactccctctgcatcaggagactaaacaggagtcaggaagtggtaaaaagaaagcctcgagcaagaaacaaaagaccgagaacgtcttcgttgacgaacccctaattcatgccacaacttatattcccctcatggacaatgctgactcgtcgcccgtggtggataaaagggaggtcattgacttgttaaagcctgaccaggttgagggcatccaaaagtcgggtactaagaaactgaaaaccgagacagacaaggaaaatgccgaggttaaattcaaagatttcttactatctctcaagactatgatgttttcggaagacgaagccctgtgtgtggtcgacctgctgaaagagaagtcaggagttatacaggacgcattgaaaaaaagctcaaagggtgagctaacaacccttatccatcagctgcaggaaaaggacaagctcctggcagcagtgaaggaggatgcagccgcgaccaaggaccgttgcaagcagctgactcaggaaatgatgactgagaaggagagaagtaatgtcgtcatcacaaggatgaaggacagaatcggaacgcttgagaaagaacacaacgtcttccagaataaaattcatgtctcatatcaggagacacagcagatgcagatgaaatttcagcaggtccgagaacagatggaggccgaaattgcacatttaaaacaagagaacggaatcttgcgcgatgccgtgtccaacacaaccaaccaattggagtccaagcaaagtgctgagctgaacaagctcagacaggattatgctaggctggtgaacgagctgactgaaaaaaccggcaagctgcagcaggaggaagttcagaaaaaaaacgctgagcaagcagccacccagctaaaagtgcagctgcaggaggccgagcgaaggtgggaagaggttcagtcttacattcgcaagcggactgccgagcacgaggctgcccagcaggatctacaatcgaagtttgtcgccaaggaaaatgaagtgcagtctctccacagcaaacttactgatactttggtatccaagcagcaactggagcagagactgatgcagctgatggagtcagagcagaagagagtcaataaagaagagtccctccagatgcaggtgcaggatattttagaacagaacgaagcccttaaagcacagatccagcagtttcactcccagatcgccgctcagactagcgcaagcgtgctggctgaagaactacacaaggtcatagccgagaaagataaacagatcaagcaaactgaagactccctcgccagcgagagagaccgcctgacaagcaaggaggaggaactgaaggacatccagaatatgaatttcttactgaaggctgaagtgcagaagttacaagcattggctaatgagcaggccgccgccgcgcacgagcttgaaaagatgcaacaatcagtgtacgtgaaggatgataagattcgattgctcgaggagcagctgcaacatgaaatctctaataagatggaggagtttaagatcctgaatgaccaaaataaagcccttaaaagcgaagtgcagaagcttcagacactcgtgagcgagcagcctaacaaggacgtcgtggaacagatggaaaagtgcattcaagagaaagatgaaaagctgaaaacggtagaggagctgctggagaccggcttgattcaggtcgcgaccaaagaagaagagctcaatgcaatccgcaccgaaaattcgagcctgactaaggaggtgcaggatctgaaggccaagcagaacgatcaggtttccttcgcgtcattggtggaagagcttaagaaggtgatacatgagaaggacggcaagattaaaagcgtggaggaattgctcgaggccgagttacttaaagtcgctaataaggaaaaaacagttcagctgtctattaccagtaaggtccaggagctgcagaacttgctgaagggaaaggaagagcaaatgaataccatgaaggcagtcctggaggaaaaggagaaggatcttgccaatactggcaagtggctccaggatctccaggaagaaaacgagtccctcaaagctcatgtccaggaagtggctcagcacaaccttaaagaggcgtcgtccgcttcacagtttgaagaactagagattgtgctgaaagagaaagaaaacgagctaaagcgccttgaggctatgctgaaagagcgggagagcgatctatcgtctaagacacagttgctgcaggatgtgcaagatgaaaacaagctgtttaagtcccaaattgagcagctcaaacaacagaactatcagcaagcctcctccttccccccccacgaagaactgctcaaagtcatctctgagcgcgagaaggaaatttcaggcttatggaacgagctggatagccttaaagacgccgtcgaacaccagaggaagaagaataatgatctcagagagaagaactgggaggctatggaggctctcgcaagcaccgagaaaatgctgcaggataaagtcaataaaaccagcaaggagagacagcagcaggtcgaggctgttgagttggaagcaaaagaggtcctgaaaaaattattccctaaagtatctgttccatccaacttgtcatatggggaatggttgcatggtttcgaaaagaaggcgaaggagtgcatggccgggacatctggcagcgaggaggttaaagtcctggagcacaaactcaaagaagctgacgagatgcacactctgctgcaactggagtgcgagaaatataaaagcgtgcttgctgaaacggaaggcattctccagaagctgcagaggtcagtcgaacaggaagaaaataaatggaaggttaaagtggatgaaagccataaaaccattaagcagatgcagtcctctttcactagcagtgaacaggaactcgagagactgcgatccgagaacaaagatatagaaaatctcaggagggagagggagcacctcgagatggagctggaaaaagctgagatggagcggagtacatacgtcacagaggttagggagttgaaggcccagctcaatgaaacacttacaaaattgaggacagagcagaatgaacgtcaaaaggttgcaggggacctgcacaaggcccagcagagtctggagctcatccagtccaaaattgtaaaggcagcgggggatacaactgtcattgaaaactccgatgtgtccccagaaaccgagagcagcgagaaagagaccatgtctgtgagcctgaatcaaacagtcacacaactgcagcaactgctgcaggccgtcaaccagcagcttaccaaggagaaggaacactaccaggtgctggagtag

SEQ ID NO: 35511 - DNA, 3921 bp, Artificial Sequence
  derived and/or modified sequence
atggagttctacgagagcgcctacttcatcgtgctgatccccagcattgtgattacagtcatcttcctctttttctggctctttatgaaggagaccctatatgacgaggtgttggcaaagcagaagcgcgagcagaaattaattcctactaagactgacaaaaagaaggcagaaaaaaagaagaataaaaagaaagaaatacagaatggcaatctgcacgaaagtgactccgagagtgttcctagagactttaagttgtccgacgccctcgcagtggaggatgaccaggtggcgccagtccccttgaatgtcgtagaaacatcctctagtgtgcgagaacgcaagaaaaaagaaaaaaagcagaagccggtcctcgaggagcaagtcataaaagaaagcgacgcatccaagatacccggtaagaaagtggaacctgtgcctgttacaaagcagccgactccacctagcgaggcagctgcctcaaagaagaagcctggtcaaaagaagtcaaaaaacggatccgacgaccaagacaagaaagtggagactttgatggtgccttcaaagcgacaagaggcactgcctctgcatcaggagaccaagcaagagtccggcagtgggaaaaaaaaggcctcatcaaaaaagcagaaaacagaaaatgtatttgtcgatgaacccctgattcacgccaccacctacattccgctcatggacaacgccgacagttcacccgtggttgacaaacgcgaggtcatcgatttactcaaaccagatcaagtcgagggcattcagaaaagcgggacaaaaaaactgaagaccgaaacggacaaggagaacgcagaggtcaagtttaaggatttcctcttgtccctgaagactatgatgttcagtgaagacgaggcgctctgtgttgttgacctgctaaaagaaaaatccggcgttatacaggacgcgttgaagaaatcttctaaaggggagctcaccactcttatccaccagctgcaggaaaaagacaagttgctagccgcggtgaaagaggacgccgccgccacaaaggatcgctgtaaacaactcacacaggagatgatgactgagaaggagcgttcgaacgtggtaattactcgaatgaaagacagaattgggaccttggagaaggaacacaacgtgttccagaacaaaatacacgtcagttaccaggaaacacagcaaatgcagatgaagtttcaacaggttcgagagcagatggaggcagagatcgcccatttaaagcaggaaaacggaatcctgagggacgctgtctctaataccacgaaccagttggagtctaagcagtccgccgagctgaacaagctgcgtcaagactatgccagactggtgaatgaattgacagagaaaaccggtaagctgcagcaggaggaagtccagaagaaaaacgccgagcaggcagccacccagctgaaagtgcagcttcaagaggcggagcgtcgttgggaagaggtgcagagctatattaggaagcgcactgccgaacacgaagccgcacaacaggacctgcagtccaaattcgtggccaaagagaacgaggtgcagtcccttcactcgaagttaacagacaccctggtgagcaagcagcaactggagcagcgcctgatgcagctcatggagagcgagcagaaaagggtcaacaaagaggaatcactacaaatgcaagttcaggatatcctcgagcagaacgaggccctgaaggcacagatccagcaatttcatagccagattgccgcacaaacctcagcaagcgtacttgcggaagagttgcataaggtcatcgctgagaaagacaaacaaataaagcagaccgaagacagtctggccagcgagcgagatcggctgactagcaaggaggaagaacttaaggacatccagaacatgaacttcctcctcaaggccgaagtccagaagctacaagcgctcgccaatgagcaggcggccgctgcacatgagctcgaaaagatgcaacagtccgtgtacgtcaaggacgataaaattcggctactggaggaacagctccaacacgagattagtaataagatggaagagttcaagatcctcaatgaccaaaataaagctctgaaatccgaggtacagaaactacagacgctggtgagcgaacaacccaacaaagacgtggtggaacaaatggagaagtgtatacaggagaaggatgaaaagttgaaaacggtcgaagagcttctcgagacaggtctcatccaggtggccacgaaggaagaggagctcaacgcgattcggactgagaattcatccctcaccaaagaggtccaagacctgaaggctaaacagaatgaccaagtatcttttgcttctcttgtggaagagctgaagaaggtcatacatgagaaagacggtaaaatcaaatccgtcgaggagctgctcgaggccgaactgttgaaggttgcaaacaaggaaaagactgtgcagctttcgatcacttccaaggtgcaagagcttcaaaacctgcttaaggggaaggaagaacagatgaatacgatgaaggcggtgttggaggagaaagagaaggacctggctaacacgggtaaatggttacaggatctgcaggaggagaatgagtcactaaaggcacacgtccaggaagtggcccagcacaatttgaaagaagctagcagtgcctcccagttcgaggagctagagattgtgttgaaagagaaagaaaacgagcttaagagattggaagctatgctgaaggagcgggagagcgacctgagctctaagacacagttgctgcaggatgtgcaggacgaaaataaactctttaagagccagatcgagcagctcaaacagcaaaactatcagcaagcttcaagctttcctcctcatgaagagcttcttaaagtgataagcgagagggaaaaagaaatcagcggcctctggaatgaactggattctttgaaggacgccgtcgaacaccaacggaaaaaaaataacgacctcagggagaagaactgggaggcaatggaagcccttgccagtaccgagaaaatgctccaggataaggtcaataagacatctaaagaaaggcagcagcaggtagaagctgtggagctcgaagcgaaagaggttttgaaaaaactttttcctaaggtaagcgtgccatcaaacttatcatacggggaatggctccatggcttcgagaaaaaagcaaaggagtgcatggccgggacatcagggtctgaggaagtaaaggtgcttgaacacaaacttaaagaagcagatgagatgcatacactcctgcagctcgagtgcgaaaagtacaaatcggtgctggctgagacggagggcattctgcagaaactgcagcggagtgttgaacaagaggagaacaagtggaaggtcaaggtggacgaatcacacaagacaatcaagcagatgcaaagctctttcacctcatcggagcaggaactcgaacggctccgctccgaaaacaaagacatagaaaacttaaggagagagcgggagcatctggaaatggaactcgagaaggcggagatggagcgctcgacctatgtaacggaggtgcgggagttgaaggcgcagttgaacgaaacattgacgaagctgagaacagaacagaatgagcggcaaaaagtggccggcgacctccacaaggctcagcagtccctggagcttatccagtccaagatagtgaaagcagccggtgacacgacagtgattgagaatagcgacgtgtctccagaaactgagagttctgagaaggagacgatgtcagtcagcctcaatcagactgtcacccagctgcagcaactgttgcaggctgttaaccagcagctgaccaaagaaaaagagcactaccaagtgctagaatag

SEQ ID NO: 35512 - DNA, 3921 bp, Artificial Sequence
  derived and/or modified sequence
atggagttctatgaatccgcctatttcattgtcctcatcccttctatagtgataaccgttatttttctgttcttttggctcttcatgaaggaaacattatacgacgaagtccttgccaaacagaagcgggaacagaagcttattcctacaaagaccgataagaaaaaggctgagaagaaaaaaaacaaaaaaaaagagatccagaatggaaatttacatgaatcggattctgagagcgtgccccgtgattttaaattatccgacgccctggctgtcgaagacgaccaagtggctccagtgcctttaaacgtggttgagacgtcctcctctgtcagagaaagaaagaaaaaggagaagaaacagaaacccgtgcttgaagaacaggttatcaaagaatccgatgccagtaaaatcccaggaaaaaaagttgagcctgtcccagttacaaaacaacccacccccccaagcgaagcagcggcatctaagaaaaaaccaggccagaagaaatcaaaaaatggctccgacgatcaggataagaaggttgagacccttatggtcccatctaagcggcaggaagccttacctctgcaccaggagacaaaacaggagtccggctctgggaaaaagaaagccagttcaaagaagcagaaaaccgagaacgtatttgtagacgagcctcttatccatgccacgacctatattccactgatggacaacgcagacagtagtcctgtggtcgacaagagagaagtgatagatctgctcaaacccgatcaggtcgagggaatacaaaaatctggaacgaagaaattaaagactgaaacagataaggaaaacgccgaagtgaagttcaaggattttttactctctttgaagacgatgatgttttcggaagatgaagcactgtgtgtcgttgatctccttaaagagaagtcaggtgtaatacaggacgcactaaagaaaagctcaaaaggggaactgaccaccctgatacatcagttgcaggagaaagacaagctgctggctgcagtcaaggaagatgccgcagccactaaagatcgatgcaagcaactgacccaggagatgatgacagagaaagaacgctcaaacgttgtaatcactcgtatgaaggataggatcgggacactagagaaggaacataacgtgttccagaacaaaatacatgtttcataccaggagacacagcagatgcagatgaagtttcagcaggtgcgcgaacagatggaggcagagattgcacatttgaagcaggaaaatgggatccttcgcgacgcagtcagtaataccaccaaccaactagagagtaagcaatctgcagagcttaataaactgcggcaggattacgccaggctagtgaatgagctgactgaaaaaactgggaagttgcaacaggaagaagtccagaaaaagaatgcagaacaagccgctacccagctaaaggtccagctccaggaagccgagcggcgttgggaggaagtacagtcctacatacggaaaaggacggccgaacacgaagcagctcagcaagatctgcaatccaagttcgtggcaaaagagaacgaggtgcagagcctgcacagtaagctgacagacacactcgtttcgaagcagcaattagaacagcggctcatgcagcttatggagtctgagcagaagagggtgaataaggaagagtctttgcagatgcaggtccaggacattctggagcaaaatgaagcgctgaaagcccagattcaacaattccacagtcagattgccgctcagacttcggcgtccgtgctggctgaagagttgcacaaagtgattgctgagaaggacaaacaaatcaaacagactgaggacagtctggcttccgaacgggataggctgacatccaaagaggaggaactgaaggacattcagaacatgaactttctgctaaaggcagaggtgcagaaactccaggccttggctaatgaacaagcagccgctgctcacgagcttgagaaaatgcagcagtctgtttatgttaaggatgataagatacgcctgcttgaggagcaactgcagcacgagatcagcaacaagatggaagaatttaaaatcctcaatgatcagaataaggctcttaaatccgaggtgcagaagctgcagactctggtctccgaacagccaaacaaggatgttgtggaacagatggagaagtgtatccaggagaaggacgaaaaactgaagacagtcgaagaattgcttgaaacaggtctgatccaggtcgccacaaaggaagaggagttgaatgcgatccgaactgaaaactccagcctgaccaaagaagtccaggacctcaaggccaagcaaaacgatcaggtcagtttcgccagcctcgtggaagaactaaaaaaggtcatccacgaaaaggacggcaaaatcaaatcagtcgaggagctactcgaggctgaattgttgaaagtggcaaataaagagaagacagtccagctctctatcacatccaaagtgcaggagctgcagaatctgctgaagggcaaggaagagcagatgaacacaatgaaggcggtactggaggagaaggagaaggatctcgccaatacgggtaagtggttacaggacctccaggaagagaacgaaagcctcaaggcacatgtccaggaagtggcccagcacaacctcaaggaggcatcttcggctagccagtttgaggaacttgagattgtgctcaaggagaaagaaaatgagctgaagcgactcgaggccatgctgaaggaacgagaatccgatctaagctctaaaacacagctactgcaggacgtccaggacgagaataagctgtttaagagccagattgagcagctcaaacaacagaattaccaacaggcaagctcgtttccaccacacgaagaattactcaaagtcatcagcgaacgcgaaaaggaaatctctgggttgtggaacgaacttgatagtcttaaagacgccgtcgagcaccaaagaaagaaaaacaatgacctgagagagaaaaactgggaggccatggaggccctagctagcaccgagaagatgttacaggacaaggtgaataagacaagtaaggaacggcaacagcaggttgaagctgtggagctggaagccaaggaggtgttgaagaaactcttcccaaaggtgtccgtaccctccaatctatcctatggcgagtggctgcatggctttgaaaagaaggccaaagagtgtatggcaggaactagtgggagtgaggaggtcaaagtgctggagcacaagttgaaagaggcggatgaaatgcatacgttgctgcagcttgagtgcgaaaaatataagagcgtgctggctgaaactgaggggatcctgcagaagctccagaggtccgtcgagcaggaagagaacaagtggaaagtgaaagtcgacgagtcacacaagaccatcaagcagatgcagagctcgttcacttcaagcgaacaggagctggagcgcttgcgaagcgaaaacaaagacattgaaaacttgcgcagagagagagagcatttagaaatggaattggaaaaggcagagatggagagatccacttacgttacagaagtgagagaactgaaggcacaactgaacgagactctcacaaaactgagaacggagcagaacgagcgccaaaaagtcgccggtgatctgcataaggctcagcagagcctggaactgattcaaagcaagatagttaaggccgctggagacacaaccgtcatcgaaaatagtgatgtcagccctgaaaccgagtcaagcgaaaaggaaacaatgagcgtatctctgaaccaaactgtgacccagctgcagcagcttctgcaggctgtcaaccaacagttgaccaaggagaaagagcactaccaggtactggaatag

SEQ ID NO: 35513 - DNA, 3921 bp, Artificial Sequence
  derived and/or modified sequence
atggagttctatgagtccgcttactttatcgtcctcataccgagcatcgtgattactgtgatattcttatttttctggttattcatgaaggaaactctgtatgacgaggtcttggcgaaacaaaagcgcgagcagaagctgattcccactaagaccgataaaaagaaagctgagaagaaaaagaacaagaagaaggagattcagaacggcaatctacacgaaagcgatagcgaatccgtacctagggatttcaaactgtctgatgccttagcagtggaggacgaccaagtggctccagtgcctctaaacgtcgtggagacgagcagctctgtgcgggagcgaaaaaagaaggagaaaaaacaaaagcctgtcctggaggagcaggtgatcaaggagtctgatgcaagtaagatcccaggcaaaaaggtcgaacctgttcccgttaccaagcagcctacaccaccatctgaggctgcagcctcaaagaaaaagccgggacagaagaagagtaagaacggttcagacgaccaggacaaaaaagtcgaaaccctcatggtacccagcaagaggcaggaggctctgcccctgcaccaggagacaaagcaggagagcggatctggcaaaaagaaggcctcctccaagaagcagaagaccgaaaacgtatttgttgacgagcccctgatccatgccacgacctacattccattgatggataatgcagatagttcgcccgtggttgacaagagggaagttatcgacttgttgaagccagatcaagtggaaggcatccagaaaagcggcactaaaaagctgaagactgaaacggataaggagaatgccgaagtgaagttcaaagactttctcctgagcctgaagactatgatgttttccgaggacgaggccctgtgtgtggtggatttgctgaaggaaaagtccggcgttatccaggatgccctgaagaagagctccaagggtgagctcacgacattaattcatcaactgcaggagaaggacaaattgctcgctgctgttaaggaggacgccgcagcaactaaggatcgatgtaaacagctgacccaggagatgatgacagaaaaggagagatctaatgttgttatcaccaggatgaaagatagaattggaactctggaaaaggagcacaatgtgttccagaataaaattcacgtgagttatcaggagacccagcaaatgcaaatgaaatttcagcaggtgcgcgagcagatggaagctgaaatcgcccacttaaagcaagaaaacggcatcctgcgcgacgctgtcagcaacacgaccaatcaactggagagcaagcagagcgctgagctaaacaagcttcgtcaggactacgccaggctggtcaatgagcttactgaaaaaaccggtaaactacagcaggaggaggtccagaaaaagaacgccgaacaagctgccacgcagcttaaggttcagctgcaggaagcggagaggaggtgggaggaagtgcaatcctatatcaggaaacggacggcggaacacgaggcagcgcagcaggacttgcagtccaagtttgtagcaaaggagaacgaggtgcaatcacttcacagcaagctaactgacacactggtctccaaacagcaactagaacagcgactgatgcagctcatggagagtgaacagaagcgggtgaacaaagaggagtcgctgcagatgcaggtgcaagatatccttgaacaaaatgaagcattaaaagcgcaaatccagcaattccactctcaaattgctgcccaaactagtgccagtgtcctggcagaggaactccacaaggtgattgctgagaaagataaacagattaagcagactgaggatagccttgcttcagagagagatcgcctgacgtcaaaagaagaggaactgaaagacatccagaatatgaactttctcctgaaagcagaggttcagaaactgcaggcattggccaacgagcaggcagccgctgcccatgaactcgagaaaatgcagcagtccgtgtacgtcaaggacgacaagattcgcctcctggaggaacagcttcaacacgagatctctaataaaatggaggaattcaagattctcaatgatcagaataaggcattaaaatctgaagtccagaaactgcagacacttgtaagcgaacagccaaacaaggatgtcgtcgaacagatggagaagtgtatccaggaaaaagatgaaaaactaaaaacggtggaagaactgctggaaacaggtttaattcaggtggctacaaaagaggaggagttaaatgccatccgaacagaaaactcttctctgaccaaggaggtacaagatctgaaggccaaacagaatgatcaggtctcttttgcatctcttgtcgaagagctcaagaaagtaattcatgaaaaggatggcaaaattaaaagtgtcgaggagctgctggaagctgagctcctaaaggtagcaaacaaagaaaaaacagtgcagctgtcaattacttccaaggttcaggagctgcagaacctgctgaaggggaaagaggaacagatgaacacaatgaaagcagtccttgaagaaaaggaaaaagacctggccaacactggtaagtggttgcaggatctgcaggaagagaatgagtcgctgaaggcccatgtgcaggaggtggctcaacacaacctgaaagaggcgagcagcgctagccaattcgaagagctggagatagtactcaaagaaaaagagaatgagctaaagaggctcgaggctatgctcaaggaaagagaatccgatctatcctccaaaacgcagttattgcaggacgtccaagatgaaaataaacttttcaagtcccagatcgaacagctcaagcagcagaactaccaacaggcgagttctttcccaccgcacgaggaactcctgaaggtgattagcgagagagagaaggaaataagcgggctgtggaatgaactggactccctgaaggacgctgtggagcatcagaggaagaagaacaatgatctgagagagaagaactgggaagccatggaggcactggccagcaccgagaaaatgctacaagacaaagtcaacaaaacctctaaagagcgacagcagcaggtagaggccgtcgagctcgaagctaaggaggtgctgaagaaattgttcccaaaagtaagtgtgccatctaacctgtcttacggtgagtggctgcacggcttcgagaagaaggcaaaagagtgtatggctggtaccagcggatctgaagaagtcaaagtgttggagcataagctcaaagaagcagacgagatgcatacacttctccagctagaatgcgagaagtacaagtcagtgctggccgaaacggagggcattttacagaaactgcaacggagtgtagagcaggaggagaataagtggaaggtgaaagttgacgagtctcataagaccataaaacaaatgcagagctccttcacatcttctgagcaggagcttgagagactccggtcagagaataaagacattgaaaatttgcgcagggagagagaacatctggaaatggaactggaaaaggccgagatggagcgctcaacgtacgtgaccgaagtgagagaactgaaagctcaactcaacgaaactctaaccaagctacgcaccgaacagaacgagagacagaaggttgctggggatttgcacaaggcacagcagtctctcgagcttattcagtcaaagatcgtcaaagctgccggtgacaccactgttatcgagaattccgacgtgagcccagaaacagaatcctccgagaaggagactatgtccgtgagtctcaatcaaaccgttacccaactgcagcagctgctccaggcagttaatcaacagctcaccaaggagaaggaacactatcaagtgctcgagtag

SEQ ID NO: 35514 - DNA, 3921 bp, Artificial Sequence
  derived and/or modified sequence
atggaattttacgaatctgcttactttattgtgctcattccaagcatcgtgataacagtgatctttctgtttttctggctgtttatgaaggaaacactatatgatgaggtgcttgcaaaacagaagagggagcaaaaattgatacctacgaagacggacaagaaaaaagcagagaaaaaaaagaacaaaaagaaagagatccaaaatggtaatctgcacgaatctgacagtgagtcagtgcctcgcgatttcaagttatccgatgccttagcagtggaagacgatcaggttgcacctgtgcctctgaacgtggttgagaccagttcgtccgttcgtgagcgcaaaaagaaggagaaaaaacagaagcctgtcctcgaggaacaagtgattaaggagtcagatgccagcaagataccaggtaagaaggtcgaaccagtgcctgtgacgaagcagcccacccctcctagcgaggctgccgcaagcaagaaaaagccaggccaaaagaagagtaaaaacgggtctgacgaccaggataagaaggtcgagacactgatggtgccatcaaagagacaggaggctctgcctctgcaccaagagaccaagcaagaatctggctctgggaagaagaaagcctccagtaagaagcaaaagacggagaacgtcttcgttgacgagcctctcatccacgccaccacctatatccccttgatggataatgccgacagttccccggtagttgataaacgtgaggttatagatctgcttaagccagaccaggtagaaggaatccaaaaaagcggcaccaaaaaacttaagaccgagacagataaagagaatgccgaagtaaagttcaaagactttctgctgtcactaaaaacaatgatgtttagtgaggacgaggccctgtgtgtggtcgatcttcttaaggagaagtcaggggttatccaggacgcccttaagaagtctagcaaaggcgagcttaccactctgatccatcagcttcaggaaaaggataaacttttggccgcagttaaagaagacgccgctgcaactaaagatcgttgcaagcaattgactcaggaaatgatgactgagaaggagcggagtaatgtggtgatcacccggatgaaggacagaattggaacgctagagaaagagcataatgtattccaaaacaagatccatgtgagttatcaggaaacgcaacagatgcagatgaagttccagcaggtccgggaacagatggaagccgaaatcgcacatctcaaacaagagaacggaatcctgagagacgccgtgtcaaacactactaaccagctggaatctaaacagtctgcggaacttaataaattgagacaggattacgccaggttggtgaacgaactcactgaaaaaactggcaagctacagcaggaagaggtccagaaaaaaaatgccgaacaggctgctacccaactcaaggtccagctgcaagaagccgagcgtcggtgggaagaagtccaaagttatatcaggaagaggactgccgaacatgaggcggctcagcaggacctgcagtccaaattcgtagcaaaggaaaacgaagtacaatcattgcactccaaactcacagacacactggtatctaagcagcaattggagcagagactcatgcagctcatggagtccgaacagaaacgggtaaacaaggaggaaagcctacagatgcaggtgcaggacatcttggaacaaaacgaagcactcaaggctcagattcagcagttccacagtcagattgcagcccagacttccgcgtccgtgctcgcagaggaattgcataaggtcatcgccgagaaggacaagcagatcaagcagacagaagacagccttgcctcagaaagggatagattgacttccaaagaggaggaacttaaagacattcaaaacatgaattttcttctgaaggcagaagtccaaaaacttcaggccttggccaacgagcaggccgctgctgcacatgaattagaaaaaatgcagcagagcgtctacgtgaaggacgataagatccggctgcttgaagaacagcttcagcacgagatctcaaacaagatggaagaattcaagatcctcaatgaccagaacaaggctctgaagtctgaggtccaaaagctgcagaccctcgtctctgaacagcctaacaaggacgtcgttgagcagatggaaaaatgtatccaggaaaaggacgagaagctaaaaactgtagaggaattgctggaaacaggcctgatccaggtggcgacaaaagaagaggagctaaacgcaatccgcaccgagaactcgtccttaaccaaggaagttcaggatctgaaggccaaacagaacgaccaggtaagctttgcctccctggtcgaggagttgaaaaaagttatccatgagaaggacggtaaaatcaagtcagtggaggaattactggaagcagagctcctcaaagtggcaaacaaggaaaaaaccgttcagctgagcattactagcaaagtccaggaactgcagaatctgctcaaaggaaaggaggagcagatgaacactatgaaggccgtattggaagagaaagaaaaggacctggccaataccgggaagtggcttcaagatttgcaggaagaaaatgaatccctgaaggcccatgtgcaagaagtggcgcaacataacctcaaggaagcatcttcagccagccaattcgaggagctagaaatcgtcctgaaggagaaagaaaacgaactaaagcgattagaggccatgcttaaagaacgcgaaagcgacttatcatcaaaaacacagctgctgcaagacgtgcaagacgagaacaagctatttaagtctcaaatcgaacagctaaaacaacagaattaccaacaagcatcttccttcccccctcacgaggagctcctcaaagtgatttcggaacgtgagaaagagatatcaggattgtggaatgagttggactcacttaaggacgctgtcgagcaccagcggaagaagaataatgatttgcgcgaaaaaaattgggaggccatggaggccttggcatctactgaaaagatgctgcaggacaaggtcaataagacaagtaaagagcgacagcagcaggtcgaagcagtggaactggaggccaaagaagtgctaaagaaactgttccctaaggtttcagtgccatccaatctatcttacggcgaatggctgcacggattcgaaaagaaagctaaggaatgcatggcgggaacatctggctcagaagaggtcaaggtcctagagcataaacttaaggaggctgacgaaatgcatacactgcttcagctggagtgcgagaaatacaagtcagtgctcgctgaaactgaggggatcctacaaaagctgcagcgctcagtggaacaggaagagaacaagtggaaagtaaaggtggacgagtcacacaagacaataaaacagatgcaaagcagcttcactagctcagaacaggagctggagcgacttcggagtgagaataaggatatcgaaaacctacggagagagagggagcacctggagatggagctggagaaggcggaaatggagagaagcacatatgtcactgaggtgagagaacttaaggcgcaactgaacgagacgcttaccaaattgaggaccgaacagaacgagaggcagaaagttgcaggcgacttgcacaaggctcagcagtctctagaactcatccagtcaaagatcgtgaaggcagcaggggacacaaccgtcattgaaaacagtgacgtgtcacctgagaccgagtctagcgaaaaggagaccatgagtgtctcgttaaaccagaccgttactcagctgcaacagttgctgcaggctgtcaatcagcagctcacgaaggagaaagagcattatcaggtactggagtag

SEQ ID NO: 35515 - DNA, 3921 bp, Artificial Sequence
  derived and/or modified sequence
atggagttctacgagagcgcctacttcatcgtgctgatccccagcatcgtgatcaccgtgatcttcctgttcttctggctgttcatgaaggagaccctgtacgacgaggtgctggccaagcagaagagagagcagaagctgatccccaccaagaccgacaagaagaaggccgagaagaagaagaacaagaagaaggagatccagaacggcaacctgcacgagagcgacagcgagagcgtgcccagagacttcaagctgagcgacgccctggccgtggaggacgaccaggtggcccccgtgcccctgaacgtggtggagaccagcagcagcgtgagagagagaaagaagaaggagaagaagcagaagcccgtgctggaggagcaggtgatcaaggagagcgacgccagcaagatccccggcaagaaggtggagcccgtgcccgtgaccaagcagcccaccccccccagcgaggccgccgccagcaagaagaagcccggccagaagaagagcaagaacggcagcgacgaccaggacaagaaggtggagaccctgatggtgcccagcaagagacaggaggccctgcccctgcaccaggagaccaagcaggagagcggcagcggcaagaagaaggccagcagcaagaagcagaagaccgagaacgtgttcgtggacgagcccctgatccacgccaccacctacatccccctgatggacaacgccgacagcagccccgtggtggacaagagagaggtgatcgacctgctgaagcccgaccaggtggagggcatccagaagagcggcaccaagaagctgaagaccgagaccgacaaggagaacgccgaggtgaagttcaaggacttcctgctgagcctgaagaccatgatgttcagcgaggacgaggccctgtgcgtggtggacctgctgaaggagaagagcggcgtgatccaggacgccctgaagaagagcagcaagggcgagctgaccaccctgatccaccagctgcaggagaaggacaagctgctggccgccgtgaaggaggacgccgccgccaccaaggacagatgcaagcagctgacccaggagatgatgaccgagaaggagagaagcaacgtggtgatcaccagaatgaaggacagaatcggcaccctggagaaggagcacaacgtgttccagaacaagatccacgtgagctaccaggagacccagcagatgcagatgaagttccagcaggtgagagagcagatggaggccgagatcgcccacctgaagcaggagaacggcatcctgagagacgccgtgagcaacaccaccaaccagctggagagcaagcagagcgccgagctgaacaagctgagacaggactacgccagactggtgaacgagctgaccgagaagaccggcaagctgcagcaggaggaggtgcagaagaagaacgccgagcaggccgccacccagctgaaggtgcagctgcaggaggccgagagaagatgggaggaggtgcagagctacatcagaaagagaaccgccgagcacgaggccgcccagcaggacctgcagagcaagttcgtggccaaggagaacgaggtgcagagcctgcacagcaagctgaccgacaccctggtgagcaagcagcagctggagcagagactgatgcagctgatggagagcgagcagaagagagtgaacaaggaggagagcctgcagatgcaggtgcaggacatcctggagcagaacgaggccctgaaggcccagatccagcagttccacagccagatcgccgcccagaccagcgccagcgtgctggccgaggagctgcacaaggtgatcgccgagaaggacaagcagatcaagcagaccgaggacagcctggccagcgagagagacagactgaccagcaaggaggaggagctgaaggacatccagaacatgaacttcctgctgaaggccgaggtgcagaagctgcaggccctggccaacgagcaggccgccgccgcccacgagctggagaagatgcagcagagcgtgtacgtgaaggacgacaagatcagactgctggaggagcagctgcagcacgagatcagcaacaagatggaggagttcaagatcctgaacgaccagaacaaggccctgaagagcgaggtgcagaagctgcagaccctggtgagcgagcagcccaacaaggacgtggtggagcagatggagaagtgcatccaggagaaggacgagaagctgaagaccgtggaggagctgctggagaccggcctgatccaggtggccaccaaggaggaggagctgaacgccatcagaaccgagaacagcagcctgaccaaggaggtgcaggacctgaaggccaagcagaacgaccaggtgagcttcgccagcctggtggaggagctgaagaaggtgatccacgagaaggacggcaagatcaagagcgtggaggagctgctggaggccgagctgctgaaggtggccaacaaggagaagaccgtgcagctgagcatcaccagcaaggtgcaggagctgcagaacctgctgaagggcaaggaggagcagatgaacaccatgaaggccgtgctggaggagaaggagaaggacctggccaacaccggcaagtggctgcaggacctgcaggaggagaacgagagcctgaaggcccacgtgcaggaggtggcccagcacaacctgaaggaggccagcagcgccagccagttcgaggagctggagatcgtgctgaaggagaaggagaacgagctgaagagactggaggccatgctgaaggagagagagagcgacctgagcagcaagacccagctgctgcaggacgtgcaggacgagaacaagctgttcaagagccagatcgagcagctgaagcagcagaactaccagcaggccagcagcttccccccccacgaggagctgctgaaggtgatcagcgagagagagaaggagatcagcggcctgtggaacgagctggacagcctgaaggacgccgtggagcaccagagaaagaagaacaacgacctgagagagaagaactgggaggccatggaggccctggccagcaccgagaagatgctgcaggacaaggtgaacaagaccagcaaggagagacagcagcaggtggaggccgtggagctggaggccaaggaggtgctgaagaagctgttccccaaggtgagcgtgcccagcaacctgagctacggcgagtggctgcacggcttcgagaagaaggccaaggagtgcatggccggcaccagcggcagcgaggaggtgaaggtgctggagcacaagctgaaggaggccgacgagatgcacaccctgctgcagctggagtgcgagaagtacaagagcgtgctggccgagaccgagggcatcctgcagaagctgcagagaagcgtggagcaggaggagaacaagtggaaggtgaaggtggacgagagccacaagaccatcaagcagatgcagagcagcttcaccagcagcgagcaggagctggagagactgagaagcgagaacaaggacatcgagaacctgagaagagagagagagcacctggagatggagctggagaaggccgagatggagagaagcacctacgtgaccgaggtgagagagctgaaggcccagctgaacgagaccctgaccaagctgagaaccgagcagaacgagagacagaaggtggccggcgacctgcacaaggcccagcagagcctggagctgatccagagcaagatcgtgaaggccgccggcgacaccaccgtgatcgagaacagcgacgtgagccccgagaccgagagcagcgagaaggagaccatgagcgtgagcctgaaccagaccgtgacccagctgcagcagctgctgcaggccgtgaaccagcagctgaccaaggagaaggagcactaccaggtgctggagtag

SEQ ID NO: 35516 - protein, 425 aa, Artificial Sequence
  derived and/or modified sequence
MATAEVLNIGKKLYEGKTKEVYELLDSPGKVLLQSKDQITAGNAARKNHLEGKAAISNKITSCIFQLLQEAGIKTAFTRKCGETAFIAPQCEMIPIEWVCRRIATGSFLKRNPGVKEGYKFYPPKVELFFKDDANNDPQWSEEQLIAAKFCFAGLLIGQTEVDIMSHATQAIFEILEKSWLPQNCTLVDMKIEFGVDVTTKEIVLADVIDNDSWRLWPSGDRSQQKDKQSYRDLKEVTPEGLQMVKKNFEWVAERVELLLKSESQCRVVVLMGSTSDLGHCEKIKKACGNFGIPCELRVTSAHKGPDETLRIKAEYEGDGIPTVFVAVAGRSNGLGPVMSGNTAYPVISCPPLTPDWGVQDVWSSLRLPSGLGCSTVLSPEGSAQFAAQIFGLSNHLVWSKLRASILNTWISLKQADKKIRECNL

SEQ ID NO: 35517 - DNA, 1278 bp, Artificial Sequence
  derived and/or modified sequence
atggctaccgctgaggtacttaatatcggaaagaagctctacgaggggaagaccaaagaggtgtacgaactgctagattctcctgggaaagtgctcctgcaatctaaagatcagatcactgccggaaatgccgcaaggaagaatcacttagagggcaaggccgcgatatcaaataagataacaagctgtatattccaacttcttcaagaagctgggataaagacagcttttacaaggaaatgtggggaaactgcctttatagctccacagtgtgaaatgattcctatcgagtgggtttgcagaaggattgccacaggctccttcctcaaaaggaaccccggagtgaaggaaggctacaagttttatccaccaaaggttgaactgttctttaaggatgacgccaataatgatccccagtggagtgaagaacagctgatagccgccaaattctgctttgccggactactcattggccagactgaggtggatatcatgagtcacgcaacccaggcaatttttgaaatcctggaaaaatcatggttaccacagaattgtaccctcgttgacatgaagatcgagttcggggtggatgtgacgactaaagaaattgttttagccgatgtgatcgacaatgactcatggaggctgtggcccagcggcgataggtcacagcagaaggataagcagtcctacagagacctcaaagaagttacacccgaggggctgcagatggtcaagaaaaacttcgagtgggtggccgagcgtgtcgaactgcttctgaaatcggagagtcaatgcagggtggttgtgctcatgggtagtacctcagacttgggccactgtgagaaaatcaaaaaggcatgcggcaatttcgggattccctgtgaactgcgagtgacaagcgctcataagggaccagatgaaactctcagaatcaaagccgaatatgaaggcgatggaataccaaccgtgtttgtcgcagtggcaggtcggtcaaatggactgggacctgtcatgtctggtaacacagcctatccagttatttcatgcccccccctcacgcctgattggggtgtacaggacgtctggtcctctctcaggctaccctccggcctgggctgcagcactgttctgtccccagaaggatccgctcaattcgcagctcagatctttgggctttcgaatcacctcgtgtggtctaagctgcgcgcctccatcctgaacacatggatcagcttgaaacaagcagacaagaagatcagagaatgcaatctatag

SEQ ID NO: 35518 - DNA, 1278 bp, Artificial Sequence
  derived and/or modified sequence
atggctaccgctgaagttctcaacatcggcaaaaagctttacgaaggcaagacaaaagaggtgtacgagcttctggatagcccgggcaaggtgctgcttcagagcaaagatcaaataacagctggcaacgccgcccgaaaaaatcacttagagggtaaggcggcaatttccaataaaatcacatcttgtatatttcagctgctacaggaggcaggcatcaaaaccgcgttcacaaggaaatgcggtgagacagctttcatcgcaccgcaatgtgaaatgatcccaattgaatgggtttgccggagaatcgctaccggttcttttttgaagagaaaccccggcgtgaaggaaggatacaaattctacccccccaaagtcgagctattctttaaagacgacgcgaacaacgatccccaatggtccgaagagcaactgattgccgcaaaattctgtttcgctgggctcctgattgggcagactgaggtggatatcatgtcccatgcgactcaagcgatctttgagattctcgaaaagagctggctgccacagaattgtacactcgtagatatgaaaattgagtttggcgtggatgtgaccacaaaagaaattgtgctcgccgatgtgatcgataacgacagctggcgcctatggccgagcggtgatagatcccagcagaaagacaagcagtcttacagagacctgaaagaggtcacccccgagggtctccaaatggttaagaaaaacttcgaatgggtggcagagagggtggagctcctcttgaagtccgagtctcagtgccgagtagtggtcttgatgggatccacaagcgacctggggcattgtgagaagattaagaaagcttgcggcaatttcggcattccatgtgagctgcgtgtgacatccgcgcacaagggtccagatgagacgttgaggataaaagccgaatatgagggtgatgggataccaacagtgtttgtggctgttgctggacgcagtaatggtctgggtccagtcatgtcaggaaatactgcgtacccagttataagttgcccacctctaaccccagattggggagtacaggatgtgtggtcatctctgagattgccatccgggttaggctgctcaacggtactgagtcccgaaggatctgcgcagtttgccgcccagatctttgggctttctaatcatctggtgtggtctaagctgagagccagcatcctgaacacctggatctccctgaaacaggcagacaagaaaattagagagtgcaacctgtag

SEQ ID NO: 35519 - DNA, 1278 bp, Artificial Sequence
  derived and/or modified sequence
atggccacagctgaggtgctgaacatcggcaagaagctgtatgagggcaagaccaaggaggtgtatgagctgctggacagccctgggaaggtgctgctgcagagcaaggaccagatcacagctggaaatgctgccaggaagaaccacctggagggcaaggccgccatcagcaacaagatcaccagctgcatcttccagctgctgcaggaggccggcatcaagacagccttcaccaggaaatgtggggagacagccttcatcgccccccagtgtgagatgatccccatcgagtgggtgtgcagaagaattgccaccggcagcttcctgaagagaaatcctggggtgaaggagggctacaagttctacccacccaaggtggagctgttcttcaaggatgatgccaacaatgacccccagtggagcgaggagcagctgattgctgccaagttctgctttgctggcctgctgattggccagacagaggtggacatcatgagccacgccacccaggccatctttgagatcctggagaagtcctggctgccccagaactgcaccctggtggacatgaagattgaatttggagtggatgtgaccaccaaggagatcgtgctggctgatgtgattgacaatgacagctggaggctgtggcccagcggggacaggagccagcagaaggacaagcagagctacagagacctgaaggaggtgaccccagagggcctgcagatggtgaagaagaactttgagtgggtggccgagcgggtggagctgctgctgaagtctgagagccagtgccgggtggtggtgctgatgggcagcaccagtgacctgggccactgtgagaagatcaagaaggcctgtggcaactttggcatcccctgtgagctgcgggtgaccagcgcccacaagggcccagatgagaccctgcgcatcaaggccgagtatgaaggagatggcatccccaccgtgtttgtggccgtggccggccgcagcaatggcctgggccctgtgatgagcggcaacacagcctaccctgtgatcagctgcccccccctgaccccagactggggcgtgcaggatgtgtggagcagcctgcggctgcccagcggcctgggctgcagcacagtgctgagccctgagggcagcgcccagtttgctgcccagatcttcggcctgagcaaccacctggtgtggagcaagctgcgggccagcatcctgaacacctggatcagcctgaagcaggccgacaagaagatccgggagtgcaacctgtag

SEQ ID NO: 35520 - DNA, 1278 bp, Artificial Sequence
  derived and/or modified sequence
atggccaccgccgaggtgctgaacatcggcaagaagctgtacgagggaaagactaaggaggtttacgaactactggactctccgggtaaagtgctgctgcagtctaaagaccagatcaccgccggaaacgcggcccgaaaaaatcatctggaaggaaaagccgctatcagtaataaaatcacaagctgtatattccaactgcttcaggaagcggggatcaaaacagcattcacgagaaagtgtggcgaaacagcattcattgccccgcagtgcgaaatgattcccatcgagtgggtatgtcggaggattgcgaccggctccttcctgaagcgtaacccgggcgtaaaagagggatacaagttctaccctcccaaagtcgagttattctttaaggacgatgctaataatgaccctcagtggtctgaggaacagctgatagcagcaaagttctgcttcgcgggtctgcttatcggccagacagaggtggatatcatgtcccatgccacccaggctatttttgaaatcctcgaaaaatcctggctcccacagaactgcaccctggtggatatgaaaattgaatttggggtcgatgtgacgactaaagagattgtgctggctgatgtcatcgataatgactcctggcggttgtggcctagtggagaccggagccagcaaaaggataagcagtcttacagggacttgaaggaggttaccccagagggtctgcagatggtcaagaagaacttcgaatgggtggcggagagggtagagctgctcctcaaatccgaaagtcaatgtagagtggtcgttttgatggggagtacgtccgaccttgggcattgcgaaaaaattaaaaaggcttgcgggaatttcggaatcccttgcgagttgcgggtgacatctgctcacaagggacccgacgaaacacttcgaataaaggcagaatacgagggagacgggatccctactgtgttcgtggccgtggccgggcgctctaatggcttaggcccagtcatgagcgggaacactgcctatcccgtgatctcatgcccccccctgacccccgactggggcgtgcaggatgtatggtcaagcctgcggttaccctccgggctaggctgctccactgtgctatccccagagggctccgctcagttcgcggctcagatctttggtttatccaatcacctcgtatggtctaaattacgggcgtctattctaaacacctggatttcacttaaacaagctgacaagaaaatccgggagtgcaacctttag

SEQ ID NO: 35521 - DNA, 1278 bp, Artificial Sequence
  derived and/or modified sequence
atggccaccgccgaggtgctgaacatcggcaagaagctgtacgaggggaagacaaaagaagtgtacgagctattagactcgcctggcaaggtcttactgcaaagtaaggatcaaatcacagcaggcaacgccgcgcggaaaaaccacttggaaggcaaggctgccatttctaataagatcacgtcctgcatcttccagcttttacaggaggcaggaataaaaaccgctttcactcggaaatgtggcgaaactgctttcatcgccccacagtgcgaaatgatcccaattgagtgggtttgtcggcgcatcgccactggaagctttcttaagcggaacccaggtgtgaaggaaggatacaaattttatcctccgaaggttgagctgttttttaaggatgacgctaataatgacccccaatggagcgaagagcaactgatcgctgccaagttttgctttgcgggattactgataggccagaccgaagttgacattatgtcccacgcaacccaggccatctttgagattcttgagaaatcttggctcccacagaattgcacgctggtcgatatgaaaatagaattcggagtggacgtcactaccaaagagattgtgttggctgatgtgatcgataatgattcgtggcgactgtggcccagcggcgatagatcacagcagaaggataagcagagttatagagatctaaaggaggttacccctgaggggttacagatggtcaaaaaaaattttgagtgggtggcggaacgggtcgagctgctcctcaagtcagaatctcagtgtcgagtagtggtgctaatgggctcaacttcggatttaggacactgcgaaaaaattaagaaggcatgtggcaactttggcattccctgtgagctcagagtgacgtcggctcataagggccccgacgagaccttgcggataaaggccgaatacgaaggcgatggaatcccaactgtgtttgtcgccgtggccgggcgaagcaacggactggggccagtgatgtcagggaacacagcatatccagtgatttcctgcccacccctgacacccgattggggggttcaggacgtgtggtcttccctgcggctccctagcggactgggttgcagtacagtactcagcccggagggatctgctcaatttgccgcacaaattttcggccttagtaatcacctcgtgtggtcaaaactccgggcatctatcctgaatacctggattagcttgaaacaagctgataaaaagataagggaatgtaatctctag

SEQ ID NO: 35522 - DNA, 3339 bp, Artificial Sequence
  derived and/or modified sequence
gctagccttcccctaagagctgcctggaaagctgtatttgctgcacgtggaaatctccgttattttccagcacccaacagtagcgtaatgggagtaacggacttaacctcatttctctttcagagcatttagccttcatatgcccttccctgcatgcttcccccaggccgtcaagacttgagttctgcctcgcttcccggcgcggtcgcagccctcagcccacttaggataatggcgacagctgaggtactgaacattggtaaaaaattatatgagggtaaaacaaaagaagtctacgaattgttagacagtccaggaaaagtcctcctgcagtccaaggaccagattacagcaggaaatgcagctagaaaaaaccacctggaaggaaaagctgcaatctcaaataaaatcaccagttgtatttttcagttattacaggaagcaggtattaaaactgccttcaccagaaaatgtggggagacagctttcattgcaccgcagtgtgaaatgattccaattgaatgggtttgcagaagaatagcaactggttcttttctcaaaagaaatcctggtgtcaaggaaggatataagttttacccacctaaagtggagttgtttttcaaggatgatgccaataatgacccacagtggtctgaggaacagctgattgctgcaaaattttgctttgctggacttcttataggccagactgaagtggatatcatgagtcatgctacacaggctatatttgaaatactggagaaatcctggttgccccagaattgtacactggttgatatgaagattgaatttggtgttgatgtaaccaccaaagaaattgttcttgctgatgttattgacaatgattcctggagactctggccatcaggagatcgaagccaacagaaagacaaacagtcttatcgggacctcaaagaagtaactcctgaagggctccaaatggtaaagaaaaactttgagtgggttgcagagagagtagagttgcttttgaaatcagaaagtcagtgcagggttgtagtgttgatgggctctacttctgatcttggtcactgtgaaaaaatcaagaaggcctgtggaaattttggcattccatgtgaacttcgagtaacatctgcgcataaaggaccagatgaaactctgaggattaaagctgagtatgaaggggatggcattcctactgtatttgtggcagtggcaggcagaagtaatggtttgggaccagtgatgtctgggaacactgcatatccagttatcagctgtcctcccctcacaccagactggggagttcaggatgtgtggtcttctcttcgactacccagtggtcttggctgttcaaccgtactttctccagaaggatcagctcaatttgctgctcagatatttgggttaagcaaccatttggtatggagcaaactgcgagcaagcattttgaacacatggatttccttgaagcaggctgacaagaaaatcagagaatgtaatttataagaaagaatgccattgaattttttaggggaaaaactacaaatttctaatttagctgaaggaaaatcaagcaagatgaaaaggtaattttaaattagagaacacaaataaaatgtattagtgaataaatgcttctctagatccatattaataaacatgagcatctaacccctcctttcttaggctagacaccaagatatttcagccagcctttatcattcctcttactttatcctttttccttaagtattggtggtcactactattgagtttcttccttaacactgattaaatgatcttaactccctcagctaaaactggcattactgactcccagctatatttctccagacttgcatttttttttttttttttgagacagggtctcactgtcgcccaggctggagtgcagtggcgtgatctcagttcactgctgctttccctcctgggctcaagcagttctcccacctcagcctctcgactaacagggactataatcttgcagcaccatgccgagctaattttattttttgtagagatgagctctcactatgtcacccaggttcgtctcaaactcctgaaccctagtaattctcctatctcagcctcccaaagtgctagggttacagacatgagccactgtgcctgtctagacttgtactttcaactgtccatttctccctgtctgtcccatgggcactcatgaaaaaacagaatgctcccaactttattcatcttccaagcctgtagctcttggtatactcactgttgcaagtcagaagcttgatttcatcattgatgtttttctcacgtttcacatctcactcatcaccaagtcatgttggtgttaatttctgattaacccttgaatttaccgtcttctcatcctctgtacaaaagcctcaagtgagggtcaaattcaacattatcctgatctagacagcccccattctcaatccacccttttccaagttgattgcccaaggacttctaacaataaactctcttttgcaccacagacttctttgaaaatatacatgctgttgaccctctctgtagaaaaccgcacacataaaacttaccaacagatttcattggttcttgggttctcccgaagcctatccatggtttatagattaagaattgatgaggtagctgggcacagtggctcacacctacgatcacagcacttcgggaggctgaagcaagcagatcacttgaggtcaggagtttgagaccagcctggccaacatggtgaaaccctgtctctactaaaaatacaaaaagtagccagccgtgatgacaggcacctgtaatcccagctactcgggaggctgaggcatgagaattgcttgaacccgggaggcggaggttgcagtgagcctagatcatgccactgcactccaacctgggcagcagagcaagactctgtctcaaaaggggaaaaaaaaaattgctgatgtgacccatgaagggaactcattttcctcgtaattttggactgccacacattggtacctttagttctctgaaggcccacgtttttatcattaagacctatttgttagctagtagagctttatgttcgctgtccatgaaaccttctgtaaccacagtgactacaagtagttctttctctattgaattattaggtccagaatagaagatgtcattgtacactttatttccctcacactgtgttatgctctgatgtgctatgcttagctatctgtcagagattagtaaattataaaactcatgtgtactacttaagtttatatcttatgctagtttataagaacaattaaaaggacttagaagattaactttggt

SEQ ID NO: 35523 - DNA, 1565 bp, Artificial Sequence
  derived and/or modified sequence
cccctccgggttaggcggctgtagcggagctcgaaaagagtggcgcagggtcgcgcggccccgcctccttccccgcccagcgaagctctctgaccacccctcttttctagagttctgcctcgcttcccggcgcggtcgcagccctcagcccacttaggataatggcgacagctgaggtactgaacattggtaaaaaattatatgagggtaaaacaaaagaagtctacgaattgttagacagtccaggaaaagtcctcctgcagtccaaggaccagattacagcaggaaatgcagctagaaaaaaccacctggaaggaaaagctgcaatctcaaataaaatcaccagttgtatttttcagttattacaggaagcaggtattaaaactgccttcaccagaaaatgtggggagacagctttcattgcaccgcagtgtgaaatgattccaattgaatgggtttgcagaagaatagcaactggttcttttctcaaaagaaatcctggtgtcaaggaaggatataagttttacccacctaaagtggagttgtttttcaaggatgatgccaataatgacccacagtggtctgaggaacagctgattgctgcaaaattttgctttgctggacttcttataggccagactgaagtggatatcatgagtcatgctacacaggctatatttgaaatactggagaaatcctggttgccccagaattgtacactggttgatatgaagattgaatttggtgttgatgtaaccaccaaagaaattgttcttgctgatgttattgacaatgattcctggagactctggccatcaggagatcgaagccaacagaaagacaaacagtcttatcgggacctcaaagaagtaactcctgaagggctccaaatggtaaagaaaaactttgagtgggttgcagagagagtagagttgcttttgaaatcagaaagtcagtgcagggttgtagtgttgatgggctctacttctgatcttggtcactgtgaaaaaatcaagaaggcctgtggaaattttggcattccatgtgaacttcgagtaacatctgcgcataaaggaccagatgaaactctgaggattaaagctgagtatgaaggggatggcattcctactgtatttgtggcagtggcaggcagaagtaatggtttgggaccagtgatgtctgggaacactgcatatccagttatcagctgtcctcccctcacaccagactggggagttcaggatgtgtggtcttctcttcgactacccagtggtcttggctgttcaaccgtactttctccagaaggatcagctcaatttgctgctcagatatttgggttaagcaaccatttggtatggagcaaactgcgagcaagcattttgaacacatggatttccttgaagcaggctgacaagaaaatcagagaatgtaatttataagaaagaatgccattgaattttttaggggaaaaactacaaatttctaatttagctgaaggaaaatcaagcaagatgaaaaggtaattttaaattagagaacacaaataaaatgtattagtgaataaa

SEQ ID NO: 35524 - DNA, 1278 bp, Artificial Sequence
  derived and/or modified sequence
atggccaccgcggaggttcttaacatcggcaagaagctgtacgaggggaaaacaaaagaggtttacgagctcctggactctccaggcaaggtccttcttcagtcaaaggatcagattaccgctggaaatgccgcacgtaaaaaccatttggaggggaaggccgcaatctcaaataaaattacatcttgtatttttcaactgctgcaggaggccggaataaagacagcgtttacaagaaagtgtggcgaaacagccttcatcgcaccgcagtgtgaaatgatccctatcgagtgggtgtgccggaggatcgccaccgggtcttttctcaaaaggaacccgggagtgaaagaagggtacaaattctaccctcccaaagttgagctgttcttcaaggatgacgcaaacaacgacccacagtggagtgaggaacagttaattgcagcgaaattttgcttcgccggtttgctgatcgggcagaccgaggtcgatatcatgagccacgcaacacaggccatctttgaaatccttgaaaagagttggctgcctcagaattgtactcttgtagacatgaagattgagtttggcgtggacgtgactacaaaagaaatcgttctggccgatgttattgacaacgatagctggagactgtggccttcaggtgaccgctcccaacaaaaagacaagcagtcctatcgagacctgaaagaagtgaccccggaggggctccagatggtgaaaaaaaatttcgaatgggtcgccgagcgggtcgaacttctgcttaagtccgaatcacagtgccgagtggtcgttctgatggggtctacctctgatcttggacattgcgagaagataaagaaagcctgcgggaactttgggatcccatgcgagttaagggtaacatccgctcataaaggaccggatgagacgctcaggattaaggccgaatacgagggggacggcattcctaccgtattcgtcgccgtcgcgggaagatccaacggcctcgggccagtgatgtcgggcaacaccgcctaccctgtcatctcgtgcccgcctttgacccccgactggggagttcaggacgtatggtcgagcctaaggctgccttccggactcggatgttctactgtgctgtcacctgaaggctccgctcaattcgccgctcagatttttggactgagcaatcacctggtgtggtccaagctgagagccagcatactgaatacttggatctcactgaagcaggctgacaagaagattagggagtgcaacctatag

SEQ ID NO: 35525 - DNA, 1278 bp, Artificial Sequence
  derived and/or modified sequence
atggcaactgcagaagtgttgaacatcgggaagaaactttatgaaggaaaaactaaagaagtttatgagttgctcgattcgccaggaaaagttctgctccaaagtaaggaccagataactgccggaaacgccgctagaaaaaatcacctggagggcaaggcagcaatcagcaataaaattacatcatgcatctttcagttactgcaggaggctggtattaaaactgctttcacccgcaagtgcggagagaccgctttcatcgctccccagtgcgagatgatcccgattgaatgggtttgccggagaatcgctactggtagctttcttaaacgaaaccctggcgtcaaagaaggatataagttctaccctccaaaggtcgagctgttctttaaggatgacgctaacaatgacccccaatggagcgaggagcagctgatcgccgcaaaattttgttttgccggactgcttataggccaaaccgaggtagatatcatgtctcatgccacccaggccatctttgagattttagaaaaatcttggttgccgcagaactgcacattggtggacatgaaaatagagtttggcgttgacgtgacaactaaggagattgtgctggctgatgtaatagataatgacagctggcggctgtggccttcgggcgaccgctcccagcaaaaggataagcagagctaccgggacttgaaagaggtgacgcccgagggcctacaaatggtcaagaagaacttcgaatgggttgccgagagagtcgaacttctgttaaaatccgaatcacagtgccgcgtggtcgtcctgatggggtccacctccgacttaggtcactgcgaaaaaatcaaaaaggcatgtgggaacttcggtattccgtgcgagctccgagtgacttctgcccataagggtcccgatgagaccttacggattaaggcagagtacgagggtgatgggatcccaacagtgttcgtggccgtagccggacggagcaatgggctggggcctgtgatgtcaggcaatacagcttatccagtgatcagctgtcctcccctgacacctgactggggggtgcaagacgtgtggtcaagcctacggttgccatccggtctggggtgctccacagtcctgagcccggagggctctgcccagtttgcagcccaaattttcggcctgtccaaccatctggtgtggtctaagctacgggcttcaattttgaacacgtggatcagtttaaagcaggcggataaaaaaattcgcgaatgcaatttatag

SEQ ID NO: 35526 - DNA, 1278 bp, Artificial Sequence
  derived and/or modified sequence
atggccaccgccgaggtgctgaacatcggcaagaagctgtacgagggcaagaccaaggaggtgtacgagctgctggacagccccggcaaggtgctgctgcagagcaaggaccagatcaccgccggcaacgccgccagaaagaaccacctggagggcaaggccgccatcagcaacaagatcaccagctgcatcttccagctgctgcaggaggccggcatcaagaccgccttcaccagaaagtgcggcgagaccgccttcatcgccccccagtgcgagatgatccccatcgagtgggtgtgcagaagaatcgccaccggcagcttcctgaagagaaaccccggcgtgaaggagggctacaagttctacccccccaaggtggagctgttcttcaaggacgacgccaacaacgacccccagtggagcgaggagcagctgatcgccgccaagttctgcttcgccggcctgctgatcggccagaccgaggtggacatcatgagccacgccacccaggccatcttcgagatcctggagaagagctggctgccccagaactgcaccctggtggacatgaagatcgagttcggcgtggacgtgaccaccaaggagatcgtgctggccgacgtgatcgacaacgacagctggagactgtggcccagcggcgacagaagccagcagaaggacaagcagagctacagagacctgaaggaggtgacccccgagggcctgcagatggtgaagaagaacttcgagtgggtggccgagagagtggagctgctgctgaagagcgagagccagtgcagagtggtggtgctgatgggcagcaccagcgacctgggccactgcgagaagatcaagaaggcctgcggcaacttcggcatcccctgcgagctgagagtgaccagcgcccacaagggccccgacgagaccctgagaatcaaggccgagtacgagggcgacggcatccccaccgtgttcgtggccgtggccggcagaagcaacggcctgggccccgtgatgagcggcaacaccgcctaccccgtgatcagctgcccccccctgacccccgactggggcgtgcaggacgtgtggagcagcctgagactgcccagcggcctgggctgcagcaccgtgctgagccccgagggcagcgcccagttcgccgcccagatcttcggcctgagcaaccacctggtgtggagcaagctgagagccagcatcctgaacacctggatcagcctgaagcaggccgacaagaagatcagagagtgcaacctgtag

SEQ ID NO: 35527 - protein, 432 aa, Artificial Sequence
  derived and/or modified sequence
MATAEVLNIGKKLYEGKTKEVYELLDSPGKVLLQSKDQITAGNAARKNHLEGKAAISNKITSCIFQLLQEAVTSYKSNRIKTAFTRKCGETAFIAPQCEMIPIEWVCRRIATGSFLKRNPGVKEGYKFYPPKVELFFKDDANNDPQWSEEQLIAAKFCFAGLLIGQTEVDIMSHATQAIFEILEKSWLPQNCTLVDMKIEFGVDVTTKEIVLADVIDNDSWRLWPSGDRSQQKDKQSYRDLKEVTPEGLQMVKKNFEWVAERVELLLKSESQCRVVVLMGSTSDLGHCEKIKKACGNFGIPCELRVTSAHKGPDETLRIKAEYEGDGIPTVFVAVAGRSNGLGPVMSGNTAYPVISCPPLTPDWGVQDVWSSLRLPSGLGCSTVLSPEGSAQFAAQIFGLSNHLVWSKLRASILNTWISLKQADKKIRECNL

SEQ ID NO: 35528 - DNA, 1299 bp, Artificial Sequence
  derived and/or modified sequence
atggccactgccgaagtacttaatatcggcaagaagttatacgaggggaagacaaaggaagtatacgaactccttgactcccctggaaaagtgctgctacaatccaaggatcaaatcactgctgggaatgctgccaggaaaaatcatctcgagggaaaggcagccatctccaacaaaatcacatcatgtattttccagcttctgcaggaggctgtgacaagctataaaagcaataggattaaaacagcctttaccagaaaatgcggtgaaacagcttttattgctcctcaatgcgaaatgatccccatcgaatgggtctgcaggcggatcgctaccggctccttcctgaaaaggaacccaggagtaaaagagggatacaaattttatcctcccaaagtcgagttgttttttaaggacgacgccaacaatgacccccagtggagtgaggagcaactgatcgcagccaagttttgcttcgctggcctgcttatcggccagacagaagtagacattatgtcccatgccactcaggccattttcgaaatcctggaaaaatcgtggctcccgcagaactgtacactggttgatatgaaaattgagtttggcgttgacgtgacaaccaaagagattgtgctggctgatgtaattgacaatgattcttggcgcctttggcctagcggggaccggtcacagcagaaggataagcagtcatacagggacctgaaagaagttacacccgagggcctgcaaatggtcaaaaagaatttcgaatgggtggccgagagggttgaactcctgttaaagagcgagagccagtgccgggtggtcgtcctcatgggctcaacaagtgatctaggacattgcgagaagattaagaaagcatgtggaaacttcggcataccatgcgagctgcgcgtgactagcgcccacaagggccccgacgagactctccggatcaaggccgagtacgagggtgacggaatccccaccgtgtttgtggccgtggctgggcggagcaacgggctgggtcctgtgatgtccggaaacacagcatacccagtgataagttgcccacccctgacacccgactggggcgtccaggatgtgtggtcttccctaaggttgccttcaggcctcgggtgctccacagtgctgagccccgagggctccgctcagtttgctgcacaaatcttcggcttatctaaccatctcgtctggtccaaactccgggcaagcatattgaatacctggatctctcttaagcaggcagacaagaaaataagagagtgcaatctatag

SEQ ID NO: 35529 - DNA, 1299 bp, Artificial Sequence
  derived and/or modified sequence
atggccacagctgaggtgctgaacatcggcaagaagctgtatgagggcaagaccaaggaggtgtatgagctgctggacagccctgggaaggtgctgctgcagagcaaggaccagatcacagctggaaatgctgccaggaagaaccacctggagggcaaggccgccatcagcaacaagatcaccagctgcatcttccagctgctgcaggaggccgtgaccagctacaagagcaaccgcatcaagacagccttcaccaggaaatgtggggagacagccttcatcgccccccagtgtgagatgatccccatcgagtgggtgtgccgccgcatcgccaccggcagcttcctgaagaggaaccctggggtgaaggagggctacaagttctacccacccaaggtggagctgttcttcaaggatgatgccaacaatgacccccagtggagcgaggagcagctgattgctgccaagttctgctttgctggcctgctgattggccagacagaggtggacatcatgagccacgccacccaggccatctttgagatcctggagaagtcctggctgccccagaactgcaccctggtggacatgaagattgaatttggagtggatgtgaccaccaaggagatcgtgctggctgatgtgattgacaatgacagctggaggctgtggcccagcggggacaggagccagcagaaggacaagcagagctacagagacctgaaggaggtgaccccagagggcctgcagatggtgaagaagaactttgagtgggtggccgagcgggtggagctgctgctgaagtctgagagccagtgccgggtggtggtgctgatgggcagcaccagtgacctgggccactgtgagaagatcaagaaggcctgtggcaactttggcatcccctgtgagctgcgggtgaccagcgcccacaagggcccagatgagaccctgcgcatcaaggccgagtatgaaggagatggcatccccaccgtgtttgtggccgtggccggccgcagcaatggcctgggccctgtgatgagcggcaacacagcctaccctgtgatcagctgcccccccctgaccccagactggggcgtgcaggatgtgtggagcagcctgcggctgcccagcggcctgggctgcagcacagtgctgagccctgagggcagcgcccagtttgctgcccagatcttcggcctgagcaaccacctggtgtggagcaagctgcgggccagcatcctgaacacctggatcagcctgaagcaggccgacaagaagatccgggagtgcaacctgtag

SEQ ID NO: 35530 - DNA, 1299 bp, Artificial Sequence
  derived and/or modified sequence
atggccaccgccgaggtgctgaacatcggcaagaagctgtacgaggggaagaccaaggaagtgtacgagcttcttgatagtcctggaaaggtgctcctgcagagtaaagatcaaattacagctggtaacgctgctcgtaagaatcacctggaaggcaaggccgcaataagcaataaaattaccagttgtatcttccagctcctgcaggaagcagttaccagttacaagtccaacaggattaaaacagcctttacccgaaaatgcggcgagaccgcattcatcgcaccgcagtgtgaaatgattcctatcgaatgggtctgccgccggatcgcaacagggtctttcttgaagcggaatccaggagtgaaggaaggttacaaattctatccaccaaaagtggagttgttcttcaaggacgacgcaaataacgacccccagtggtcagaggaacagttgatagcggccaagttctgttttgccgggctgctgatcggacagaccgaggtggacatcatgtctcacgccacccaggccattttcgaaatcctggaaaaaagctggctaccccagaactgcaccctcgttgacatgaaaatcgaattcggcgtggacgtcacaactaaagagattgttctggccgatgtgatcgacaacgattcatggagactgtggccatccggtgaccgcagccagcagaaggataaacagtcatacagagacctgaaagaagtaacccctgaaggactgcagatggtcaagaaaaattttgagtgggtggcagaacgagtggaactcttacttaagtccgaaagccagtgccgggtggtggtcctgatggggagtacaagtgatctggggcattgcgagaaaataaagaaagcgtgtgggaactttggcattccttgcgagctgagagtgacctctgcgcataaggggcccgacgagacactcaggatcaaagctgagtacgagggtgatggcattcccacagtgtttgttgccgtcgcgggacgcagcaacggcctcgggcccgtgatgagcggcaatactgcctatccagtgattagctgcccgcccctgacgcctgactggggcgtgcaggatgtctggtcgtctctcagattacccagcgggctgggatgtagtaccgtcctttcacctgagggctctgcccagttcgcagcccagattttcggcctgtcaaatcacctggtgtggtcaaagctcagagcttcaattctgaacacctggatcagcctaaagcaggcagataaaaagattcgggagtgcaacctctag

SEQ ID NO: 35531 - DNA, 3297 bp, Artificial Sequence
  derived and/or modified sequence
agtctccgcccatacccctccgggttaggcggctgtagcggagctcgaaaagagtggcgcagggtcgcgcggccccgcctccttccccgcccagcgaagctctctgaccacccctcttttctagagttctgcctcgcttcccggcgcggtcgcagccctcagcccacttaggataatggcgacagctgaggtactgaacattggtaaaaaattatatgagggtaaaacaaaagaagtctacgaattgttagacagtccaggaaaagtcctcctgcagtccaaggaccagattacagcaggaaatgcagctagaaaaaaccacctggaaggaaaagctgcaatctcaaataaaatcaccagttgtatttttcagttattacaggaagcagttacctcatataagtcaaatcgtattaaaactgccttcaccagaaaatgtggggagacagctttcattgcaccgcagtgtgaaatgattccaattgaatgggtttgcagaagaatagcaactggttcttttctcaaaagaaatcctggtgtcaaggaaggatataagttttacccacctaaagtggagttgtttttcaaggatgatgccaataatgacccacagtggtctgaggaacagctgattgctgcaaaattttgctttgctggacttcttataggccagactgaagtggatatcatgagtcatgctacacaggctatatttgaaatactggagaaatcctggttgccccagaattgtacactggttgatatgaagattgaatttggtgttgatgtaaccaccaaagaaattgttcttgctgatgttattgacaatgattcctggagactctggccatcaggagatcgaagccaacagaaagacaaacagtcttatcgggacctcaaagaagtaactcctgaagggctccaaatggtaaagaaaaactttgagtgggttgcagagagagtagagttgcttttgaaatcagaaagtcagtgcagggttgtagtgttgatgggctctacttctgatcttggtcactgtgaaaaaatcaagaaggcctgtggaaattttggcattccatgtgaacttcgagtaacatctgcgcataaaggaccagatgaaactctgaggattaaagctgagtatgaaggggatggcattcctactgtatttgtggcagtggcaggcagaagtaatggtttgggaccagtgatgtctgggaacactgcatatccagttatcagctgtcctcccctcacaccagactggggagttcaggatgtgtggtcttctcttcgactacccagtggtcttggctgttcaaccgtactttctccagaaggatcagctcaatttgctgctcagatatttgggttaagcaaccatttggtatggagcaaactgcgagcaagcattttgaacacatggatttccttgaagcaggctgacaagaaaatcagagaatgtaatttataagaaagaatgccattgaattttttaggggaaaaactacaaatttctaatttagctgaaggaaaatcaagcaagatgaaaaggtaattttaaattagagaacacaaataaaatgtattagtgaataaatgcttctctagatccatattaataaacatgagcatctaacccctcctttcttaggctagacaccaagatatttcagccagcctttatcattcctcttactttatcctttttccttaagtattggtggtcactactattgagtttcttccttaacactgattaaatgatcttaactccctcagctaaaactggcattactgactcccagctatatttctccagacttgcatttttttttttttttttgagacagggtctcactgtcgcccaggctggagtgcagtggcgtgatctcagttcactgctgctttccctcctgggctcaagcagttctcccacctcagcctctcgactaacagggactataatcttgcagcaccatgccgagctaattttattttttgtagagatgagctctcactatgtcacccaggttcgtctcaaactcctgaaccctagtaattctcctatctcagcctcccaaagtgctagggttacagacatgagccactgtgcctgtctagacttgtactttcaactgtccatttctccctgtctgtcccatgggcactcatgaaaaaacagaatgctcccaactttattcatcttccaagcctgtagctcttggtatactcactgttgcaagtcagaagcttgatttcatcattgatgtttttctcacgtttcacatctcactcatcaccaagtcatgttggtgttaatttctgattaacccttgaatttaccgtcttctcatcctctgtacaaaagcctcaagtgagggtcaaattcaacattatcctgatctagacagcccccattctcaatccacccttttccaagttgattgcccaaggacttctaacaataaactctcttttgcaccacagacttctttgaaaatatacatgctgttgaccctctctgtagaaaaccgcacacataaaacttaccaacagatttcattggttcttgggttctcccgaagcctatccatggtttatagattaagaattgatgaggtagctgggcacagtggctcacacctacgatcacagcacttcgggaggctgaagcaagcagatcacttgaggtcaggagtttgagaccagcctggccaacatggtgaaaccctgtctctactaaaaatacaaaaagtagccagccgtgatgacaggcacctgtaatcccagctactcgggaggctgaggcatgagaattgcttgaacccgggaggcggaggttgcagtgagcctagatcatgccactgcactccaacctgggcagcagagcaagactctgtctcaaaaggggaaaaaaaaaattgctgatgtgacccatgaagggaactcattttcctcgtaattttggactgccacacattggtacctttagttctctgaaggcccacgtttttatcattaagacctatttgttagctagtagagctttatgttcgctgtccatgaaaccttctgtaaccacagtgactacaagtagttctttctctattgaattattaggtccagaatagaagatgtcattgtacactttatttccctcacactgtgttatgctctgatgtgctatgcttagctatctgtcagagattagtaaattataaaactcatgtgtactacttaagtttatatcttatgctagtttataagaacaattaaaaggacttagaagattaa

SEQ ID NO: 35532 - DNA, 1299 bp, Artificial Sequence
  derived and/or modified sequence
atggcgaccgccgaggtgttaaatattgggaaaaaactgtacgaaggcaaaacgaaagaggtgtatgagctgttggactctccaggcaaagtgctattgcaatcaaaggaccagattaccgctggaaatgccgcacggaagaatcacttggagggaaaagcagcgatcagcaacaagattacgtcctgtatcttccaattgctgcaagaggccgtgacatcatacaaatccaaccgcatcaaaacagcctttacgcggaagtgcggcgagaccgcttttatagcccctcagtgtgagatgatccccatcgaatgggtgtgtagacggatcgccactggcagttttctgaaacgcaatcccggagtaaaggaaggttataagttctacccacctaaggtggagctgttcttcaaggatgacgctaacaacgacccccagtggtctgaggaacagttgattgccgctaaattctgtttcgcagggctacttattggccagacagaagtggacatcatgtctcatgctacacaggccatctttgaaattcttgaaaagtcctggcttccccagaactgtaccctggttgacatgaaaattgagttcggggtggatgtgactaccaaagagatcgtgcttgctgacgtcattgacaacgacagctggagactgtggcctagtggagataggtcccagcagaaggacaaacaatcatatcgagacttaaaagaagtgaccccagaggggctgcagatggtgaagaaaaatttcgagtgggtcgctgaaagggtggaattgctgctgaagtctgagtcccagtgtagagttgtggttctgatgggcagtacgtccgatctcgggcactgcgagaaaatcaaaaaggcttgtggcaattttggcattccctgcgaactcagggtgacatctgcgcacaaaggccctgatgagacgctgcgtattaaagccgagtacgagggggacggcataccaacagtttttgttgcagtggccggaagatcaaatggtctgggtcctgtgatgagcgggaacacagcctatccggtgatcagctgcccaccactcacgcctgactggggtgtgcaggatgtttggagcagcctcaggctgccctcggggctcggatgttcaactgtgctgagtcctgagggttctgcacaattcgcggcacagattttcggcttgtccaatcatttggtgtggtctaagctccgtgcctcaatcctgaacacctggattagcctgaagcaggctgacaaaaaaatcagagagtgtaatctctag

SEQ ID NO: 35533 - DNA, 1299 bp, Artificial Sequence
  derived and/or modified sequence
atggccaccgccgaggtgctgaacatcggcaagaagctgtacgagggcaagaccaaggaggtgtacgagctgctggacagccccggcaaggtgctgctgcagagcaaggaccagatcaccgccggcaacgccgccagaaagaaccacctggagggcaaggccgccatcagcaacaagatcaccagctgcatcttccagctgctgcaggaggccgtgaccagctacaagagcaacagaatcaagaccgccttcaccagaaagtgcggcgagaccgccttcatcgccccccagtgcgagatgatccccatcgagtgggtgtgcagaagaatcgccaccggcagcttcctgaagagaaaccccggcgtgaaggagggctacaagttctacccccccaaggtggagctgttcttcaaggacgacgccaacaacgacccccagtggagcgaggagcagctgatcgccgccaagttctgcttcgccggcctgctgatcggccagaccgaggtggacatcatgagccacgccacccaggccatcttcgagatcctggagaagagctggctgccccagaactgcaccctggtggacatgaagatcgagttcggcgtggacgtgaccaccaaggagatcgtgctggccgacgtgatcgacaacgacagctggagactgtggcccagcggcgacagaagccagcagaaggacaagcagagctacagagacctgaaggaggtgacccccgagggcctgcagatggtgaagaagaacttcgagtgggtggccgagagagtggagctgctgctgaagagcgagagccagtgcagagtggtggtgctgatgggcagcaccagcgacctgggccactgcgagaagatcaagaaggcctgcggcaacttcggcatcccctgcgagctgagagtgaccagcgcccacaagggccccgacgagaccctgagaatcaaggccgagtacgagggcgacggcatccccaccgtgttcgtggccgtggccggcagaagcaacggcctgggccccgtgatgagcggcaacaccgcctaccccgtgatcagctgcccccccctgacccccgactggggcgtgcaggacgtgtggagcagcctgagactgcccagcggcctgggctgcagcaccgtgctgagccccgagggcagcgcccagttcgccgcccagatcttcggcctgagcaaccacctggtgtggagcaagctgagagccagcatcctgaacacctggatcagcctgaagcaggccgacaagaagatcagagagtgcaacctgtag

SEQ ID NO: 35534 - protein, 500 aa, Artificial Sequence
  derived and/or modified sequence
METEAIDGYITCDNELSPEREHSNMAIDLTSSTPNGQHASPSHMTSTNSVKLEMQSDEECDRKPLSREDEIRGHDEGSSLEEPLIESSEVADNRKVQELQGEGGIRLPNGERPFHCNQCGASFTQKGNLLRHIKLHSGEKPFKCPFCSYACRRRDALTGHLRTHSVGKPHKCNYCGRSYKQRSSLEEHKERCHNYLQNVSMEAAGQVMSHHVPPMEDCKEQEPIMDNNISLVPFERPAVIEKLTGNMGKRKSSTPQKFVGEKLMRFSYPDIHFDMNLTYEKEAELMQSHMMDQAINNAITYLGAEALHPLMQHPPSTIAEVAPVISSAYSQVYHPNRIERPISRETADSHENNMDGPISLIRPKSRPQEREASPSNSCLDSTDSESSHDDHQSYQGHPALNPKRKQSPAYMKEDVKALDTTKAPKGSLKDIYKVFNGEGEQIRAFKCEHCRVLFLDHVMYTIHMGCHGYRDPLECNICGYRSQDRYEFSSHIVRGEHTFH

SEQ ID NO: 35535 - protein, 381 aa, Artificial Sequence
  derived and/or modified sequence
METEAIDGYITCDNELSPEREHSNMAIDLTSSTPNGQHASPSHMTSMGKPHKCNYCGRSYKQRSSLEEHKERCHNYLQNVSMEAAGQVMSHHVPPMEDCKEQEPIMDNNISLVPFERPAVIEKLTGNMGKRKSSTPQKFVGEKLMRFSYPDIHFDMNLTYEKEAELMQSHMMDQAINNAITYLGAEALHPLMQHPPSTIAEVAPVISSAYSQVYHPNRIERPISRETADSHENNMDGPISLIRPKSRPQEREASPSNSCLDSTDSESSHDDHQSYQGHPALNPKRKQSPAYMKEDVKALDTTKAPKGSLKDIYKVFNGEGEQIRAFKCEHCRVLFLDHVMYTIHMGCHGYRDPLECNICGYRSQDRYEFSSHIVRGEHTFH

SEQ ID NO: 35536 - DNA, 1365 bp, Artificial Sequence
  derived and/or modified sequence
atggaaacagaggctattgatggctatataacgtgtgacaatgagctttcacccgaaagggagcactccaatatggcaattgacctcacctcaagcacacccaatggacagcatgcctcaccaagtcacatgacaagcacaaattcagtaaagctagaaatgcagagtgatgaagagtgtgacaggaaacccctgagccgtgaagatgagatcaggggccatgatgagggtagcagcctagaagaacccctaattgagagcagcgaggtggctgacaacaggaaagtccaggagcttcaaggcgagggaggaatccggcttccgaatggtgaacgccccttccactgtaaccagtgtggagcttcttttactcagaagggcaaccttctgagacacataaagttacactctggagagaagccgttcaaatgtcctttctgtagctacgcctgtagaagaagggacgccctcacaggacacctcaggacccattctgtacctcctatggaagattgtaaggaacaagagcctattatggacaacaatatttctctggtgccttttgagagacctgctgtcatagagaagctcacggggaatatgggaaaacgtaaaagctccactccacaaaagtttgtgggggaaaagctcatgcgattcagctacccagatattcactttgatatgaacttaacatatgagaaggaggctgagctgatgcagtctcatatgatggaccaagccatcaacaatgcaatcacctaccttggagctgaggcccttcaccctctgatgcagcacccgccaagcacaatcgctgaagtggccccagttataagctcagcttattctcaggtctatcatccaaataggatagaaagacccattagcagggaaactgctgatagtcatgaaaacaacatggatggccccatctctctcatcagaccaaagagtcgaccccaggaaagagaggcctctcccagcaatagctgcctggattccactgactcagaaagcagccatgatgaccaccagtcctaccaaggacaccctgccttaaatcccaagaggaaacaaagcccagcttacatgaaggaggatgtcaaagctttggatactaccaaggctcctaagggctctctgaaggacatctacaaggtcttcaatggagaaggagaacagattagggccttcaagtgtgagcactgccgagtccttttcctagaccatgtcatgtacaccattcacatgggttgccatggctaccgggacccactggaatgcaacatctgtggctacagaagccaggaccgttatgagttttcatcacacattgttcgaggggagcacacattccactag

SEQ ID NO: 35537 - DNA, 1503 bp, Artificial Sequence
  derived and/or modified sequence
atggaaactgaagcaatcgacggctatataacatgtgacaatgaactgtccccagaaagagaacatagtaacatggcgattgacctgactagctccactcctaacggtcaacacgcatccccctcccatatgacctccaccaactctgtcaagctggagatgcagtccgacgaggaatgcgatcgcaagcctctgtcccgcgaagatgagatcaggggacacgacgagggaagttctctagaggaaccactgatcgagtcttccgaggtggcggataacaggaaagtgcaagagctccaaggcgaaggggggattagactgcccaacggcgagagaccatttcattgcaatcaatgtggcgcgtcttttacacagaaagggaacctcttgcggcacattaagctacattccggcgagaagcctttcaaatgtcccttctgcagttatgcctgccgtcggcgcgatgcactgaccggacacctcaggactcacagtgtgggcaaaccacacaagtgtaattactgtgggcgtagctataagcagagatcttcactcgaagaacataaggaacgttgtcataattatctccagaatgtctctatggaggccgctggacaggttatgtcacaccatgtgccaccaatggaagactgtaaagagcaggaaccaatcatggataataacatttcattggtcccgtttgagcgcccggccgtgattgaaaaattaacggggaatatggggaagaggaaatcaagtacgccacagaaattcgttggcgagaagctgatgcgattcagttaccccgacattcacttcgacatgaacctgacctacgagaaagaagccgaacttatgcagagccatatgatggaccaagccatcaacaacgctattacctacctaggagccgaggcacttcacccgttgatgcaacatccaccatcaacgattgcagaggtggctcccgtgatcagctcagcttactcccaggtataccacccaaatagaattgagagacccatttcgagagagaccgccgacagccatgagaacaacatggatggcccaatcagcttgattcgccctaagtctcggccccaggagagggaggcgtctcccagtaattcatgcctggactctaccgatagtgagagctcacatgatgaccaccagagctatcaaggtcaccccgctttgaaccctaaaagaaagcagtcccctgcgtatatgaaggaagatgtgaaagcactggataccaccaaggcaccgaagggctcgctaaaggacatctataaagtcttcaatggtgagggcgagcagattcgagcgtttaagtgcgagcactgtcgcgttttatttctggaccatgtgatgtatacaatacatatgggctgccatggttatcgggaccctttggaatgtaacatctgcgggtaccggtcccaggatcgttacgaattctcatctcacattgtgcggggagaacacacgtttcactag

SEQ ID NO: 35538 - DNA, 1365 bp, Artificial Sequence
  derived and/or modified sequence
atggagactgaagcaatagatggatatattacctgtgacaatgagcttagcccggagagagagcatagcaatatggccatcgacctgacgagctctacccccaatggacagcatgcatcacccagtcatatgaccagtaccaactccgtcaagctggagatgcaaagcgacgaggaatgtgatagaaagcctttgtctcgagaagacgaaattcgaggacacgacgaagggtcttcgctagaagagccattaattgagagttctgaggtcgcggacaatcgcaaggttcaggaattacagggggagggtggcatccgtctccctaatggtgaacggccatttcattgtaaccagtgcggcgcctcatttacacagaaaggaaatctgctgagacatattaagctccactcaggcgaaaaaccctttaaatgtccattctgctcctatgcctgccgtagacgcgacgcgctaacaggccatcttcgaacccacagtgttccccctatggaagattgtaaggaacaggaaccaattatggacaacaacatttcgctggtcccctttgaaagacccgctgttatcgagaaattaactggaaacatgggaaaaaggaaatcgtccactccacagaagttcgtgggcgaaaaactgatgagatttagctatccagacatacattttgatatgaatctcacctacgaaaaggaggcggagcttatgcagtcccatatgatggatcaggcgattaataacgcaattacatatttaggcgcagaggctcttcaccccctgatgcagcaccctccttccacaattgccgaggtcgcgcccgttatttcttccgcttattcacaggtctaccaccctaatcgcattgagaggccaatctcccgtgagaccgctgacagtcatgaaaataatatggatgggccaatatcactgatacggccaaaatctcggccgcaggagcgggaagcttcaccttcaaacagttgccttgactctaccgattccgagagcagccacgatgatcaccagagctatcagggacaccctgcactgaatcctaagcgtaagcaatctcctgcctacatgaaagaggacgtgaaagccctcgacacaactaaggctccaaaaggcagcctgaaagacatctacaaggttttcaacggagagggtgagcagattcgcgctttcaagtgtgaacactgccgcgtcctgtttctcgatcatgtgatgtacactatacatatgggatgtcacggatatcgcgatccactcgagtgtaacatttgtggctatagaagccaggatcgatacgaattctcttcacacattgtcaggggcgagcacacctttcactag

SEQ ID NO: 35539 - DNA, 1503 bp, Artificial Sequence
  derived and/or modified sequence
atggagacagaggccattgatggctacatcacctgtgacaatgagctgagccctgagcgggagcacagcaacatggccatcgacctgaccagcagcaccccaaatggccagcacgccagccccagccacatgaccagcaccaacagcgtgaagctggagatgcagagtgatgaagaatgtgacaggaagcccctgagccgggaggatgagatccggggccatgatgagggcagcagcctggaggagcccctgattgagagcagcgaggtggccgacaacaggaaggtgcaggagctgcagggcgagggcggcatccggctgcccaatggagagcggcccttccactgcaaccagtgtggggccagcttcacccagaagggcaacctgctgcggcacatcaagctgcacagcggggagaagcccttcaagtgccccttctgcagctatgcctgcagaagaagagatgccctgaccggccacctgcggacccacagcgtgggcaagccccacaagtgcaactactgcggccgcagctacaagcagaggagcagcctggaggagcacaaggagcgctgccacaactacctgcagaatgtgtccatggaggccgccggccaggtgatgagccaccacgtgccccccatggaggactgcaaggagcaggagcccatcatggacaacaacatcagcctggtgccctttgagaggcctgctgtgattgagaagctgaccggcaacatgggcaagaggaagagcagcaccccccagaagtttgtgggggagaagctgatgaggttctcctacccagacatccactttgacatgaacctgacctatgagaaggaggccgagctgatgcagagccacatgatggaccaggccatcaacaatgccatcacctacctgggcgctgaggccctgcaccccctgatgcagcacccccccagcaccatcgccgaggtggcccctgtgatcagcagcgcctacagccaggtgtaccaccccaaccgcatcgagcggcccatcagccgggagacagctgacagccatgagaacaacatggatggccccatcagcctcatccggcccaagagccggccccaggagcgggaggccagccccagcaacagctgcctggacagcacagacagcgagagcagccatgatgaccaccagagctaccagggccacccagccctgaaccccaagaggaagcagagccctgcctacatgaaggaggatgtgaaggccctggacaccaccaaggcccccaagggcagcctgaaggacatctacaaggtgttcaacggggagggggagcagatccgggccttcaagtgtgagcactgccgggtgctcttcctggaccacgtgatgtacaccatccacatgggctgccacggctacagagaccccctggagtgcaacatctgtggctaccgcagccaggacagatatgagttcagcagccacatcgtgcggggggagcacaccttccactag

SEQ ID NO: 35540 - DNA, 1365 bp, Artificial Sequence
  derived and/or modified sequence
atggagacagaggccattgatggctacatcacctgtgacaatgagctgagccctgagcgggagcacagcaacatggccatcgacctgaccagcagcaccccaaatggccagcacgccagccccagccacatgaccagcaccaacagcgtgaagctggagatgcagagtgatgaagaatgtgacaggaagcccctgagccgggaggatgagatccggggccatgatgagggcagcagcctggaggagcccctgattgagagcagcgaggtggccgacaacaggaaggtgcaggagctgcagggcgagggcggcatccggctgcccaatggagagcggcccttccactgcaaccagtgtggggccagcttcacccagaagggcaacctgctgcggcacatcaagctgcacagcggggagaagcccttcaagtgccccttctgcagctatgcctgcagaagaagagatgccctgaccggccacctgcggacccacagcgtgccccccatggaggactgcaaggagcaggagcccatcatggacaacaacatcagcctggtgccctttgagaggcctgctgtgattgagaagctgaccggcaacatgggcaagaggaagagcagcaccccccagaagtttgtgggggagaagctgatgaggttctcctacccagacatccactttgacatgaacctgacctatgagaaggaggccgagctgatgcagagccacatgatggaccaggccatcaacaatgccatcacctacctgggcgctgaggccctgcaccccctgatgcagcacccccccagcaccatcgccgaggtggcccctgtgatcagcagcgcctacagccaggtgtaccaccccaaccgcatcgagcggcccatcagccgggagacagctgacagccatgagaacaacatggatggccccatcagcctcatccggcccaagagccggccccaggagcgggaggccagccccagcaacagctgcctggacagcacagacagcgagagcagccatgatgaccaccagagctaccagggccacccagccctgaaccccaagaggaagcagagccctgcctacatgaaggaggatgtgaaggccctggacaccaccaaggcccccaagggcagcctgaaggacatctacaaggtgttcaacggggagggggagcagatccgggccttcaagtgtgagcactgccgggtgctcttcctggaccacgtgatgtacaccatccacatgggctgccacggctacagagaccccctggagtgcaacatctgtggctaccgcagccaggacagatatgagttcagcagccacatcgtgcggggggagcacaccttccactag

SEQ ID NO: 35541 - DNA, 1503 bp, Artificial Sequence
  derived and/or modified sequence
atggagaccgaggccatcgacggctacatcacctgcgacaacgagttatcgccagaaagagagcactctaatatggcaattgacctcacctctagcacacctaatggacagcacgcttccccctcgcatatgacttcaactaatagcgttaaactggaaatgcagtccgacgaagagtgtgaccggaaaccattgtcacgcgaggacgaaatccgcggccacgacgagggctcatcactggaagaacccctgatcgagtcctccgaagtcgctgacaatcgcaaggtccaggagctgcaaggggagggtggtataagactcccaaacggagagagaccattccattgtaatcagtgtggagcttcctttacccagaaagggaacctgctgcgccatattaaactgcacagcggagaaaagccttttaaatgtccattctgtagttatgcttgtcggcgtcgtgacgcactaacaggtcatctgcgcacccactctgtcggcaagcctcataaatgcaactattgtggaagaagttacaaacagcgctcaagcttggaggagcataaagaacgctgccacaactatctccagaacgtgtccatggaggctgctggacaggtgatgagccatcatgttcccccgatggaagactgtaaagaacaagaaccaatcatggataacaacattagccttgtacccttcgagaggcccgcagtcattgagaaactcaccggaaacatgggcaaaaggaaatcttcaaccccacagaagtttgtgggagagaagctcatgagattttcatacccagacattcattttgatatgaatctgacgtacgaaaaggaggccgagttaatgcagagccatatgatggatcaggcaatcaataatgctataacatatctgggcgcagaagccctccatccattgatgcagcacccgccttccactatcgccgaggtggccccagttatctcctccgcgtatagccaggtttatcatcctaatcggatcgagcgacccatcagccgtgaaacagcagactcacacgagaacaatatggacggcccaatctctcttatccgacccaagagccggccccaggagagagaggcttccccttccaacagctgtcttgattctactgattctgagtccagtcacgacgatcaccagtcctatcaggggcacccggctctgaaccccaaaagaaaacagtcacctgcttatatgaaggaggacgtgaaagccttggataccaccaaggccccaaaaggtagcctgaaggatatttacaaggtgtttaatggtgaaggggagcaaatccgagccttcaagtgcgaacactgccgggtgctgtttctggatcacgttatgtacacaattcatatgggttgtcacggttacagagatccattagagtgcaatatctgcggatatcgttcccaggacaggtatgagttttcgagccatattgtccggggcgaacacacctttcattag

SEQ ID NO: 35542 - DNA, 1365 bp, Artificial Sequence
  derived and/or modified sequence
atggagaccgaggccatcgacggctacatcacctgcgacaacgagttgtcgcccgaacgcgaacacagtaatatggcaatcgatctgacctcatccactcctaatggtcagcatgcatcacccagccacatgacttccacaaatagcgtcaaattggaaatgcagtctgatgaagagtgcgaccgcaaacctctcagtagggaggacgaaatccggggccacgacgagggatccagcttagaggaaccccttatcgagtccagcgaggtggctgacaaccgaaaagtccaagagcttcaaggggaaggcggtatacgccttcccaacggggaacggcccttccactgcaaccagtgtggagctagttttactcagaagggaaacctgctgcgccacattaaactacactcaggcgagaaaccatttaagtgccctttttgttcttacgcatgccgcagacgggacgctctaacaggccacctgcgcacgcacagtgttcctcccatggaggactgtaaggagcaagagccaatcatggataataacatcagtctcgtcccttttgagagacccgccgtcattgagaagcttacgggaaatatgggtaagcgaaagtccagcacgccccagaaattcgtgggcgagaagctgatgaggtttagctaccccgacatccatttcgacatgaacctgacctacgaaaaggaagccgaactcatgcagtctcacatgatggaccaggccattaataatgcaatcacatatctcggcgccgaggctctccaccctctcatgcagcacccacctagcacaatcgccgaagtggcgcccgtcatctcgagcgcctactctcaggtctaccaccccaatcgcattgaacgaccgataagtcgggaaacggccgactcccacgagaacaatatggacggccccatcagcctgatccgcccaaagtctcgtccccaagagcgggaggcctctccctccaactcctgcctggatagcaccgacagcgaaagcagccatgatgatcaccaatcgtaccagggccatccagccttaaatcccaaaaggaaacagtctcctgcttacatgaaggaggatgttaaagcactggacacgactaaagccccaaagggatccctcaaggatatttacaaggtattcaatggcgagggcgaacagattcgggcttttaagtgtgaacactgcagagtactattcctggaccacgtgatgtatactattcatatgggttgccacggctatcgggaccccctggagtgcaacatctgtggatacaggtctcaggaccgctatgagttcagcagccatatcgtgcggggggaacacacttttcactag

SEQ ID NO: 35543 - DNA, 1503 bp, Artificial Sequence
  derived and/or modified sequence
atggaaactgaagcaattgacggctacatcacctgtgacaacgagttgtcccctgagcgggaacactctaatatggccatagacttgacatcctccacgcccaatggacagcacgcttctccaagtcatatgacttctacgaactctgttaagctggagatgcagagcgacgaagaatgcgaccgaaaaccactgtcaagagaggacgaaatacgcggacatgacgaaggctcaagcctggaagaacctctgattgagtcctctgaagtcgcagacaatagaaaagtgcaggagctacaaggggaaggtggaattcgactgccaaatggcgagagaccctttcattgcaaccagtgcggagcctcattcacccagaagggtaatctgctgcgccatatcaaattacactcaggggaaaaaccgtttaaatgcccattctgttcatatgcttgccgcaggagagatgctttaaccgggcaccttaggactcactctgtggggaaaccacacaagtgcaactactgtgggagatcgtacaaacaacgcagcagtttggaggaacataaggagagatgccacaattacttacaaaatgtatcaatggaggctgcaggacaggtcatgtcccaccatgtcccccctatggaagactgtaaggagcaggagccaatcatggacaacaacatcagtctcgtcccattcgaaagacccgcagtaattgaaaaactgaccggcaatatgggtaaacggaagtcctcaacacctcaaaagttcgttggtgagaaactgatgcgcttctcctaccccgatatacacttcgacatgaatctcacgtacgagaaggaagctgaactcatgcagagccacatgatggatcaggccataaataatgcaattacctatctgggggcagaggcactacatccccttatgcagcatcctccttctactatagccgaggtggcccctgtgatatcgtccgcgtacagtcaggtttatcacccaaaccgtatcgagcgacccatctcacgcgagacagcagactcccatgagaataacatggacggcccaatcagccttattagaccaaaatcacgtccccaggaaagagaggcctccccgtccaattcctgcctcgactccaccgattccgaatcatcacatgatgatcaccagagctaccagggtcacccggcattaaatcctaaacgcaagcagtctccagcctacatgaaagaggacgtcaaagccctagataccaccaaggccccaaagggaagtctcaaggacatttataaagtatttaacggtgagggagagcagattcgggcattcaagtgtgagcattgtcgagtcttattccttgatcatgtcatgtatacaattcatatgggatgccacggctatcgagaccccctggaatgcaatatatgcggctaccgctcccaggaccggtacgagttttcgagtcatatagtcagaggcgagcacactttccattag

SEQ ID NO: 35544 - DNA, 1365 bp, Artificial Sequence
  derived and/or modified sequence
atggagacagaagcgatcgatgggtatattacctgtgacaacgaattgagtcctgagcgagaacactccaatatggccattgacctgaccagctccacgccaaacgggcagcatgctagcccctctcatatgaccagcaccaatagcgtcaagctggaaatgcaatctgacgaagagtgtgatcggaagcccctctcccgggaggacgagattcgtggccacgatgagggaagcagtcttgaagagccactgatcgagtcatccgaagtggcggacaatcgaaaggttcaggagctccagggtgagggagggataagactcccaaatggcgaaagacctttccattgcaaccagtgcggggctagttttacgcagaagggaaacttgttacgtcatattaagcttcactcaggcgagaagccgttcaagtgtcctttttgttcctatgcttgccgacggagggacgccctgacaggtcatctgagaacgcattccgtgcctcctatggaagattgcaaagagcaggagcccatcatggataacaatatttccctggtgcccttcgagcgaccagccgtgattgaaaagctgactggaaatatgggaaagcgcaagtctagcactccacagaaatttgtgggcgaaaagctcatgcgattctcctaccccgatatccacttcgatatgaacctaacttacgagaaagaggcggagctgatgcagtctcacatgatggaccaggcaatcaacaacgccattacctatctgggtgcagaggccctgcaccctctgatgcaacatcctccctcgacaatcgcagaagttgcgcctgtgataagcagtgcctacagccaggtgtaccatccgaaccgaattgagagaccaatttcgcgagaaactgccgattcccacgagaataacatggacggcccaatttccctaatccgcccaaaaagtaggccacaggagcgagaggccagtccgagcaattcctgtctcgattctacagattctgaaagctcccatgatgatcaccagtcttatcaggggcaccctgcgcttaaccctaaacgaaaacagtcacctgcttatatgaaggaggatgtgaaggccctcgataccactaaggcacccaagggctccctgaaggatatttataaagtgttcaatggagaaggagagcagatccgggcattcaagtgcgagcattgtcgagtgttgttccttgatcatgtgatgtacaccattcacatggggtgtcatgggtacagagatcccctggaatgcaatatatgcggatatagatcccaggatcgttacgagttttcctcacacatagtcaggggggagcataccttccactag

SEQ ID NO: 35545 - DNA, 1503 bp, Artificial Sequence
  derived and/or modified sequence
atggagaccgaggccatcgacggctacatcacctgcgacaacgagctgagccccgagagagagcacagcaacatggccatcgacctgaccagcagcacccccaacggccagcacgccagccccagccacatgaccagcaccaacagcgtgaagctggagatgcagagcgacgaggagtgcgacagaaagcccctgagcagagaggacgagatcagaggccacgacgagggcagcagcctggaggagcccctgatcgagagcagcgaggtggccgacaacagaaaggtgcaggagctgcagggcgagggcggcatcagactgcccaacggcgagagacccttccactgcaaccagtgcggcgccagcttcacccagaagggcaacctgctgagacacatcaagctgcacagcggcgagaagcccttcaagtgccccttctgcagctacgcctgcagaagaagagacgccctgaccggccacctgagaacccacagcgtgggcaagccccacaagtgcaactactgcggcagaagctacaagcagagaagcagcctggaggagcacaaggagagatgccacaactacctgcagaacgtgagcatggaggccgccggccaggtgatgagccaccacgtgccccccatggaggactgcaaggagcaggagcccatcatggacaacaacatcagcctggtgcccttcgagagacccgccgtgatcgagaagctgaccggcaacatgggcaagagaaagagcagcaccccccagaagttcgtgggcgagaagctgatgagattcagctaccccgacatccacttcgacatgaacctgacctacgagaaggaggccgagctgatgcagagccacatgatggaccaggccatcaacaacgccatcacctacctgggcgccgaggccctgcaccccctgatgcagcacccccccagcaccatcgccgaggtggcccccgtgatcagcagcgcctacagccaggtgtaccaccccaacagaatcgagagacccatcagcagagagaccgccgacagccacgagaacaacatggacggccccatcagcctgatcagacccaagagcagaccccaggagagagaggccagccccagcaacagctgcctggacagcaccgacagcgagagcagccacgacgaccaccagagctaccagggccaccccgccctgaaccccaagagaaagcagagccccgcctacatgaaggaggacgtgaaggccctggacaccaccaaggcccccaagggcagcctgaaggacatctacaaggtgttcaacggcgagggcgagcagatcagagccttcaagtgcgagcactgcagagtgctgttcctggaccacgtgatgtacaccatccacatgggctgccacggctacagagaccccctggagtgcaacatctgcggctacagaagccaggacagatacgagttcagcagccacatcgtgagaggcgagcacaccttccactag

SEQ ID NO: 35546 - DNA, 1365 bp, Artificial Sequence
  derived and/or modified sequence
atggagaccgaggccatcgacggctacatcacctgcgacaacgagctgagccccgagagagagcacagcaacatggccatcgacctgaccagcagcacccccaacggccagcacgccagccccagccacatgaccagcaccaacagcgtgaagctggagatgcagagcgacgaggagtgcgacagaaagcccctgagcagagaggacgagatcagaggccacgacgagggcagcagcctggaggagcccctgatcgagagcagcgaggtggccgacaacagaaaggtgcaggagctgcagggcgagggcggcatcagactgcccaacggcgagagacccttccactgcaaccagtgcggcgccagcttcacccagaagggcaacctgctgagacacatcaagctgcacagcggcgagaagcccttcaagtgccccttctgcagctacgcctgcagaagaagagacgccctgaccggccacctgagaacccacagcgtgccccccatggaggactgcaaggagcaggagcccatcatggacaacaacatcagcctggtgcccttcgagagacccgccgtgatcgagaagctgaccggcaacatgggcaagagaaagagcagcaccccccagaagttcgtgggcgagaagctgatgagattcagctaccccgacatccacttcgacatgaacctgacctacgagaaggaggccgagctgatgcagagccacatgatggaccaggccatcaacaacgccatcacctacctgggcgccgaggccctgcaccccctgatgcagcacccccccagcaccatcgccgaggtggcccccgtgatcagcagcgcctacagccaggtgtaccaccccaacagaatcgagagacccatcagcagagagaccgccgacagccacgagaacaacatggacggccccatcagcctgatcagacccaagagcagaccccaggagagagaggccagccccagcaacagctgcctggacagcaccgacagcgagagcagccacgacgaccaccagagctaccagggccaccccgccctgaaccccaagagaaagcagagccccgcctacatgaaggaggacgtgaaggccctggacaccaccaaggcccccaagggcagcctgaaggacatctacaaggtgttcaacggcgagggcgagcagatcagagccttcaagtgcgagcactgcagagtgctgttcctggaccacgtgatgtacaccatccacatgggctgccacggctacagagaccccctggagtgcaacatctgcggctacagaagccaggacagatacgagttcagcagccacatcgtgagaggcgagcacaccttccactag

SEQ ID NO: 35547 - protein, 99 aa, Artificial Sequence
  derived and/or modified sequence
MAAPAEPCAGQGVWNQTEPEPAATSLLSLCFLRTAGVWVPPMYLWVLGPIYLLFIHHHGRGYLRMSPLFKAKMVAAIPGSLEPGNVRGRQGTGWNLVKS

SEQ ID NO: 35548 - DNA, 300 bp, Artificial Sequence
  derived and/or modified sequence
atggcagcgccagccgagccttgcgctggacagggcgtctggaatcagacagaaccagagccggccgccaccagccttctatccctttgcttcctgcggaccgcgggggtgtgggtgccccccatgtatctgtgggttctgggacccatttatttactgttcatccatcaccacgggaggggctatctgcggatgagccctctgttcaaagcgaaaatggtcgcggccatccctggcagtcttgagcccggaaacgtgcggggcaggcagggaaccggatggaacctggtaaagtcctag

SEQ ID NO: 35549 - DNA, 300 bp, Artificial Sequence
  derived and/or modified sequence
atggccgccccagctgagccctgtgccggccagggcgtgtggaaccagacagagcctgagcctgctgccaccagcctgctgagcctgtgcttcctgaggacagctggggtgtgggtgccccccatgtacctgtgggtgctgggccccatctacctgctcttcatccaccaccacggccggggctacctgaggatgagccccctcttcaaggccaagatggtggccgccatccctggcagcctggagcctggaaatgtgcggggccggcagggcaccggctggaacctggtgaagagctag

SEQ ID NO: 35550 - DNA, 300 bp, Artificial Sequence
  derived and/or modified sequence
atggccgcccccgccgagccctgcgccggccagggcgtgtggaaccaaacagaacctgagccggccgctacgtctttgctgagcctctgcttcctgcggacagccggggtgtgggtcccccccatgtacctgtgggtgctaggtcccatctacctactgttcatccatcaccacggcaggggttacttgcggatgtctcccctgtttaaagccaaaatggtagctgccattccaggctccctggaaccagggaatgtcagaggcaggcaaggcactggctggaacttagtaaaaagctag

SEQ ID NO: 35551 - DNA, 300 bp, Artificial Sequence
  derived and/or modified sequence
atggccgcaccagccgaaccttgcgccggacagggcgtctggaaccaaactgaacccgaacccgctgcaacctcactgcttagcctgtgctttttaaggactgctggagtgtgggtgcctccaatgtacctgtgggtcctggggcctatttacctgctgttcatccaccaccatggaagaggatatctcagaatgagccccctgtttaaggcaaaaatggtagctgcgatcccaggtagcctagagcctggcaacgttcggggaaggcagggtacaggatggaatttggtgaaaagctag

SEQ ID NO: 35552 - DNA, 714 bp, Artificial Sequence
  derived and/or modified sequence
agacgctgggacccacgacgacagaaggcgccgatggccgcgcctgctgagccctgcgcggggcagggggtctggaaccagacagagcctgaacctgccgccaccagcctgctgagcctgtgcttcctgagaacagcaggggtctgggtaccccccatgtacctctgggtccttggtcccatctacctcctcttcatccaccaccatggccggggctacctccggatgtccccactcttcaaagccaagatggtagctgccatccctgggagcctggaaccaggcaatgttcgggggaggcaggggacaggctggaacctggtgaagtcttaaagtagactcctcctatcggggtgtagaagggaatctgttaatcaaacagagcaatattagaaaggctacagaggtcaactcagtggaacacggttctcccaaacagattttgtaattccgaaaatccacgcatgcgcaaacatacgcatacactcccatgttcctggacagtttatagctaccataacctggcattttccaaaacataccatgtagactcttggatacacaaggtaattttagagccacattaggatgaaccttttaaaaagttatgcatttatttttatgttcccccactggctgtattataggacaatttttatatgtgatatgtatttaccttagtgtgttaaataaacactggcattccaagtgtga

SEQ ID NO: 35553 - DNA, 300 bp, Artificial Sequence
  derived and/or modified sequence
atggccgcccccgccgagccctgcgccggccagggcgtgtggaaccagaccgagcccgagcccgccgccaccagcctgctgagcctgtgcttcctgagaaccgccggcgtgtgggtgccccccatgtacctgtgggtgctgggccccatctacctgctgttcatccaccaccacggcagaggctacctgagaatgagccccctgttcaaggccaagatggtggccgccatccccggcagcctggagcccggcaacgtgagaggcagacagggcaccggctggaacctggtgaagagctag

SEQ ID NO: 35554 - protein, 223 aa, Artificial Sequence
  derived and/or modified sequence
MTWRHHVRLLFTVSLALQIINLGNSYQREKHNGGREEVTKVATQKHRQSPLNWTSSHFGEVTGSAEGWGPEEPLPYSWAFGEGASARPRCCRNGGTCVLGSFCVCPAHFTGRYCEHDQRRSECGALEHGAWTLRACHLCRCIFGALHCLPLQTPDRCDPKDFLASHAHGPSAGGAPSLLLLLPCALLHRLLRPDAPAHPRSLVPSVLQRERRPCGRPGLGHRL

SEQ ID NO: 35555 - DNA, 672 bp, Artificial Sequence
  derived and/or modified sequence
atgacatggagacatcacgtccggcttctgttcacagtctccctcgccctccagattattaatcttggcaactcctatcagagggaaaaacacaacggtgggagggaagaagtgaccaaggtggccacccagaaacatagacaatcgccattgaattggacatcaagccactttggggaggtgacaggctcagccgaaggttggggccctgaagaacccttgccctatagctgggcttttggcgaaggtgcatctgctaggccacggtgttgccggaatggaggaacttgtgtgttaggatcattttgtgtgtgtccagctcactttaccggccgatattgtgagcacgatcagcggaggagcgagtgcggggcattagagcacggcgcttggaccttgagggcatgccacctctgtaggtgcattttcggagccctgcactgcctgccactccaaacacctgatcgatgtgaccccaaagactttctagcgtcccacgcccatggcccttcagccggaggagctcccagccttctcctgctgcttccctgtgctctgctgcatagactactccgtccagacgcaccggctcacccgagatctctggtgcccagcgtactgcagagagagaggaggccctgtgggcgacccggtctgggacaccgactgtag

SEQ ID NO: 35556 - DNA, 672 bp, Artificial Sequence
  derived and/or modified sequence
atgacatggagacaccatgtacgactcctctttactgtgtctttggcactacaaatcatcaatcttggaaatagctatcagagagaaaaacataacgggggacgggaagaggtcaccaaagtggctactcaaaagcataggcaatcccctctgaactggacctcaagtcacttcggcgaggtaacaggatctgctgagggctggggcccagaagaacccctcccatactcttgggcgttcggagagggtgcatcagcaagacccagatgttgcaggaatgggggtacgtgcgtcctgggcagcttttgcgtttgtcctgctcacttcactggtaggtactgcgagcacgatcagagaagatccgagtgcggagccctagagcatggggcgtggacacttcgagcctgccatctctgtagatgcatctttggagctctgcactgtctgcctctacaaacaccagaccgctgcgacccgaaggatttcttagcgtctcacgcccatggaccctctgccggcggcgcaccctcactgctgctcctccttccttgtgctcttttgcatcgcttgcttagaccagacgctcccgcccatccacggtccctggtgccctctgttctgcaaagggaaagaagaccctgcggaaggccggggctcggccaccgtctgtag

SEQ ID NO: 35557 - DNA, 672 bp, Artificial Sequence
  derived and/or modified sequence
atgacatggagacaccacgtacgtctgttattcacagtctccctcgctcttcagattattaacctgggcaatagttatcagagagaaaagcacaacgggggaagagaagaagtcaccaaggttgccacccagaagcaccggcagtctccattaaattggacctctagccactttggcgaggtcactggctctgccgaaggttggggacctgaagaaccactaccctattcgtgggccttcggagagggcgcgagtgctaggccccggtgttgtagaaatggcggtacttgcgtgttaggcagcttctgcgtatgtccagctcactttacaggcagatactgcgaacatgaccagagacgctcagagtgtggtgcgctagagcatggcgcatggaccctgcgcgcctgccatctgtgcagatgtatcttcggagcccttcattgtctgccactgcaaaccccggatagatgcgaccccaaagactttctagcctcccatgctcatggccccagcgcaggcggcgctccttcccttttgctcttgttgccttgtgctctccttcacaggcttcttcgccccgacgctcctgctcatccacgttccctagtaccttcagtactccagcgagaaagacggccatgcggtcgcccaggccttggacatagactgtag

SEQ ID NO: 35558 - DNA, 1071 bp, Artificial Sequence
  derived and/or modified sequence
agtccccaccccccagccaggtctcatagagggaattgttcttcaggctcggaggggcctgcctgtcactgcgcccccgaccctagctcagggactgcagaactcaagataccatcccgtttctcctggctgaggaagggaagggaacatccacatcttctgtactcgtccattctgtgtccccggggcctggagtaaagacaccttcaaatgcagagactcttcagattcagctttcctggaaactgatcttcaatgcactaagagaaggagactctcaaaccaaaaatgacctggaggcaccatgtcaggcttctgtttacggtcagtttggcattacagatcatcaatttgggaaacagctatcaaagagagaaacataacggcggtagagaggaagtcaccaaggttgccactcagaagcaccgacagtcaccgctcaactggacctccagtcatttcggagaggtgactgggagcgccgagggctgggggccggaggagccgctcccatactcctgggctttcggagagggtgcgtccgcgcggccgcgctgctgcaggaacggcggtacctgcgtgctgggcagcttctgcgtgtgcccggcccacttcaccggccgctactgcgagcatgaccagaggcgcagtgaatgcggcgccctggagcacggagcctggaccctccgcgcctgccacctctgcaggtgcatcttcggggccctgcactgcctccccctccagacgcctgaccgctgtgacccgaaagacttcctggcctcccacgctcacgggccgagcgccgggggcgcgcccagcctgctactcttgctgccctgcgcactcctgcaccgcctcctgcgcccggatgcgcccgcgcaccctcggtccctggtcccttccgtcctccagcgggagcggcgcccctgcggaaggccgggacttgggcatcgcctttaattttctatgttgtaaataatagatgtgtttagtttaccgtaagctgaagcactgggtgaatatttttattgggtaataaatattttcatgaaagcgcctttggctccagat

SEQ ID NO: 35559 - DNA, 672 bp, Artificial Sequence
  derived and/or modified sequence
atgacctggagacaccacgtgagactgctgttcaccgtgagcctggccctgcagatcatcaacctgggcaacagctaccagagagagaagcacaacggcggcagagaggaggtgaccaaggtggccacccagaagcacagacagagccccctgaactggaccagcagccacttcggcgaggtgaccggcagcgccgagggctggggccccgaggagcccctgccctacagctgggccttcggcgagggcgccagcgccagacccagatgctgcagaaacggcggcacctgcgtgctgggcagcttctgcgtgtgccccgcccacttcaccggcagatactgcgagcacgaccagagaagaagcgagtgcggcgccctggagcacggcgcctggaccctgagagcctgccacctgtgcagatgcatcttcggcgccctgcactgcctgcccctgcagacccccgacagatgcgaccccaaggacttcctggccagccacgcccacggccccagcgccggcggcgcccccagcctgctgctgctgctgccctgcgccctgctgcacagactgctgagacccgacgcccccgcccaccccagaagcctggtgcccagcgtgctgcagagagagagaagaccctgcggcagacccggcctgggccacagactgtag

SEQ ID NO: 35560 - DNA, 672 bp, Artificial Sequence
  derived and/or modified sequence
atgacctggagacatcatgtgaggttactgttcactgtctccttggccctgcagattataaatctggggaacagttatcagagagagaagcataacggtggcagagaggaggtcaccaaagttgcgacgcaaaagcaccgccaatctccgctcaactggactagttcacattttggagaggtgacaggatcagccgagggatggggccccgaggagccacttccgtatagttgggcatttggggagggcgcctcggccagaccacggtgttgcagaaatggcggcacctgcgtcctgggctctttttgcgtatgtcccgctcattttacaggaagatattgtgagcacgaccagcgcaggtctgaatgcggcgcgctcgaacatggcgcctggaccctaagagcctgtcacctgtgccgctgcatatttggcgctctccattgtctgcccctacagacccctgaccgttgtgacccaaaggacttcctggccagccatgctcatggcccatcagctggtggcgctccttccctcctgttactcttgccctgcgcactgcttcaccggttgctaaggccggacgccccagcccacccacgctcgctggtgcccagtgtcctgcagcgggagcggcgcccttgcggaagacccggattgggacatcgactctag

SEQ ID NO: 35561 - DNA, 672 bp, Artificial Sequence
  derived and/or modified sequence
atgacctggaggcaccacgtgcggctgctcttcaccgtgtccctggccctgcagatcatcaacctgggcaacagctaccagcgggagaagcacaacggcggccgggaggaggtgaccaaggtggccacccagaagcaccggcagagccccctgaactggaccagcagccactttggagaggtgacaggcagcgctgagggctggggccctgaggagcccctgccctacagctgggccttcggggagggcgccagcgcccggccccgctgctgcagaaatggaggcacctgtgtgctgggcagcttctgtgtgtgcccagcccacttcaccggccgctactgtgaacatgaccagaggagaagtgaatgtggggccctggagcacggggcctggaccctgcgggcctgccacctgtgccgctgcatctttggagccctgcactgcctgcccctgcagaccccagacagatgtgaccccaaggacttcctggccagccacgcccacggccccagcgctgggggcgcccccagcctgctgctgctgctgccctgtgccctgctgcaccggctgctgcggccagatgccccagcccaccccaggagcctggtgcccagcgtgctgcagcgggagcggcggccctgtggccggcccggcctgggccaccggctgtag

SEQ ID NO: 35562 - DNA, 672 bp, Artificial Sequence
  derived and/or modified sequence
atgacctggcggcaccacgtgcggctgctgttcaccgtgagcctggcacttcagattatcaacctgggcaattcttaccagagagaaaagcataatggaggtcgtgaagaggtaaccaaagtggctacccagaagcaccgccagtctcccctgaactggacctcgagccactttggggaagtgacaggttctgccgagggttggggtccggaggaacctctcccttatagctgggccttcggcgagggggcttcagcgagacctagatgctgtcggaatgggggaacttgcgtacttggttcattttgtgtgtgccctgctcatttcacaggccgctattgtgagcacgaccaacgacgctccgaatgtggagcccttgagcacggggcctggaccctgagagcttgccatctgtgtcgttgcatcttcggagctctacactgcctgcccttacaaacccctgatagatgcgaccctaaagattttcttgccagccatgctcatggcccctcagcaggtggcgccccctctctcctactccttcttccctgcgcgttgctccacagactccttagaccagacgcacctgctcacccacgcagcctggtgccaagtgtgttacagcgagagcgccggccctgtggaaggcccggattgggacacaggctctag

SEQ ID NO: 35563 - RNA, 672 nt, Artificial Sequence
  derived and/or modified sequence
augacauggagacaccauguacgacuccucuuuacugugucuuuggcacuacaaaucaucaaucuuggaaauagcuaucagagagaaaaacauaacgggggacgggaagaggucaccaaaguggcuacucaaaagcauaggcaauccccucugaacuggaccucaagucacuucggcgagguaacaggaucugcugagggcuggggcccagaagaaccccucccauacucuugggcguucggagagggugcaucagcaagacccagauguugcaggaauggggguacgugcguccugggcagcuuuugcguuuguccugcucacuucacugguagguacugcgagcacgaucagagaagauccgagugcggagcccuagagcauggggcguggacacuucgagccugccaucucuguagaugcaucuuuggagcucugcacugucugccucuacaaacaccagaccgcugcgacccgaaggauuucuuagcgucucacgcccauggacccucugccggcggcgcacccucacugcugcuccuccuuccuugugcucuuuugcaucgcuugcuuagaccagacgcucccgcccauccacggucccuggugcccucuguucugcaaagggaaagaagacccugcggaaggccggggcucggccaccgucuguag

SEQ ID NO: 35564 - RNA, 672 nt, Artificial Sequence
  derived and/or modified sequence
augacauggagacaccacguacgucuguuauucacagucucccucgcucuucagauuauuaaccugggcaauaguuaucagagagaaaagcacaacgggggaagagaagaagucaccaagguugccacccagaagcaccggcagucuccauuaaauuggaccucuagccacuuuggcgaggucacuggcucugccgaagguuggggaccugaagaaccacuacccuauucgugggccuucggagagggcgcgagugcuaggccccgguguuguagaaauggcgguacuugcguguuaggcagcuucugcguauguccagcucacuuuacaggcagauacugcgaacaugaccagagacgcucagaguguggugcgcuagagcauggcgcauggacccugcgcgccugccaucugugcagauguaucuucggagcccuucauugucugccacugcaaaccccggauagaugcgaccccaaagacuuucuagccucccaugcucauggccccagcgcaggcggcgcuccuucccuuuugcucuuguugccuugugcucuccuucacaggcuucuucgccccgacgcuccugcucauccacguucccuaguaccuucaguacuccagcgagaaagacggccaugcggucgcccaggccuuggacauagacuguag

SEQ ID NO: 35565 - protein, 170 aa, Artificial Sequence
  derived and/or modified sequence
MMNMSLPFLWSLLTLLIFAEVNGEAGELELQRQKRSINLQQPRMATERGNLVFLTGSAQNIEFRTGSLGKIKLNDEDLSECLHQIQKNKEDIIELKGSAIGLPQNISSQIYQLNSKLVDLERKFQGLQQTVDKKVCSSNPCQNGGTCLNLHDSFFCICPPQWKVSHLLFG

SEQ ID NO: 35566 - protein, 3623 aa, Artificial Sequence
  derived and/or modified sequence
MMNMSLPFLWSLLTLLIFAEVNGEAGELELQRQKRSINLQQPRMATERGNLVFLTGSAQNIEFRTGSLGKIKLNDEDLSECLHQIQKNKEDIIELKGSAIGLPQNISSQIYQLNSKLVDLERKFQGLQQTVDKKVCSSNPCQNGGTCLNLHDSFFCICPPQWKGPLCSADVNECEIYSGTPLSCQNGGTCVNTMGSYSCHCPPETYGPQCASKYDDCEGGSVARCVHGICEDLMREQAGEPKYSCVCDAGWMFSPNSPACTLDRDECSFQPGPCSTLVQCFNTQGSFYCGACPTGWQGNGYICEDINECEINNGGCSVAPPVECVNTPGSSHCQACPPGYQGDGRVCTLTDICSVSNGGCHPDASCSSTLGSLPLCTCLPGYTGNGYGPNGCVQLSNICLSHPCLNGQCIDTVSGYFCKCDSGWTGVNCTENINECLSNPCLNGGTCVDGVDSFSCECTRLWTGALCQVPQQVCGESLSGINGSFSYRSPDVGYVHDVNCFWVIKTEMGKVLRITFTFFRLESMDNCPHEFLQVYDGDSSSAFQLGRFCGSSLPHELLSSDNALYFHLYSEHLRNGRGFTVRWETQQPECGGILTGPYGSIKSPGYPGNYPPGRDCVWIVVTSPDLLVTFTFGTLSLEHHDDCNKDYLEIRDGPLYQDPLLGKFCTTFSVPPLQTTGPFARIHFHSDSQISDQGFHITYLTSPSDLRCGGNYTDPEGELFLPELSGPFTHTRQCVYMMKQPQGEQIQINFTHVELQCQSDSSQNYIEVRDGETLLGKVCGNGTISHIKSITNSVWIRFKIDASVEKASFRAVYQVACGDELTGEGVIRSPFFPNVYPGERTCRWTIHQPQSQVILLNFTVFEIGSSAHCETDYVEIGSSSILGSPENKKYCGTDIPSFITSVYNFLYVTFVKSSSTENHGFMAKFSAEDLACGEILTESTGTIQSPGHPNVYPHGINCTWHILVQPNHLIHLMFETFHLEFHYNCTNDYLEVYDTDSETSLGRYCGKSIPPSLTSSGNSLMLVFVTDSDLAYEGFLINYEAISAATACLQDYTDDLGTFTSPNFPNNYPNNWECIYRITVRTGQLIAVHFTNFSLEEAIGNYYTDFLEIRDGGYEKSPLLGIFYGSNLPPTIISHSNKLWLKFKSDQIDTRSGFSAYWDGSSTGCGGNLTTSSGTFISPNYPMPYYHSSECYWWLKSSHGSAFELEFKDFHLEHHPNCTLDYLAVYDGPSSNSHLLTQLCGDEKPPLIRSSGDSMFIKLRTDEGQQGRGFKAEYRQTCENVVIVNQTYGILESIGYPNPYSENQHCNWTIRATTGNTVNYTFLAFDLEHHINCSTDYLELYDGPRQMGRYCGVDLPPPGSTTSSKLQVLLLTDGVGRREKGFQMQWFVYGCGGELSGATGSFSSPGFPNRYPPNKECIWYIRTDPGSSIQLTIHDFDVEYHSRCNFDVLEIYGGPDFHSPRIAQLCTQRSPENPMQVSSTGNELAIRFKTDLSINGRGFNASWQAVTGGCGGIFQAPSGEIHSPNYPSPYRSNTDCSWVIRVDRNHRVLLNFTDFDLEPQDSCIMAYDGLSSTMSRLARTCGREQLANPIVSSGNSLFLRFQSGPSRQNRGFRAQFRQACGGHILTSSFDTVSSPRFPANYPNNQNCSWIIQAQPPLNHITLSFTHFELERSTTCARDFVEILDGGHEDAPLRGRYCGTDMPHPITSFSSALTLRFVSDSSISAGGFHTTVTASVSACGGTFYMAEGIFNSPGYPDIYPPNVECVWNIVSSPGNRLQLSFISFQLEDSQDCSRDFVEIREGNATGHLVGRYCGNSFPLNYSSIVGHTLWVRFISDGSGSGTGFQATFMKIFGNDNIVGTHGKVASPFWPENYPHNSNYQWTVNVNASHVVHGRILEMDIEEIQNCYYDKLRIYDGPSIHARLIGAYCGTQTESFSSTGNSLTFHFYSDSSISGKGFLLEWFAVDAPDGVLPTIAPGACGGFLRTGDAPVFLFSPGWPDSYSNRVDCTWLIQAPDSTVELNILSLDIESHRTCAYDSLVIRDGDNNLAQQLAVLCGREIPGPIRSTGEYMFIRFTSDSSVTRAGFNASFHKSCGGYLHADRGIITSPKYPETYPSNLNCSWHVLVQSGLTIAVHFEQPFQIPNGDSSCNQGDYLVLRNGPDICSPPLGPPGGNGHFCGSHASSTLFTSDNQMFVQFISDHSNEGQGFKIKYEAKSLACGGNVYIHDADSAGYVTSPNHPHNYPPHADCIWILAAPPETRIQLQFEDRFDIEVTPNCTSNYLELRDGVDSDAPILSKFCGTSLPSSQWSSGEVMYLRFRSDNSPTHVGFKAKYSIAQCGGRVPGQSGVVESIGHPTLPYRDNLFCEWHLQGLSGHYLTISFEDFNLQNSSGCEKDFVEIWDNHTSGNILGRYCGNTIPDSIDTSSNTAVVRFVTDGSVTASGFRLRFESSMEECGGDLQGSIGTFTSPNYPNPNPHGRICEWRITAPEGRRITLMFNNLRLATHPSCNNEHVIVFNGIRSNSPQLEKLCSSVNVSNEIKSSGNTMKVIFFTDGSRPYGGFTASYTSSEDAVCGGSLPNTPEGNFTSPGYDGVRNYSRNLNCEWTLSNPNQGNSSISIHFEDFYLESHQDCQFDVLEFRVGDADGPLMWRLCGPSKPTLPLVIPYSQVWIHFVTNERVEHIGFHAKYSFTDCGGIQIGDSGVITSPNYPNAYDSLTHCSSLLEAPQGHTITLTFSDFDIEPHTTCAWDSVTVRNGGSPESPIIGQYCGNSNPRTIQSGSNQLVVTFNSDHSLQGGGFYATWNTQTLGCGGIFHSDNGTIRSPHWPQNFPENSRCSWTAITHKSKHLEISFDNNFLIPSGDGQCQNSFVKVWAGTEEVDKALLATGCGNVAPGPVITPSNTFTAVFQSQEAPAQGFSASFVSRCGSNFTGPSGYIISPNYPKQYDNNMNCTYVIEANPLSVVLLTFVSFHLEARSAVTGSCVNDGVHIIRGYSVMSTPFATVCGDEMPAPLTIAGPVLLNFYSNEQITDFGFKFSYRIISCGGVFNFSSGIITSPAYSYADYPNDMHCLYTITVSDDKVIELKFSDFDVVPSTSCSHDYLAIYDGANTSDPLLGKFCGSKRPPNVKSSNNSMLLVFKTDSFQTAKGWKMSFRQTLGPQQGCGGYLTGSNNTFASPDSDSNGMYDKNLNCVWIIIAPVNKVIHLTFNTFALEAASTRQRCLYDYVKLYDGDSENANLAGTFCGSTVPAPFISSGNFLTVQFISDLTLEREGFNATYTIMDMPCGGTYNATWTPQNISSPNSSDPDVPFSICTWVIDSPPHQQVKITVWALQLTSQDCTQNYLQLQDSPQGHGNSRFQFCGRNASAVPVFYSSMSTAMVIFKSGVVNRNSRMSFTYQIADCNRDYHKAFGNLRSPGWPDNYDNDKDCTVTLTAPQNHTISLFFHSLGIENSVECRNDFLEVRNGSNSNSPLLGKYCGTLLPNPVFSQNNELYLRFKSDSVTSDRGYEIIWTSSPSGCGGTLYGDRGSFTSPGYPGTYPNNTYCEWVLVAPAGRLVTINFYFISIDDPGDCVQNYLTLYDGPNASSPSSGPYCGGDTSIAPFVASSNQVFIKFHADYARRPSAFRLTWDS

SEQ ID NO: 35567 - protein, 105 aa, Artificial Sequence
  derived and/or modified sequence
NSKLVDLERKFQGLQQTVDKKVCSSNPCQNGGTCLNLHDSFFCICPPQWKGPLCSADVNECEIYSGTPLSCQNGGTCVNTMGSYRNPCSNIPKEPEEGSRDWHRE

SEQ ID NO: 35568 - protein, 491 aa, Artificial Sequence
  derived and/or modified sequence
MLFPTSAQESSRGLPDANDLCLGLQSLSLTGWDRPWSTQDSDSSAQSSTHSVLSMLHNPLGNVLGKPPLSFLPLDPLGSDLVDKFPAPSVRGSRLDTRPILDSRSSSPSDSDTSGFSSGSDHLSDLISSLRISPPLPFLSLSGGGPRDPLKMGVGSRMDQEQAALAAVTPSPTSASKRWPGASVWPSWDLLEAPKDPFSIEREARLHRQAAAVNEATCTWSGQLPPRNYKNPIYSCKVFLGGVPWDITEAGLVNTFRVFGSLSVEWPGKDGKHPRCPPKGNMPKGYVYLVFELEKSVRSLLQACSHDPLSPDGLSEYYFKMSSRRMRCKEVQVIPWVLADSNFVRSPSQRLDPSRTVFVGALHGMLNAEALAAILNDLFGGVVYAGIDTDKHKYPIGSGRVTFNNQRSYLKAVSAAFVEIKTTKFTKKVQIDPYLEDSLCHICSSQPGPFFCRDQVCFKYFCRSCWHWRHSMEGLRHHSPLMRNQKNRDSS

SEQ ID NO: 35569 - DNA, 1476 bp, Artificial Sequence
  derived and/or modified sequence
atgctgttccccaccagcgcccaggagagcagcagaggcctgcccgacgccaacgacctgtgcctgggcctgcagagcctgagcctgaccggctgggacagaccctggagcacccaggacagcgacagcagcgcccagagcagcacccacagcgtgctgagcatgctgcacaaccccctgggcaacgtgctgggcaagccccccctgagcttcctgcccctggaccccctgggcagcgacctggtggacaagttccccgcccccagcgtgagaggcagcagactggacaccagacccatcctggacagcagaagcagcagccccagcgacagcgacaccagcggcttcagcagcggcagcgaccacctgagcgacctgatcagcagcctgagaatcagcccccccctgcccttcctgagcctgagcggcggcggccccagagaccccctgaagatgggcgtgggcagcagaatggaccaggagcaggccgccctggccgccgtgacccccagccccaccagcgccagcaagagatggcccggcgccagcgtgtggcccagctgggacctgctggaggcccccaaggaccccttcagcatcgagagagaggccagactgcacagacaggccgccgccgtgaacgaggccacctgcacctggagcggccagctgccccccagaaactacaagaaccccatctacagctgcaaggtgttcctgggcggcgtgccctgggacatcaccgaggccggcctggtgaacaccttcagagtgttcggcagcctgagcgtggagtggcccggcaaggacggcaagcaccccagatgcccccccaagggcaacatgcccaagggctacgtgtacctggtgttcgagctggagaagagcgtgagaagcctgctgcaggcctgcagccacgaccccctgagccccgacggcctgagcgagtactacttcaagatgagcagcagaagaatgagatgcaaggaggtgcaggtgatcccctgggtgctggccgacagcaacttcgtgagaagccccagccagagactggaccccagcagaaccgtgttcgtgggcgccctgcacggcatgctgaacgccgaggccctggccgccatcctgaacgacctgttcggcggcgtggtgtacgccggcatcgacaccgacaagcacaagtaccccatcggcagcggcagagtgaccttcaacaaccagagaagctacctgaaggccgtgagcgccgccttcgtggagatcaagaccaccaagttcaccaagaaggtgcagatcgacccctacctggaggacagcctgtgccacatctgcagcagccagcccggccccttcttctgcagagaccaggtgtgcttcaagtacttctgcagaagctgctggcactggagacacagcatggagggcctgagacaccacagccccctgatgagaaaccagaagaacagagacagcagctag

SEQ ID NO: 35570 - DNA, 1476 bp, Artificial Sequence
  derived and/or modified sequence
atgctgttcccaacaagcgcccaagagtctagccgtggtctgccagacgcgaacgacctctgtctaggtctacaaagcttgtccctcaccgggtgggaccgcccctggtccacccaggattctgatagcagcgcccagtcaagcacacattccgtgctatctatgctgcacaaccccctcggcaatgtgttaggcaagccccccctcagctttctaccactggaccctttaggcagtgacctcgttgacaagtttcccgccccaagtgtccggggctctagacttgatacacgaccaatcctcgactcccggtcttcctccccatcagactctgacacttccggcttctcctccgggtctgatcacctgagcgacctcatttcaagcctgcgcattagtcccccactcccattcttgagcctgtccggaggcggcccccgggatccactgaaaatgggggtcggtagtcgaatggaccaagaacaggccgccctggctgcagttactccttcaccaaccagtgcctcaaagaggtggccaggcgcttctgtttggccatcctgggatttactggaagcccccaaagacccattttccatcgagcgggaggcccgactgcacagacaggcagccgcagttaacgaagctacttgtacatggtccggacaattgcccccccggaattacaaaaaccccatctattcatgtaaggtgttcctcgggggggtcccctgggacatcacagaggcaggccttgtgaacacctttagggtgttcggtagtttgtctgtggagtggcctgggaaggatggcaaacaccccagatgcccacccaaagggaacatgcctaagggttacgtgtatctagtgtttgaactggaaaagagtgtgcggtcactgctacaggcctgcagccacgaccccttatcccccgatggtcttagcgaatattactttaaaatgagctctaggcgcatgcggtgcaaggaggtccaagtgatcccctgggttctggccgattccaacttcgtccgctcaccctcgcagcgccttgaccccagtagaaccgtgtttgtgggggccctgcacggtatgttaaatgccgaggccctcgcagccattctgaacgacttatttggcggcgtggtgtatgccggtatcgatactgacaagcacaaataccctattggctcaggccgcgttacctttaataatcagagatcctacttgaaagcggtcagcgccgcgtttgtcgaaatcaaaactactaaatttaccaaaaaggtccagattgatccctacctcgaagactcactgtgtcatatatgctcttctcagcccggcccctttttctgcagagatcaggtgtgtttcaaatacttttgtaggtcttgttggcactggagacattctatggaggggctgaggcatcactctcccctcatgcgcaaccagaaaaatagggattcctcctag

SEQ ID NO: 35571 - DNA, 1476 bp, Artificial Sequence
  derived and/or modified sequence
atgctgttccccaccagcgcccaggagagcagccggggcctgcctgatgccaatgacctgtgcctgggcctgcagagcctgagcctgaccggctgggaccggccctggagcacccaggacagcgacagcagcgcccagagcagcacccacagcgtgctgtccatgctgcacaaccccctgggcaatgtgctgggcaagccacccctgtccttcctgcccctggaccccctgggcagtgacctggtggacaagtttcctgcccccagcgtgcggggcagccggctggacacccggcccatcctggacagccgcagcagcagccccagcgacagcgacaccagcggcttcagcagcggcagtgaccacctgagtgacctgatcagcagcctgcgcatcagcccccccctgcccttcctgagcctgagcggcggcggcccccgggaccccctgaagatgggcgtgggcagcaggatggaccaggagcaggccgccctggccgctgtgacccccagccccaccagcgccagcaagcgctggccaggggcctctgtgtggcccagctgggacctgctggaggcccccaaggaccccttcagcattgaaagagaggcccggctgcaccggcaggccgctgctgtgaatgaggccacctgcacctggagcggccagctgcccccaagaaactacaagaaccccatctacagctgcaaggtgttcctgggcggcgtgccctgggacatcacagaggccggcctggtgaacaccttccgggtgtttggcagcctgtctgtggagtggccaggcaaggatggcaagcacccccgctgcccccccaagggcaacatgcccaagggctacgtgtacctggtgtttgagctggagaagtctgtgcgcagcctgctgcaggcctgcagccatgaccccctgagcccagatggcctgtctgagtactacttcaagatgagcagcaggaggatgcgctgcaaggaggtgcaggtgatcccctgggtgctggccgacagcaactttgtgcgcagccccagccagaggctggaccccagcaggacagtgtttgtgggcgccctgcacggcatgctgaatgctgaggccctggccgccatcctgaatgacctgtttggaggagtggtgtatgccggcatcgacacagacaagcacaagtaccccatcggcagcggccgggtgaccttcaacaaccagaggagctacctgaaggctgtgtctgctgcctttgtggagatcaagaccaccaagttcaccaagaaggtgcagattgacccctacctggaggacagcctgtgccacatctgcagcagccagcccggccccttcttctgccgggaccaggtgtgcttcaagtacttctgccgcagctgctggcactggaggcacagcatggagggcctgcggcaccacagccccctgatgaggaaccagaagaacagagacagcagctag

SEQ ID NO: 35572 - DNA, 1476 bp, Artificial Sequence
  derived and/or modified sequence
atgctgttccccaccagcgcccaggagagcagccggggcctgcccgacgctaatgacctctgcctgggattgcagtcgctgtccctcacgggctgggaccggccgtggagcacccaagactccgactcatcggcccagtcctcaactcactctgtgctctccatgttgcacaaccctctgggcaacgtgttggggaagccacccctgagtttccttcctctggatccgcttgggagtgaccttgttgacaagtttccggcaccatcagtgcgaggtagcagattggacacaagacctattttggattcacggtctagctcaccatcagattccgacacgagcgggttctcaagcggtagtgaccacctcagtgacctcatcagttctctgaggattagtccacctttgccctttctctccctgtccggtggcggtccaagggacccgctgaagatgggcgtgggcagccgcatggaccaggagcaggctgccctcgccgctgtgactccgtctccgacgagcgcatctaaaagatggccaggggcatcagtttggccctcttgggacctcctggaggcaccgaaggatccattcagcatcgagagggaggctcgcttgcataggcaagccgccgccgtgaacgaagctacgtgtacatggagcggacagttgccacctcggaattataaaaacccgatctatagctgtaaagtgttcctaggaggcgtcccttgggatattacagaagcaggtctcgtaaatacgtttcgggtgttcggctctctgagtgtagagtggcctgggaaagatgggaaacatccgcggtgcccacctaaagggaatatgccgaagggttacgtgtacttagtgttcgagctcgaaaaaagcgtcagatctctgctgcaggcttgcagccacgaccccctgtcccctgatggactttccgaatactacttcaagatgtctagccggagaatgagatgcaaggaagtgcaagtgattccttgggtccttgctgacagcaacttcgtgcggagccccagtcagcgcctggacccttcaagaacagtttttgttggcgctctccatggcatgctcaatgcggaggcactggctgctattctgaatgacctgtttggcggagtcgtttatgccggcatcgatacagacaaacacaaataccctatcgggtcggggcgagtgacctttaacaaccagaggagttacctcaaggctgtgagcgccgcattcgtagagatcaagaccacgaaatttactaaaaaggtccagatagacccatacctagaggacagcctttgtcacatatgttcgagccagcccgggccctttttctgtcgggaccaggtgtgctttaaatacttttgcaggagctgctggcactggagacacagcatggaaggcctgagacaccactctcctctgatgaggaatcaaaagaacagagattctagctag

SEQ ID NO: 35573 - DNA, 1476 bp, Artificial Sequence
  derived and/or modified sequence
atgctgttccctacatccgcacaagaatcttcgagaggcctcccggacgctaacgatctctgcttggggctgcaatcattatcacttaccggctgggataggccatggtccacccaagattctgacagttctgctcagagtagtacccactcggtccttagcatgctccataatcctctcggcaatgtgctgggaaaaccacccctgagtttcctcccacttgaccctctggggtctgacctggtagataagtttccagcgccaagcgtgcgcggttcaaggctagatacgaggcccattttagattcccgcagctcttccccttccgacagcgatacgtccgggtttagcagtggcagcgaccatctatcggatctgatctcatcactaagaatctccccgcctctcccattcctgtcattgagcggaggaggtcctcgggaccctttgaagatgggtgttggttcccgcatggaccaagagcaggccgctttggctgcggtgaccccctccccaacctctgcttcgaagagatggccaggggcttcagtctggcccagctgggacttgctggaggctccaaaagaccctttttctatcgaaagagaggccagattgcatcgccaggctgcagccgtgaatgaagccacctgtacctggtcagggcaacttccaccccgtaactataagaaccccatctactcatgtaaggtgttcctgggcggagtgccctgggatattaccgaggcaggactggtcaataccttccgggtgttcggctccctgtccgtggagtggccgggaaaggatgggaaacaccccagatgtcccccaaagggcaatatgccaaagggatacgtgtatctggttttcgagctggagaagtccgttagatcccttctgcaggcctgctcccatgaccctctgtccccggacgggctctctgagtattacttcaagatgtcttctcgcaggatgagatgcaaggaggtccaagtcatcccttgggtgttggccgatagtaacttcgtgcgatcgccttctcagcgacttgacccctcaagaacagtctttgttggagctcttcatggcatgctgaatgcagaggccctggccgcaatccttaatgacctgtttggtggcgtcgtgtatgcgggtatcgataccgacaaacataaatatcccataggctccggaagggtgacattcaataatcaacggtcatacctaaaggccgtctcagcggctttcgtcgagatcaagactaccaaatttacaaagaaggtgcagattgatccctacctggaagactccctatgccatatttgttcgagtcagccgggacccttcttctgtagagatcaggtctgcttcaagtacttttgtcgctcatgttggcactggcggcacagcatggaagggttgagacaccatagtccactgatgaggaaccagaagaatagggactcctcttag

SEQ ID NO: 35574 - DNA, 1461 bp, Artificial Sequence
  derived and/or modified sequence
atgctgttccccaccagcgcccaggagagcagcagaggcctgcccgacgccaacgacctgtgcctgggcctgcagagcctgagcctgaccggctgggacagaccctggagcacccaggacagcgacagcagcgcccagagcagcacccacagcgtgctgagcatgctgcacaaccccctgggcaacgtgctgggcaagccccccctgagcttcctgcccctggaccccctgggcagcgacctggtggacaagttccccgcccccagcgtgagaggcagcagactggacaccagacccatcctggacagcagaagcagcagccccagcgacagcgacaccagcggcttcagcagcggcagcgaccacctgagcgacctgatcagcagcctgagaatcagcccccccctgcccttcctgagcctgagcggcggcggccccagagaccccctgaagatgggcgtgggcagcagaatggaccaggagcaggccgccctggccgccgtgacccccagccccaccagcgccagcaagagatggcccggcgccagcgtgtggcccagctgggacctgctggaggcccccaaggaccccttcagcatcgagagagaggccagactgcacagacaggccgccgccgtgaacgaggccacctgcacctggagcggccagctgccccccagaaactacaagaaccccatctacagctgcaaggtgttcctgggcggcgtgccctgggacatcaccgaggccggcctggtgaacaccttcagagtgttcggcagcctgagcgtggagtggcccggcaaggacggcaagcaccccagatgcccccccaagggctacgtgtacctggtgttcgagctggagaagagcgtgagaagcctgctgcaggcctgcagccacgaccccctgagccccgacggcctgagcgagtactacttcaagatgagcagcagaagaatgagatgcaaggaggtgcaggtgatcccctgggtgctggccgacagcaacttcgtgagaagccccagccagagactggaccccagcagaaccgtgttcgtgggcgccctgcacggcatgctgaacgccgaggccctggccgccatcctgaacgacctgttcggcggcgtggtgtacgccggcatcgacaccgacaagcacaagtaccccatcggcagcggcagagtgaccttcaacaaccagagaagctacctgaaggccgtgagcgccgccttcgtggagatcaagaccaccaagttcaccaagaaggtgcagatcgacccctacctggaggacagcctgtgccacatctgcagcagccagcccggccccttcttctgcagagaccaggtgtgcttcaagtacttctgcagaagctgctggcactggagacacagcatggagggcctgagacaccacagccccctgatgagaaaccagaagaacagagacagcagctag

SEQ ID NO: 35575 - DNA, 1559 bp, Artificial Sequence
  derived and/or modified sequence
ctgatcacatgctggcccagtctgtaatgcagacgggataggggtgtgtgtgtgaggggagggggcctgtatggcaactgctcttgccccagcgtccccaaaagtgcagaggcagcggctgcagcatccagccagcttggatgtctggcctacttccaggactctgaagaaacagttacaagcaggatgcttttcccaacctctgcgcaagaatcttcccgtggcctcccagatgcaaatgacttgtgccttggcctgcagtccctcagtctgacaggctgggaccgaccctggagcacccaggactcagattcctcagcccagagcagcacacactcggtcaagccttcgcatttctccacctctgcccttcctgtctctgtcagggggtggtcccagagaccctttaaagatgggggtagggtctcggatggaccaagagcaagctgctcttgctgcagtcactccctccccaaccagtgcttcaaagagatggccaggagcttctgtgtggccgtcctgggacctcctcgaagctcccaaagaccccttcagcatagagagagaggccaggctgcaccgacaagctgcagctgtgaatgaagccacctgtacctggagtggccagcttcctccccggaactataagaaccccatctactcttgcaaggtgtttctaggaggtgttccttgggatattacagaagctggattagttaacaccttccgtgtttttggctctttgagtgtggagtggcctggtaaggatggcaagcatccccggtgtcctcccaaagggtatgtgtatctggtcttcgaactagagaagtctgtccgatccttgcttcaggcttgctctcatgacccgctgagcccagatggcctgagtgaatattatttcaagatgtccagccgaaggatgcgctgcaaggaggtgcaggtgatcccctgggtattagccgacagtaactttgtccggagcccatctcagaggcttgaccccagcaggacggtgtttgtcggtgctctgcatggaatgctaaatgctgaggccctggcagccatcttgaacgacctatttggtggagtggtgtatgccgggattgacacagataagcacaagtatcccattggttctggtcgtgtgactttcaataaccaacggagttacctgaaagcagtcagcgctgcttttgtggagatcaaaaccaccaagttcacaaagaaggttcagattgacccctacctagaagattctctgtgtcatatctgcagttctcagcctggtcctttcttctgtcgagatcaggtctgcttcaaatacttctgccggagctgctggcactggcggcacagcatggagggcctgcgccaccacagccccctgatgcggaaccagaagaaccgagattccagctagaggagctggccttgcccagtggcctgtggcgcccaaagctggcaggtcaggcaagcagcctgcaccaccctgccactggcgaccagggagctggcttcccaaggacaagggaaaattgtagtcacctttgcacttgctg

SEQ ID NO: 35576 - DNA, 1461 bp, Artificial Sequence
  derived and/or modified sequence
atgttgttcccaaccagtgctcaggaaagttctcgcggtctcccagacgccaacgacctctgcctaggtctgcagagcctgagcttgacggggtgggatcgcccctggtcaacccaggactctgattcgagtgctcaatcgagcacccactccgtgttgtccatgcttcacaaccctctgggcaacgtactggggaaacctccacttagttttctgccactggatccgctgggctcggatttggtagataaatttccagcccctagcgttaggggatcgcgattggacactcgcccaatactggatagccggagcagctcacccagcgatagcgataccagtggattctccagtggctctgatcacctttcagacctgatttccagcctgagaatctcccccccgctgcctttcctgtcactatctggcgggggcccgagagatccactgaaaatgggtgtcggatcccggatggaccaggagcaggcggccctcgccgcagtgacgccgagccccacttctgccagtaagcggtggccaggggcctccgtgtggccctcttgggatctgctggaagctcctaaagaccccttttctatcgaacgggaagcccgcttacaccgtcaggctgccgccgtgaacgaagccacatgtacttggtctggccagctgcctccccgtaattataaaaacccaatatattcttgcaaagtatttctggggggagtgccctgggacattaccgaagctggtctggtgaacacttttagagtcttcggaagtctatctgtggaatggcctggtaaagacggtaaacacccgaggtgcccacccaaaggctatgtgtatttagtgtttgagttagagaaatcagtcaggtctctactacaggcatgctcgcatgaccctctgagcccagacggcctaagcgagtactactttaaaatgagctctcggagaatgcgctgtaaggaagtacaggtcatcccttgggtcctggcagactctaactttgtccgatccccaagccagagactggacccctccagaacagtgtttgtcggcgcactgcatggcatgctgaacgctgaggctctagccgccatcttgaacgacctgttcggaggtgtggtgtatgctggaatagacactgataaacataaatatcccattggatcaggccgtgtaacctttaataaccagagatcatatctgaaagccgtgagcgcagctttcgtggaaatcaaaaccacgaaatttacaaaaaaagtgcagatagatccctaccttgaagacagcctctgtcacatttgctcatcccagcctggaccctttttctgcagagatcaggtgtgttttaaatacttctgccggtcctgctggcattggcggcatagtatggaagggctgaggcaccactcccctctgatgcggaatcagaaaaacagagactcatcctag

SEQ ID NO: 35577 - DNA, 1461 bp, Artificial Sequence
  derived and/or modified sequence
atgctgttccccaccagcgcccaggagagcagccggggcctgcctgatgccaatgacctgtgcctgggcctgcagagcctgagcctgaccggctgggaccggccctggagcacccaggacagcgacagcagcgcccagagcagcacccacagcgtgctgtccatgctgcacaaccccctgggcaatgtgctgggcaagccacccctgtccttcctgcccctggaccccctgggcagtgacctggtggacaagtttcctgcccccagcgtgcggggcagccggctggacacccggcccatcctggacagccgcagcagcagccccagcgacagcgacaccagcggcttcagcagcggcagtgaccacctgagtgacctgatcagcagcctgcgcatcagcccccccctgcccttcctgagcctgagcggcggcggcccccgggaccccctgaagatgggcgtgggcagcaggatggaccaggagcaggccgccctggccgctgtgacccccagccccaccagcgccagcaagcgctggccaggggcctctgtgtggcccagctgggacctgctggaggcccccaaggaccccttcagcattgaaagagaggcccggctgcaccggcaggccgctgctgtgaatgaggccacctgcacctggagcggccagctgcccccaagaaactacaagaaccccatctacagctgcaaggtgttcctgggcggcgtgccctgggacatcacagaggccggcctggtgaacaccttccgggtgtttggcagcctgtctgtggagtggccaggcaaggatggcaagcacccccgctgcccccccaagggctacgtgtacctggtgtttgagctggagaagtctgtgcgcagcctgctgcaggcctgcagccatgaccccctgagcccagatggcctgtctgagtactacttcaagatgagcagcaggaggatgcgctgcaaggaggtgcaggtgatcccctgggtgctggccgacagcaactttgtgcgcagccccagccagaggctggaccccagcaggacagtgtttgtgggcgccctgcacggcatgctgaatgctgaggccctggccgccatcctgaatgacctgtttggaggagtggtgtatgccggcatcgacacagacaagcacaagtaccccatcggcagcggccgggtgaccttcaacaaccagaggagctacctgaaggctgtgtctgctgcctttgtggagatcaagaccaccaagttcaccaagaaggtgcagattgacccctacctggaggacagcctgtgccacatctgcagcagccagcccggccccttcttctgccgggaccaggtgtgcttcaagtacttctgccgcagctgctggcactggaggcacagcatggagggcctgcggcaccacagccccctgatgaggaaccagaagaacagagacagcagctag

SEQ ID NO: 35578 - DNA, 1461 bp, Artificial Sequence
  derived and/or modified sequence
atgctgttccccaccagcgcccaggagagcagccggggcctgcccgacgccaacgacctttgcctcggacttcagagtctgagtctgacaggatgggatcgaccatggtcaacgcaggactctgactccagcgcccagtccagtacccatagcgtactgtccatgttacacaaccctttgggtaatgtgctaggcaagcctcccctgtctttcctgcctttagatcctctcggatctgatctggtggataagtttcccgctccaagtgtgcggggcagccgcctggacacacgtcccatcctggattcccggtcctcatctccatctgacagcgatacaagcggcttttcctcagggagcgatcacttgtcggatctgatctcaagcctccgcatatctcctcccctgccattcctctctttatctggcggcggacctcgggatccactcaagatgggggttggctcacgcatggatcaggagcaggcagctctcgctgcagttaccccatcaccaactagcgcttccaaaagatggcccggcgcgagcgtgtggccctcttgggatcttctcgaggctcccaaggatcctttttcaattgagagagaggcccgcttgcatcggcaggccgccgctgtgaatgaagccacttgcacgtggagtggacagctgcctccccgcaattacaaaaaccccatttattcctgcaaggtgtttcttgggggcgtcccctgggatattacagaggcggggttagtaaatactttcagagtgttcggatctctgtccgtggaatggcccggaaaagatggcaaacaccctcgttgtcctcctaaaggttatgtgtatttggtgttcgagctggagaagagcgtacgtagcttattgcaagcgtgctcacacgacccgctgagccccgacggactatctgagtattatttcaagatgagcagccgtagaatgaggtgcaaggaggttcaagtgatcccctgggtgctggccgactcaaacttcgtgaggtctcctagtcagagacttgacccttctaggacagttttcgtcggcgccctgcacggaatgctgaatgccgaagcactggccgcaatcctgaatgacctcttcggtggtgtagtatatgccggtattgacaccgataagcataagtaccccattgggtctggacgcgttacattcaacaatcagaggtcctatttgaaggccgtcagcgctgcgtttgtcgagatcaagaccaccaaattcacaaagaaggtgcaaattgatccttatttggaagactccctctgtcatatttgtagctcccagcccgggccttttttctgtcgtgaccaggtgtgttttaaatatttctgtcgcagctgctggcattggagacattctatggagggcctgagacaccactccccattgatgcggaatcagaaaaatcgtgactctagctag

SEQ ID NO: 35579 - DNA, 1461 bp, Artificial Sequence
  derived and/or modified sequence
atgctgtttccgacctcagcccaggaatctagccggggactgccagatgccaacgatctgtgcctgggactccagagcctctctctgaccggctgggacaggccgtggtcgactcaggattctgattcttctgcccagagcagtacacatagcgttctcagcatgctgcacaaccccttggggaatgtactggggaaaccccctctcagtttcctgccgctggatcctctgggctccgacttagttgacaaattcccagccccatcagtcagaggatcacgattagatacccgcccaatcctcgacagcagatcttcgtcaccaagcgattcggacacaagcggatttagcagcggaagtgaccatctgtcagatctgatttcctcactccgcataagcccacctctgcccttcctgagccttagcgggggaggcccacgggatccccttaaaatgggcgtgggatcccgcatggaccaggagcaggccgcattggcggctgtgacaccttctcccacttccgcttcaaaacgctggcctggcgcatccgtatggcccagctgggatctgctagaagcccctaaagatcccttctccattgagagagaagcccgactacaccggcaagctgccgcagttaacgaggctacatgcacgtggagcgggcagctcccaccaagaaactacaagaaccctatctatagttgtaaagttttcttgggcggagtgccatgggacatcaccgaagccggtctggtcaatacctttagagtgtttggtagccttagcgtagagtggccagggaaggacggaaaacacccgcgttgtcctcccaagggctatgtgtatctggtgtttgagctggagaagagtgtcaggtctctgctccaggcttgtagccatgatccactcagtcccgacggtctctcggagtactattttaagatgagttccaggaggatgcggtgtaaggaggttcaagttataccctgggtactcgccgacagcaatttcgtccgatccccaagccagcgactggacccaagccggacagtgttcgtcggcgcactgcatggtatgctcaacgctgaggcgctcgctgccattctgaatgatctgtttgggggtgttgtctacgcaggtattgataccgataagcataaatatcccatcggcagcgggcgagtgacctttaacaaccaaaggagctatctgaaggccgtgagcgcagccttcgtcgagatcaagaccactaaattcacgaaaaaagtgcaaatagatccgtatctggaagactctttatgccatatttgtagtagccagcctggcccattcttctgtcgagatcaggtgtgcttcaaatatttctgtcgctcctgctggcattggagacattccatggagggcctgagacatcatagccctctaatgcggaatcagaagaatcgagacagcagctag

SEQ ID NO: 35580 - protein, 376 aa, Artificial Sequence
  derived and/or modified sequence
MVVVAAAPNPADGTPKVLLLSGQPASAAGAPAGQALPLMVPAQRGASPEAASGGLPQARKRQRLTHLSPEEKALRRKLKNRVAAQTARDRKKARMSELEQQVVDLEEENQKLLLENQLLREKTHGLVVENQELRQRLGMDALVAEEEAEAKGNEVRPVAGSAESAAGAGPVVTPPEHLPMDSGGIDSSDSESDILLGILDNLDPVMFFKCPSPEPASLEELPEVYPEGPSSLPASLSLSVGTSSAKLEAINELIRFDHIYTKPLVLEIPSETESQANVVVKIEEAPLSPSENDHPEFIVSVKEEPVEDDLVPELGISNLLSSSHCPKPSSCLLDAYSDCGYGGSLSPFSDMSSLLGVNHSWEDTFANELFPQLISV

SEQ ID NO: 35581 - DNA, 1131 bp, Artificial Sequence
  derived and/or modified sequence
atggtggtggtggccgccgcccccaaccccgccgacggcacccccaaggtgctgctgctgagcggccagcccgccagcgccgccggcgcccccgccggccaggccctgcccctgatggtgcccgcccagagaggcgccagccccgaggccgccagcggcggcctgccccaggccagaaagagacagagactgacccacctgagccccgaggagaaggccctgagaagaaagctgaagaacagagtggccgcccagaccgccagagacagaaagaaggccagaatgagcgagctggagcagcaggtggtggacctggaggaggagaaccagaagctgctgctggagaaccagctgctgagagagaagacccacggcctggtggtggagaaccaggagctgagacagagactgggcatggacgccctggtggccgaggaggaggccgaggccaagggcaacgaggtgagacccgtggccggcagcgccgagagcgccgccggcgccggccccgtggtgaccccccccgagcacctgcccatggacagcggcggcatcgacagcagcgacagcgagagcgacatcctgctgggcatcctggacaacctggaccccgtgatgttcttcaagtgccccagccccgagcccgccagcctggaggagctgcccgaggtgtaccccgagggccccagcagcctgcccgccagcctgagcctgagcgtgggcaccagcagcgccaagctggaggccatcaacgagctgatcagattcgaccacatctacaccaagcccctggtgctggagatccccagcgagaccgagagccaggccaacgtggtggtgaagatcgaggaggcccccctgagccccagcgagaacgaccaccccgagttcatcgtgagcgtgaaggaggagcccgtggaggacgacctggtgcccgagctgggcatcagcaacctgctgagcagcagccactgccccaagcccagcagctgcctgctggacgcctacagcgactgcggctacggcggcagcctgagccccttcagcgacatgagcagcctgctgggcgtgaaccacagctgggaggacaccttcgccaacgagctgttcccccagctgatcagcgtgtag

SEQ ID NO: 35582 - DNA, 1131 bp, Artificial Sequence
  derived and/or modified sequence
atggtcgtcgttgccgctgcaccgaatcctgcggacggtaccccaaaggtgctgttgctctccgggcagcctgcctcggccgcaggcgcacccgccgggcaggctctcccgctgatggtgcccgcccagcgaggcgccagtcctgaagcagcttccggcggactacctcaggctaggaagcgccaacgcctaactcatttgtcccctgaggaaaaggccctccgcagaaagctgaaaaatagggtcgctgcccagacagcgagggaccggaaaaaagcgcgcatgtctgagctggagcagcaggtcgtagatctggaagaagaaaatcagaagctactgctggagaatcagttgctgcgggaaaaaacacacggcctcgtggtcgagaaccaggaactgaggcagcgcttaggaatggacgcgcttgtggcagaagaagaggctgaggccaaggggaacgaggtcaggccagtcgccggaagcgctgaatcagccgcgggggccggcccggtggtaactccccccgaacacctgccaatggacagtggaggaatcgattcaagcgattccgagtccgatatcctccttggcatcctcgacaatctggatccagtcatgttctttaagtgtccaagtcccgagcccgccagtctcgaagaactccccgaggtctaccccgaggggccttcgagcctacccgccagcctctccctgtcagtgggaaccagctcagccaaacttgaagccatcaatgagcttatcagatttgaccacatctacaccaagcctctggtcctcgaaatcccttctgaaaccgaatcccaggccaacgtggtagtgaaaattgaagaggcgcctcttagccccagtgaaaatgatcatccggagtttattgtgtcagttaaagaagaacccgtggaagacgacctggttcctgagcttggcattagtaacttattaagctctagtcactgtccaaagccctcttcctgcttgctcgacgcttattccgattgtgggtacgggggaagcctgtccccctttagtgatatgtctagtctgctgggcgtcaaccatagctgggaggatacctttgcaaatgagctttttcctcaattaatttctgtctag

SEQ ID NO: 35583 - DNA, 1131 bp, Artificial Sequence
  derived and/or modified sequence
atggtggtggtggccgccgcccccaacccagcagatggcacccccaaggtgctgctgctgagcggccagcctgccagcgctgctggggccccagctggccaggccctgcccctgatggtgcctgcccagagaggagccagccctgaggccgccagcggcggcctgccccaggccaggaagaggcagaggctgacccacctgagccctgaggagaaggccctgcggaggaagctgaagaacagagtggccgcccagacagcccgggacaggaagaaggccaggatgtctgagctggagcagcaggtggtggacctggaggaggagaaccagaagctgctgctggagaaccagctgctgcgggagaagacccacggcctggtggtggagaaccaggagctgcggcagaggctgggcatggatgccctggtggccgaggaggaggccgaggccaagggaaatgaggtgcggcctgtggccggcagcgctgagagcgctgctggggccggccctgtggtgaccccacctgagcacctgcccatggacagcggcggcatcgacagcagtgacagcgagagtgacatcctgctgggcatcctggacaacctggaccctgtgatgttcttcaagtgccccagccctgagcccgccagcctggaggagctgcctgaggtgtacccagagggccccagcagcctgcctgccagcctgagcctgtctgtgggcaccagcagcgccaagctggaggccatcaatgaactcatccgctttgaccacatctacaccaagcccctggtgctggagatccccagcgagacagagagccaggccaacgtggtggtgaagattgaggaggcccccctgagccccagtgaaaatgaccaccctgagttcatcgtgtctgtgaaggaggagcctgtggaggatgacctggtgcctgagctgggcatcagcaacctgctgagcagcagccactgccccaagcccagcagctgcctgctggatgcctacagcgactgtggctatggaggcagcctgagccccttcagtgacatgagcagcctgctgggcgtgaaccacagctgggaggacacctttgccaatgaactcttcccccagctgatctctgtgtag

SEQ ID NO: 35584 - DNA, 1131 bp, Artificial Sequence
  derived and/or modified sequence
atggtggtggtggccgccgcccccaaccccgccgacggcacccccaaagtgcttctgctatcagggcaaccggccagcgctgctggagcgcccgccggacaggcccttccacttatggttcccgcccaaagaggggcaagcccagaggccgcctctggggggttaccacaagcgcgcaagcggcagcgcttaacccacctgagtcccgaggaaaaagctctgcgcaggaaattgaaaaacagggtggcggcccagactgcacgtgaccggaagaaagcgcggatgtccgagctggaacagcaggtggtcgacctggaggaggagaaccagaagttgctgctcgaaaaccaactgctcagagagaaaacccatggactggtggtcgaaaaccaggagctccgacagcgcctgggcatggatgcgctggtcgctgaggaagaggccgaagccaaaggcaatgaagtgaggccagtagcaggaagcgcggaatctgctgctggagctgggcctgtggttacacctcctgaacatctgcccatggacagcggaggcatcgactccagcgactctgaatctgacatcttactgggaattctggacaatctggaccctgtgatgttcttcaagtgtccgtcccctgagcctgcttcgttagaagagcttcccgaggtttatcccgaaggcccttcttcccttcccgcgagcttgagcctctcagtggggacctcctccgccaaactggaggcaatcaacgagctgatccggttcgaccatatctatacaaagcccttggtgcttgagattccgagtgaaaccgaatcccaggcaaacgtggtggtcaagattgaggaagcacccttaagcccaagtgaaaacgaccaccccgaatttatcgtatccgtcaaggaggagcccgtcgaggacgacttagtacctgaactggggatatcaaacctcctgagctcttctcattgcccaaagccttccagttgtctgctcgatgcttatagtgactgcggctatgggggctcgctcagtccatttagtgatatgtcatctctgctaggagtgaaccactcatgggaagacacgtttgctaacgagctgtttccacagttgataagtgtgtag

SEQ ID NO: 35585 - DNA, 1131 bp, Artificial Sequence
  derived and/or modified sequence
atggtggttgttgccgctgctccgaaccccgctgatgggacgcctaaggtcctcctgctctcaggacaaccagccagcgcagctggggctccggctgggcaggctctgcccctgatggttccagcccagcgcggagcttcccccgaagcggctagtgggggattgcctcaagctcgcaagagacagcgcctaactcacctcagccccgaagagaaggctctgagaaggaaactgaaaaatcgtgtggccgctcagactgccagggatcgaaagaaggctaggatgagcgagctggaacaacaggtggtagatctcgaggaagaaaatcagaagctcctcctggaaaaccagctcttaagggaaaaaacccacgggctggtcgtcgaaaatcaggagctgaggcagcgacttggcatggatgcactagttgccgaagaggaggccgaagccaaggggaatgaggtccgccctgtggctggtagcgcagagtccgccgctggcgctggcccagtcgtaacccctcctgaacacctgcccatggacagcgggggaatagacagtagtgacagcgaaagcgacatcctattggggatccttgataacctcgaccccgtgatgtttttcaaatgcccctctccagaacccgcatctcttgaggagctgcccgaagtgtatcccgaaggccctagtagtctccccgctagcttgtccctctcagtcgggactagcagcgccaagcttgaggccattaatgaactgatccgattcgaccacatctataccaagccattggtgctggaaatcccttccgagactgagtcccaggcgaatgtggttgtcaagattgaggaagctccgttgagtccctcagagaatgatcatcccgagtttatagtgtcagtgaaagaggagccagtcgaagacgatctcgtgccggagcttgggatcagcaatctcctcagctcaagtcattgtccgaagccgagcagctgcttactagatgcctacagcgattgtggctacggtgggagcctgtccccctttagcgatatgtcatctctcctaggcgtgaaccacagctgggaggatacatttgctaatgagctgtttccacagttgatctcggtgtag

SEQ ID NO: 35586 - DNA, 1131 bp, Artificial Sequence
  derived and/or modified sequence
atggttgtcgtggcagcagcacccaatcctgccgatggaactccgaaagttctactactgagtggccagccagcttctgccgccggggctccagcgggacaggcgctaccactgatggtacctgcacaacgcggtgccagccccgaggcagcctccggcggtctcccccaagcacgcaagcggcaacggctgactcatctctctcccgaagaaaaggcactgagacgcaagctgaaaaacagagttgcggcccagaccgcccgagaccgcaagaaagcaaggatgagtgaattagagcagcaagtcgtggacctggaagaagagaatcagaagctcctcctcgaaaaccaactgttgagggaaaaaacccatggcctcgtggtcgaaaatcaggaactccgtcaaaggcttggcatggacgcccttgtggcagaggaggaggccgaggctaaagggaacgaagtacgacctgtcgccggatccgctgaaagtgctgcaggcgcggggccagtggtgactcctccagagcaccttccgatggattcgggtggaatcgactcatccgactccgaatccgatattctgctgggaatcctggacaaccttgaccccgtgatgtttttcaagtgccccagccccgagcccgctagcctagaggaactgcctgaggtgtatccagaaggcccttcatcactgcccgcctcactgtccctctcggtcggcacgtcttctgcgaagttggaggctatcaacgagctgatccgcttcgaccacatctataccaaaccattggttctggagattccctctgaaaccgaaagtcaagccaatgttgtcgtgaagattgaagaagcccccctgtctccttctgagaacgatcatcctgaatttattgtgtcagtgaaggaggagcccgtcgaagacgatcttgtgcccgagctggggatcagcaacttattgtcgagctctcattgccccaagccctccagttgcctacttgatgcctacagcgactgtggatatggtggatccctttccccgttttctgatatgagtagtttactcggtgtgaaccatagctgggaagatacattcgccaatgaacttttcccccagttaatttcagtctag

SEQ ID NO: 35587 - DNA, 1131 bp, Artificial Sequence
  derived and/or modified sequence
atggttgttgtcgccgcggcccccaatcccgcagatggtacacccaaggtactgctcctttcaggccaacccgcctctgccgcaggggcacccgcaggacaggccctccccctcatggtgcccgcacagagaggagcctccccagaggcagcaagcggcggacttcctcaggctagaaaaagacagcgactcacccacttgtcacctgaagaaaaagcccttcggagaaaattgaagaacagagttgcagcccagaccgccagggaccgaaagaaagcaagaatgagcgagttggaacagcaggtcgtcgatctcgaagaggagaatcaaaagctattgttggaaaatcagctgctcagagaaaaaactcatggcttggtggtggagaaccaagaactgcgacaaagactcggcatggatgcactggtggcagaggaagaagcagaagctaagggaaacgaagtgcgacccgtagccggaagcgccgagagcgcagctggagcaggacctgtagttaccccacccgagcatctgcccatggactccggaggaatagacagcagcgattccgaaagcgatatccttctgggtatcctggataacctcgatcctgtcatgttcttcaagtgcccgtctccagaacccgcatcattggaagagctgccggaggtatacccagaaggcccatcaagtctccctgcatcccttagtctcagcgtcggcacgtcttccgctaagcttgaggcaatcaacgaattaatcagatttgatcatatttatactaaacccttggtccttgaaattcctagtgaaactgagtcgcaggcgaacgtggttgtcaagatagaagaagctcccttgtcccccagcgagaacgaccaccctgaattcattgtgagcgtgaaagaggaacctgttgaagatgatctggtgcctgaactgggcatatcaaatttattaagcagctcccattgccctaagcccagcagttgcctcctcgacgcctactccgattgcggctacgggggaagtctttcacccttctcggatatgagcagtctcctcggcgttaaccactcatgggaagatacttttgcgaatgaactttttccacaattgatcagtgtttag

SEQ ID NO: 35588 - DNA, 1777 bp, Artificial Sequence
  derived and/or modified sequence
ggcgcgcggtgcgcggtgcgtagtctggagctatggtggtggtggcagccgcgccgaacccggccgacgggacccctaaagttctgcttctgtcggggcagcccgcctccgccgccggagccccggccggccaggccctgccgctcatggtgccagcccagagaggggccagcccggaggcagcgagcggggggctgccccaggcgcgcaagcgacagcgcctcacgcacctgagccccgaggagaaggcgctgaggaggaaactgaaaaacagagtagcagctcagactgccagagatcgaaagaaggctcgaatgagtgagctggaacagcaagtggtagatttagaagaagagaaccaaaaacttttgctagaaaatcagcttttacgagagaaaactcatggccttgtagttgagaaccaggagttaagacagcgcttggggatggatgccctggttgctgaagaggaggcggaagccaaggggaatgaagtgaggccagtggccgggtctgctgagtccgcagcaggtgcaggcccagttgtcacccctccagaacatctccccatggattctggcggtattgactcttcagattcagagtctgatatcctgttgggcattctggacaacttggacccagtcatgttcttcaaatgcccttccccagagcctgccagcctggaggagctcccagaggtctacccagaaggacccagttccttaccagcctccctttctctgtcagtggggacgtcatcagccaagctggaagccattaatgaactaattcgttttgaccacatatataccaagcccctagtcttagagataccctctgagacagagagccaagctaatgtggtagtgaaaatcgaggaagcacctctcagcccctcagagaatgatcaccctgaattcattgtctcagtgaaggaagaacctgtagaagatgacctcgttccggagctgggtatctcaaatctgctttcatccagccactgcccaaagccatcttcctgcctactggatgcttacagtgactgtggatacgggggttccctttccccattcagtgacatgtcctctctgcttggtgtaaaccattcttgggaggacacttttgccaatgaactctttccccagctgattagtgtctaaggaatgatccaatactgttgcccttttccttgactattacactgcctggaggatagcagagaagcctgtctgtacttcattcaaaaagccaaaatagagagtatacagtcctagagaattcctctatttgttcagatctcatagatgacccccaggtattgtcttttgacatccagcagtccaaggtattgagacatattactggaagtaagaaatattactataattgagaactacagcttttaagattgtacttttatcttaaaagggtggtagttttccctaaaatacttattatgtaagggtcattagacaaatgtcttgaagtagacatggaatttatgaatggttctttatcatttctcttccccctttttggcatcctggcttgcctccagttttaggtcctttagtttgcttctgtaagcaacgggaacacctgctgagggggctctttccctcatgtatacttcaagtaagatcaagaatcttttgtgaaattatagaaatttactatgtaaatgcttgatggaattttttcctgctagtgtagcttctgaaaggtgctttctccatttatttaaaactacccatgcaattaaaaggtacaatgc

SEQ ID NO: 35589 - DNA, 1690 bp, Artificial Sequence
  derived and/or modified sequence
ccggactgaccggatccgccacgctgggaacctagggcggcccagggctcttttctgtactttttaactctctcgttagagatgaccagagctggggatgcgggcacctgtcttccaggccctcttgctgtgtggccgcagactggtggttcagcctcttaactcggacatgaggaaactgaaaaacagagtagcagctcagactgccagagatcgaaagaaggctcgaatgagtgagctggaacagcaagtggtagatttagaagaagagaaccaaaaacttttgctagaaaatcagcttttacgagagaaaactcatggccttgtagttgagaaccaggagttaagacagcgcttggggatggatgccctggttgctgaagaggaggcggaagccaaggggaatgaagtgaggccagtggccgggtctgctgagtccgcagcactcagactacgtgcacctctgcagcaggtgcaggcccagttgtcacccctccagaacatctccccatggattctggcggtattgactcttcagattcagagtctgatatcctgttgggcattctggacaacttggacccagtcatgttcttcaaatgcccttccccagagcctgccagcctggaggagctcccagaggtctacccagaaggacccagttccttaccagcctccctttctctgtcagtggggacgtcatcagccaagctggaagccattaatgaactaattcgttttgaccacatatataccaagcccctagtcttagagataccctctgagacagagagccaagctaatgtggtagtgaaaatcgaggaagcacctctcagcccctcagagaatgatcaccctgaattcattgtctcagtgaaggaagaacctgtagaagatgacctcgttccggagctgggtatctcaaatctgctttcatccagccactgcccaaagccatcttcctgcctactggatgcttacagtgactgtggatacgggggttccctttccccattcagtgacatgtcctctctgcttggtgtaaaccattcttgggaggacacttttgccaatgaactctttccccagctgattagtgtctaaggaatgatccaatactgttgcccttttccttgactattacactgcctggaggatagcagagaagcctgtctgtacttcattcaaaaagccaaaatagagagtatacagtcctagagaattcctctatttgttcagatctcatagatgacccccaggtattgtcttttgacatccagcagtccaaggtattgagacatattactggaagtaagaaatattactataattgagaactacagcttttaagattgtacttttatcttaaaagggtggtagttttccctaaaatacttattatgtaagggtcattagacaaatgtcttgaagtagacatggaatttatgaatggttctttatcatttctcttccccctttttggcatcctggcttgcctccagttttaggtcctttagtttgcttctgtaagcaacgggaacacctgctgagggggctctttccctcatgtatacttcaagtaagatcaagaatcttttgtgaaattatagaaatttactatgtaaatgcttgatggaattttttcctgctagtgtagcttctgaaaggtgctttctccatttatttaaaa

SEQ ID NO: 35590 - RNA, 1131 nt, Artificial Sequence
  derived and/or modified sequence
augguugucguggcagcagcacccaauccugccgauggaacuccgaaaguucuacuacugaguggccagccagcuucugccgccggggcuccagcgggacaggcgcuaccacugaugguaccugcacaacgcggugccagccccgaggcagccuccggcggucucccccaagcacgcaagcggcaacggcugacucaucucucucccgaagaaaaggcacugagacgcaagcugaaaaacagaguugcggcccagaccgcccgagaccgcaagaaagcaaggaugagugaauuagagcagcaagucguggaccuggaagaagagaaucagaagcuccuccucgaaaaccaacuguugagggaaaaaacccauggccucguggucgaaaaucaggaacuccgucaaaggcuuggcauggacgcccuuguggcagaggaggaggccgaggcuaaagggaacgaaguacgaccugucgccggauccgcugaaagugcugcaggcgcggggccaguggugacuccuccagagcaccuuccgauggauucggguggaaucgacucauccgacuccgaauccgauauucugcugggaauccuggacaaccuugaccccgugauguuuuucaagugccccagccccgagcccgcuagccuagaggaacugccugagguguauccagaaggcccuucaucacugcccgccucacugucccucucggucggcacgucuucugcgaaguuggaggcuaucaacgagcugauccgcuucgaccacaucuauaccaaaccauugguucuggagauucccucugaaaccgaaagucaagccaauguugucgugaagauugaagaagccccccugucuccuucugagaacgaucauccugaauuuauugugucagugaaggaggagcccgucgaagacgaucuugugcccgagcuggggaucagcaacuuauugucgagcucucauugccccaagcccuccaguugccuacuugaugccuacagcgacuguggauaugguggaucccuuuccccguuuucugauaugaguaguuuacucggugugaaccauagcugggaagauacauucgccaaugaacuuuucccccaguuaauuucagucuag

SEQ ID NO: 35591 - RNA, 1131 nt, Artificial Sequence
  derived and/or modified sequence
augguuguugucgccgcggcccccaaucccgcagaugguacacccaagguacugcuccuuucaggccaacccgccucugccgcaggggcacccgcaggacaggcccucccccucauggugcccgcacagagaggagccuccccagaggcagcaagcggcggacuuccucaggcuagaaaaagacagcgacucacccacuugucaccugaagaaaaagcccuucggagaaaauugaagaacagaguugcagcccagaccgccagggaccgaaagaaagcaagaaugagcgaguuggaacagcaggucgucgaucucgaagaggagaaucaaaagcuauuguuggaaaaucagcugcucagagaaaaaacucauggcuuggugguggagaaccaagaacugcgacaaagacucggcauggaugcacugguggcagaggaagaagcagaagcuaagggaaacgaagugcgacccguagccggaagcgccgagagcgcagcuggagcaggaccuguaguuaccccacccgagcaucugcccauggacuccggaggaauagacagcagcgauuccgaaagcgauauccuucuggguauccuggauaaccucgauccugucauguucuucaagugcccgucuccagaacccgcaucauuggaagagcugccggagguauacccagaaggcccaucaagucucccugcaucccuuagucucagcgucggcacgucuuccgcuaagcuugaggcaaucaacgaauuaaucagauuugaucauauuuauacuaaacccuugguccuugaaauuccuagugaaacugagucgcaggcgaacgugguugucaagauagaagaagcucccuugucccccagcgagaacgaccacccugaauucauugugagcgugaaagaggaaccuguugaagaugaucuggugccugaacugggcauaucaaauuuauuaagcagcucccauugcccuaagcccagcaguugccuccucgacgccuacuccgauugcggcuacgggggaagucuuucacccuucucggauaugagcagucuccucggcguuaaccacucaugggaagauacuuuugcgaaugaacuuuuuccacaauugaucaguguuuag

SEQ ID NO: 35592 - protein, 401 aa, Artificial Sequence
  derived and/or modified sequence
MWSGGSGKARGWEAAAGGRSSPGRLSRRRIMSMSPKHTTPFSVSDILSPLEESYKKVGMEGGGLGAPLAAYRQGQAAPPTAAMQQHAVGHHGAVTAAYHMTAAGVPQLSHSAVGGYCNGNLGNMSELPPYQDTMRNSASGPGWYGANPDPRFPAISRFMGPASGMNMSGMGGLGSLGDVSKNMAPLPSAPRRKRRVLFSQAQVYELERRFKQQKYLSAPEREHLASMIHLTPTQVKIWFQNHRYKMKRQAKDKAAQQQLQQDSGGGGGGGGTGCPQQQQAQQQSPRRVAVPVLVKDGKPCQAGAPAPGAASLQGHAQQQAQHQAQAAQAAAAAISVGSGGAGLGAHPGHQPGSAGQSPDLAHHAASPAALQGQVSSLSHLNSSGSDYGTMSCSTLLYGRTW

SEQ ID NO: 35593 - protein, 34 aa, Artificial Sequence
  derived and/or modified sequence
MWSGGSGKARGWEAAAGGRSSPGRLSAYAPPLVA

SEQ ID NO: 35594 - DNA, 1206 bp, Artificial Sequence
  derived and/or modified sequence
atgtggagcggcggcagcggcaaggccagaggctgggaggccgccgccggcggcagaagcagccccggcagactgagcagaagaagaatcatgagcatgagccccaagcacaccacccccttcagcgtgagcgacatcctgagccccctggaggagagctacaagaaggtgggcatggagggcggcggcctgggcgcccccctggccgcctacagacagggccaggccgccccccccaccgccgccatgcagcagcacgccgtgggccaccacggcgccgtgaccgccgcctaccacatgaccgccgccggcgtgccccagctgagccacagcgccgtgggcggctactgcaacggcaacctgggcaacatgagcgagctgcccccctaccaggacaccatgagaaacagcgccagcggccccggctggtacggcgccaaccccgaccccagattccccgccatcagcagattcatgggccccgccagcggcatgaacatgagcggcatgggcggcctgggcagcctgggcgacgtgagcaagaacatggcccccctgcccagcgcccccagaagaaagagaagagtgctgttcagccaggcccaggtgtacgagctggagagaagattcaagcagcagaagtacctgagcgcccccgagagagagcacctggccagcatgatccacctgacccccacccaggtgaagatctggttccagaaccacagatacaagatgaagagacaggccaaggacaaggccgcccagcagcagctgcagcaggacagcggcggcggcggcggcggcggcggcaccggctgcccccagcagcagcaggcccagcagcagagccccagaagagtggccgtgcccgtgctggtgaaggacggcaagccctgccaggccggcgcccccgcccccggcgccgccagcctgcagggccacgcccagcagcaggcccagcaccaggcccaggccgcccaggccgccgccgccgccatcagcgtgggcagcggcggcgccggcctgggcgcccaccccggccaccagcccggcagcgccggccagagccccgacctggcccaccacgccgccagccccgccgccctgcagggccaggtgagcagcctgagccacctgaacagcagcggcagcgactacggcaccatgagctgcagcaccctgctgtacggcagaacctggtag

SEQ ID NO: 35595 - DNA, 105 bp, Artificial Sequence
  derived and/or modified sequence
atgtggagcggcggcagcggcaaggccagaggctgggaggccgccgccggcggcagaagcagccccggcagactgagcgcctacgccccccccctggtggcctag

SEQ ID NO: 35596 - DNA, 1206 bp, Artificial Sequence
  derived and/or modified sequence
atgtggtctggggggtctggcaaggcgcgcggatgggaagcggccgctgggggccggtcttctccaggacgtctgagccgccgtcgcatcatgagtatgtcgcctaagcatactacacccttttctgtgtcggatatcttgtcccccttagaggagagttataagaaagtcggcatggaggggggaggattgggcgcaccattagctgcatacaggcaggggcaggccgccccccctaccgccgccatgcagcagcacgccgtgggtcatcacggcgcagtgaccgccgcctatcacatgaccgccgctggcgtaccacagctcagtcattccgctgtgggggggtactgtaatggcaacctcggaaatatgtcggagctgccaccataccaggataccatgcggaacagcgcatcaggacctggctggtacggcgctaatccagaccctaggttccctgctatttccagatttatgggcccggcatccggcatgaatatgtccggtatgggtggactgggcagcctcggcgatgtgagcaaaaacatggctccgttgccatcagccccccgacgaaagcggcgggttctgttctcacaggcccaggtctacgagctcgaaaggcgattcaagcaacagaagtatttgtccgccccagaaagagaacacctagcctccatgattcatctcactcctactcaagtgaagatttggtttcagaatcaccgttacaagatgaagagacaagctaaggacaaagccgctcagcagcagctgcaacaggattccgggggtggcgggggcgggggcggcacgggatgtcctcagcagcaacaagctcagcagcagtctcccagacgcgtcgccgtgcctgtgctggtaaaagatgggaaaccctgtcaggccggcgcccctgctccaggagccgcaagtttgcaaggtcatgcccagcagcaagcccaacatcaggcgcaggcagctcaggcagcagcagctgccatctccgtcggttccggaggggccggtctcggtgctcacccagggcatcagcccgggagtgctgggcaatcccccgatttggcccatcatgccgcttctcccgcagcccttcagggacaggtatcttccctgagccatctcaactcttccggtagcgactacggaaccatgagttgcagtacactcctttatggccggacatggtag

SEQ ID NO: 35597 - DNA, 105 bp, Artificial Sequence
  derived and/or modified sequence
atgtggtccggcgggtccgggaaagcaagggggtgggaagctgccgccggtgggcgaagctcccctggaaggctctcggcctatgcaccacctcttgtggcgtag

SEQ ID NO: 35598 - DNA, 1206 bp, Artificial Sequence
  derived and/or modified sequence
atgtggagcggcggcagcggcaaggcccggggctgggaggccgccgccggcggccgcagcagccctggccgcctgagcagaagacgcatcatgtccatgagccccaagcacaccacccccttctctgtgtctgacatcctgagccccctggaggagagctacaagaaggtgggcatggagggcggcggcctgggcgcccccctggccgcctaccggcagggccaggccgccccacccacagctgccatgcagcagcacgctgtgggccaccacggggctgtgacagctgcctaccacatgacagctgctggggtgccccagctgagccacagcgctgtgggcggctactgcaatggaaacctgggcaacatgtctgagctgcccccctaccaggacaccatgagaaattctgccagcggccctggctggtacggggccaacccagacccccgcttccctgccatcagccgcttcatgggccctgccagcggcatgaacatgagcggcatgggcggcctgggcagcctgggagatgtgtccaagaacatggcccccctgcccagcgcccccaggaggaagagaagagtgctcttcagccaggcccaggtgtatgagctggagcggcgcttcaagcagcagaagtacctgagcgcccctgagcgggagcacctggcctccatgatccacctgacccccacccaggtgaagatctggttccagaaccaccgctacaagatgaagaggcaggccaaggacaaggccgcccagcagcagctgcagcaggacagcggcggcggcggcggcggcggcggcaccggctgcccccagcagcagcaggcccagcagcagagcccccggcgggtggccgtgcctgtgctggtgaaggatggcaagccctgccaggccggggccccagcccctggagctgccagcctgcagggccacgcccagcagcaggcccagcaccaggcccaggccgcccaggccgctgctgctgccatctctgtgggcagcggcggggccggcctgggcgcccaccctggccaccagcccggcagcgctggccagagcccagacctggcccaccacgccgccagccctgctgccctgcagggccaggtgagcagcctgagccacctgaacagcagcggcagtgactatggcaccatgagctgcagcaccctgctgtatggccgcacctggtag

SEQ ID NO: 35599 - DNA, 105 bp, Artificial Sequence
  derived and/or modified sequence
atgtggagcggcggcagcggcaaggcccggggctgggaggccgccgccggcggccgcagcagccctggccgcctgagcgcctatgccccacccctggtggcctag

SEQ ID NO: 35600 - DNA, 1206 bp, Artificial Sequence
  derived and/or modified sequence
atgtggagcggcggcagcggcaaggcccggggctgggaggccgccgccggggggcgatccagcccgggacgcttgagtcgccgcagaataatgtcaatgagccccaaacatacgacacccttttcagtgtctgatatcctgtcccctcttgaggaaagttataaaaaggtaggaatggagggaggtgggctgggggctcctctcgctgcctatcgccaggggcaggccgccccccccactgcagctatgcaacagcatgccgtcggccaccacggggccgtgacagctgcgtatcatatgactgcggccggagtgccacagttatcccattcagcagtgggcggatattgtaacggcaatctcggcaatatgtccgagctgccaccataccaggatacaatgcgtaattcggccagcggtcctgggtggtatggcgcaaaccccgaccctagatttcccgctatctcacgtttcatggggcccgcctccggtatgaatatgagcggtatgggcggtttgggctcattaggagacgtgagtaagaacatggcccctcttccatcagcgcccagaagaaaaaggcgggtcctgttcagccaggcacaagtctatgagctagagcgtaggtttaagcagcaaaaatatttaagcgctcctgaacgggagcatctagcctcgatgatccacctcacaccaacccaggtgaaaatctggttccagaatcacaggtataaaatgaagcggcaggccaaggacaaggctgctcagcagcagctgcagcaagatagcggtggcggcggaggtggtggtggcacaggatgtccgcagcagcaacaggcccagcaacagtctcctcgaagagtagccgtgcccgtgctggtgaaggacggtaaaccctgtcaggccggcgcccccgcaccaggcgcagcctctttgcagggacatgcccaacagcaagctcaacatcaagcacaggcggcccaagcggccgctgcagcgatttctgttggcagcggcggcgctggacttggagcacatccaggtcaccagcctggtagcgccggacagtctccggaccttgcccaccatgctgccagccctgcggcactccaaggccaggtgtcatccttatcccacctcaactcctccggctccgactacggcacaatgtcttgctccacactgctgtacgggaggacttggtag

SEQ ID NO: 35601 - DNA, 105 bp, Artificial Sequence
  derived and/or modified sequence
atgtggagcggcggcagcggcaaggcccggggctgggaggccgccgccggtggtcgtagttcacccggccgtctatctgcatacgcccctcctttggttgcttag

SEQ ID NO: 35602 - DNA, 2186 bp, Artificial Sequence
  derived and/or modified sequence
agactgacagacacgtagaccaacagtgcggccccagggttcgtccccagactcgctcgctcatttgttggcgactggggctcagcgcagcgaagcccgatgtggtccggaggcagtgggaaggcgcggggctgggaggccgcggcgggagggaggagcagccccggcaggctcagccgccgccgaatcatgtcgatgagtccaaagcacacgactccgttctcagtgtctgacatcttgagtcccctggaggaaagctacaagaaagtgggcatggagggcggcggcctcggggctccgctggcggcgtacaggcagggccaggcggcaccgccaacagcggccatgcagcagcacgccgtggggcaccacggcgccgtcaccgccgcctaccacatgacggcggcgggggtgccccagctctcgcactccgccgtggggggctactgcaacggcaacctgggcaacatgagcgagctgccgccgtaccaggacaccatgaggaacagcgcctctggccccggatggtacggcgccaacccagacccgcgcttccccgccatctcccgcttcatgggcccggcgagcggcatgaacatgagcggcatgggcggcctgggctcgctgggggacgtgagcaagaacatggccccgctgccaagcgcgccgcgcaggaagcgccgggtgctcttctcgcaggcgcaggtgtacgagctggagcgacgcttcaagcaacagaagtacctgtcggcgccggagcgcgagcacctggccagcatgatccacctgacgcccacgcaggtcaagatctggttccagaaccaccgctacaaaatgaagcgccaggccaaggacaaggcggcgcagcagcaactgcagcaggacagcggcggcggcgggggcggcgggggcaccgggtgcccgcagcagcaacaggctcagcagcagtcgccgcgacgcgtggcggtgccggtcctggtgaaagacggcaaaccgtgccaggcgggtgcccccgcgccgggcgccgccagcctacaaggccacgcgcagcagcaggcgcagcaccaggcgcaggccgcgcaggcggcggcagcggccatctccgtgggcagcggtggcgccggccttggcgcacacccgggccaccagccaggcagcgcaggccagtctccggacctggcgcaccacgccgccagccccgcggcgctgcagggccaggtatccagcctgtcccacctgaactcctcgggctcggactacggcaccatgtcctgctccaccttgctatacggtcggacctggtgagaggacgccgggccggccctagcccagcgctctgcctcaccgcttccctcctgcccgccacacagaccaccatccaccgctgctccacgcgcttcgacttttcttaacaacctggccgcgtttagaccaaggaacaaaaaaaccacaaaggccaaactgctggacgtctttctttttttccccccctaaaatttgtgggtttttttttttaaaaaaagaaaatgaaaaacaaccaagcgcatccaatctcaaggaatctttaagcagagaagggcataaaacagctttggggtgtctttttttggtgattcaaatgggttttccacgctagggcggggcacagattggagagggctctgtgctgacatggctctggactctaaagaccaaacttcactctgggcacactctgccagcaaagaggactcgcttgtaaataccaggatttttttttttttttgaagggaggacgggagctggggagaggaaagagtcttcaacataacccacttgtcactgacacaaaggaagtgccccctccccggcaccctctggccgcctaggctcagcggcgaccgccctccgcgaaaatagtttgtttaatgtgaacttgtagctgtaaaacgctgtcaaaagttggactaaatgcctagtttttagtaatctgtacattttgttgtaaaaagaaaaaccactcccagtccccagcccttcacattttttatgggcattgacaaatctgtgtatattatttggcagtttggtatttgcggcgtcagtctttttctgttgtaacttatgtagatatttggcttaaatatagttcctaagaagcttctaataaattatacaaattaaaaagattctttttctgattaaaa

SEQ ID NO: 35603 - DNA, 2583 bp, Artificial Sequence
  derived and/or modified sequence
agcaacgcgggggacacccccgattccgctggggagcgcagcccacagctccccctcgccaggcgcccaaggaccctcaaggcgcggggcccacacttgaagcctgggaacgcgcagacaggaaaccctcttcctcctaagcagtttcttgctcgtcggatgagaggcgcccaattgaagcagaatgatcctcatctactaatatccagcgtggccacaaagcgactggccatttacgccaccactttaaacaaagatatttggttattcccgggaagcaagagcacttttgcatggctgagctgcgggcggaggcgagcctcggcccagcctcccgcccgctgagctgcccgcacctcggcattcgccccctcctggccagcgctccagccgccggggttcaggctcagttccgcccggcaacagacagacgggcactcacgccgctccctgctcgcgcgctccctgaagcatcagaggggaaaacagcgtggctctgggctcgggtgctggggctgtgatgtcctcggaaagtcagctccagccccagatccccgcgtgtctgggagatgggcgagggtcagggacaccagccgccgccgaatcatgtcgatgagtccaaagcacacgactccgttctcagtgtctgacatcttgagtcccctggaggaaagctacaagaaagtgggcatggagggcggcggcctcggggctccgctggcggcgtacaggcagggccaggcggcaccgccaacagcggccatgcagcagcacgccgtggggcaccacggcgccgtcaccgccgcctaccacatgacggcggcgggggtgccccagctctcgcactccgccgtggggggctactgcaacggcaacctgggcaacatgagcgagctgccgccgtaccaggacaccatgaggaacagcgcctctggccccggatggtacggcgccaacccagacccgcgcttccccgccatctcccgcttcatgggcccggcgagcggcatgaacatgagcggcatgggcggcctgggctcgctgggggacgtgagcaagaacatggccccgctgccaagcgcgccgcgcaggaagcgccgggtgctcttctcgcaggcgcaggtgtacgagctggagcgacgcttcaagcaacagaagtacctgtcggcgccggagcgcgagcacctggccagcatgatccacctgacgcccacgcaggtcaagatctggttccagaaccaccgctacaaaatgaagcgccaggccaaggacaaggcggcgcagcagcaactgcagcaggacagcggcggcggcgggggcggcgggggcaccgggtgcccgcagcagcaacaggctcagcagcagtcgccgcgacgcgtggcggtgccggtcctggtgaaagacggcaaaccgtgccaggcgggtgcccccgcgccgggcgccgccagcctacaaggccacgcgcagcagcaggcgcagcaccaggcgcaggccgcgcaggcggcggcagcggccatctccgtgggcagcggtggcgccggccttggcgcacacccgggccaccagccaggcagcgcaggccagtctccggacctggcgcaccacgccgccagccccgcggcgctgcagggccaggtatccagcctgtcccacctgaactcctcgggctcggactacggcaccatgtcctgctccaccttgctatacggtcggacctggtgagaggacgccgggccggccctagcccagcgctctgcctcaccgcttccctcctgcccgccacacagaccaccatccaccgctgctccacgcgcttcgacttttcttaacaacctggccgcgtttagaccaaggaacaaaaaaaccacaaaggccaaactgctggacgtctttctttttttccccccctaaaatttgtgggtttttttttttaaaaaaagaaaatgaaaaacaaccaagcgcatccaatctcaaggaatctttaagcagagaagggcataaaacagctttggggtgtctttttttggtgattcaaatgggttttccacgctagggcggggcacagattggagagggctctgtgctgacatggctctggactctaaagaccaaacttcactctgggcacactctgccagcaaagaggactcgcttgtaaataccaggatttttttttttttttgaagggaggacgggagctggggagaggaaagagtcttcaacataacccacttgtcactgacacaaaggaagtgccccctccccggcaccctctggccgcctaggctcagcggcgaccgccctccgcgaaaatagtttgtttaatgtgaacttgtagctgtaaaacgctgtcaaaagttggactaaatgcctagtttttagtaatctgtacattttgttgtaaaaagaaaaaccactcccagtccccagcccttcacattttttatgggcattgacaaatctgtgtatattatttggcagtttggtatttgcggcgtcagtctttttctgttgtaacttatgtagatatttggcttaaatatagttcctaagaagcttctaataaattatacaaattaaaaa

SEQ ID NO: 35604 - DNA, 1417 bp, Artificial Sequence
  derived and/or modified sequence
gcccgatgtggtccggaggcagtgggaaggcgcggggctgggaggccgcggcgggagggaggagcagccccggcaggctcagcgcttacgccccgcctctggtggctgcctaaaacctggcgccgggctaaaacaaacgcgaggcagcccccgagcctccactcaagccaattaaggaggactcggtccactccgttacgtgtacatccaacaagatcggcgttaagccgccgccgaatcatgtcgatgagtccaaagcacacgactccgttctcagtgtctgacatcttgagtcccctggaggaaagctacaagaaagtgggcatggagggcggcggcctcggggctccgctggcggcgtacaggcagggccaggcggcaccgccaacagcggccatgcagcagcacgccgtggggcaccacggcgccgtcaccgccgcctaccacatgacggcggcgggggtgccccagctctcgcactccgccgtggggggctactgcaacggcaacctgggcaacatgagcgagctgccgccgtaccaggacaccatgaggaacagcgcctctggccccggatggtacggcgccaacccagacccgcgcttccccgccatctcccgcttcatgggcccggcgagcggcatgaacatgagcggcatgggcggcctgggctcgctgggggacgtgagcaagaacatggccccgctgccaagcgcgccgcgcaggaagcgccgggtgctcttctcgcaggcgcaggtgtacgagctggagcgacgcttcaagcaacagaagtacctgtcggcgccggagcgcgagcacctggccagcatgatccacctgacgcccacgcaggtcaagatctggttccagaaccaccgctacaaaatgaagcgccaggccaaggacaaggcggcgcagcagcaactgcagcaggacagcggcggcggcgggggcggcgggggcaccgggtgcccgcagcagcaacaggctcagcagcagtcgccgcgacgcgtggcggtgccggtcctggtgaaagacggcaaaccgtgccaggcgggtgcccccgcgccgggcgccgccagcctacaaggccacgcgcagcagcaggcgcagcaccaggcgcaggccgcgcaggcggcggcagcggccatctccgtgggcagcggtggcgccggccttggcgcacacccgggccaccagccaggcagcgcaggccagtctccggacctggcgcaccacgccgccagccccgcggcgctgcagggccaggtatccagcctgtcccacctgaactcctcgggctcggactacggcaccatgtcctgctccaccttgctatacggtcggacctggtgagaggacgccgggccggccctagcccagcgctctgcctcaccgcttccctcctgcccgccac

SEQ ID NO: 35605 - DNA, 653 bp, Artificial Sequence
  derived and/or modified sequence
aatatccagcgtggccacaaagcgactggccatttacgccaccactttaaacaaagatatttggttattcccgggaagcaagagcacttttgcatggctgagctgcgggcggaggcgagcctcggcccagcctcccgcccgctgagctgcccgcacctcggcattcgccccctcctggccagcgctccagccgccggggttcaggctcagttccgcccggcaacagacagacgggcactcacgccgctccctgctcgcgcgctccctgaagcatcagaggggaaaacagcgtggctctgggctcgggtgctggggctgtgatgtcctcggaaagtcagctccagccccagatccccgcgtgtctgggagatgggcgagggtcagggacaccagggggaaagggggcggggagcagaggtgtccctctgacggcggcagaagagaggcagacagactgacagacacgtagaccaacagtgcggccccagggttcgtccccagactcgctcgctcatttgttggcgactggggctcagcgcagcgaagcccgatgtggtccggaggcagtgggaaggcgcggggctgggaggccgcggcgggagggaggagcagccccggcaggctcagcgcttacgccccgcctctggtggctg

SEQ ID NO: 35606 - DNA, 1206 bp, Artificial Sequence
  derived and/or modified sequence
atgtggtcggggggttcgggtaaggcacggggttgggaggcagctgcgggagggcgatcttccccgggtcgccttagcagacggcgtatcatgtcaatgtccccaaagcatactacacctttctcagtgagcgacatcttgtctccactggaggaatcttataaaaaagtggggatggaagggggagggctgggcgctccgttagctgcgtacaggcaaggccaggctgctcctccgactgctgcaatgcaacagcacgctgttggacaccacggagctgttactgcagcttaccatatgacagctgctggcgtcccgcagctgtcacactctgccgtggggggttactgcaatggcaaccttggcaatatgtccgaactccctccatatcaggacactatgcgcaattctgcttctggccctggatggtatggcgctaacccagaccccaggttccctgcaatcagccggtttatgggcccagcctcggggatgaatatgtccggcatgggagggctgggttctttgggcgatgtttcaaagaacatggcccctttgccttccgcacccagacggaaacggagagtcctcttcagccaggcccaagtgtatgagctggaacggaggttcaagcaacaaaaatacctcagcgccccagagcgcgaacatctggcatctatgatccatctgacgcccacccaggtaaagatctggttccagaaccaccggtataagatgaagcgccaggccaaggacaaggccgcacagcagcaactccaacaggatagcggtggcggagggggaggcggtggcactgggtgtccccagcagcagcaggctcaacagcagtccccccgaagagtcgctgtccccgtgctggtgaaagatggtaagccttgccaagccggagcaccagccccaggagcagccagcctgcaggggcatgcacagcagcaggcccaacaccaggcacaggccgcacaagctgccgcagcagcgatcagcgtgggctctgggggagccggacttggtgctcatcccggacaccagccgggatcggcgggacaatcgcccgatctggcgcaccacgccgcaagcccggcagctctgcagggacaggtgtcatcgctttcacatttgaacagctcagggagtgattacggtaccatgtcatgcagcacgcttttgtatgggcgtacatggtag

SEQ ID NO: 35607 - DNA, 105 bp, Artificial Sequence
  derived and/or modified sequence
atgtggagcggagggtctggcaaggcacgaggctgggaggctgccgcaggaggacggagtagtccaggcagactgtctgcttatgctcccccactcgtggcgtag

SEQ ID NO: 35608 - protein, 1134 aa, Artificial Sequence
  derived and/or modified sequence
MMSPNGSVPPIYVPPGYAPQVIEDNGVRRVVVVPQAPEFHPGSHTVLHRSPHPPLPGFIPVPTMMPPPPRHMYSPVTGAGDMTTQYMPQYQSSQVYGDVDAHSTHGRSNFRDERSSKTYERLQKKLKDRQGTQKDKMSSPPSSPQKCPSPINEHNGLIKGQIAGGINTGSAKIKSGKGKGGTQVDTEIEEKDEETKAFEALLSNIVKPVASDIQARTVVLTWSPPSSLINGETDESSVPELYGYEVLISSTGKDGKYKSVYVGEETNITLNDLKPAMDYHAKVQAEYNSIKGTPSEAEIFTTLSCEPDIPNPPRIANRTKNSLTLQWKAPSDNGSKIQNFVLEWDEGKGNGEFCQCYMGSQKQFKITKLSPAMGCKFRLSARNDYGTSGFSEEVLYYTSGCAPSMPASPVLTKAGITWLSLQWSKPSGTPSDEGISYILEMEEETSGYGFKPKYDGEDLAYTVKNLRRSTKYKFKVIAYNSEGKSNPSEVVEFTTCPDKPGIPVKPSVKGKIHSHSFKITWDPPKDNGGATINKYVVEMAEGSNGNKWEMIYSGATREHLCDRLNPGCFYRLRVYCISDGGQSAVSESLLVQTPAVPPGPCLPPRLQGRPKAKEIQLRWGPPLVDGGSPISCYSVEMSPIEKDEPREVYQGSEVECTVSSLLPGKTYSFRLRAANKMGFGPFSEKCDITTAPGPPDQCKPPQVTCRSATCAQVNWEVPLSNGTDVTEYRLEWGGVEGSMQICYCGPGLSYEIKGLSPATTYYCRVQALSVVGAGPFSEVVACVTPPSVPGIVTCLQEISDDEIENPHYSPSTCLAISWEKPCDHGSEILAYSIDFGDKQSLTVGKVTSYIINNLQPDTTYRIRIQALNSLGAGPFSHMIKLKTKPLPPDPPRLECVAFSHQNLKLKWGEGTPKTLSTDSIQYHLQMEDKNGRFVSLYRGPCHTYKVQRLNESTSYKFCIQACNEAGEGPLSQEYIFTTPKSVPAALKAPKIEKVNDHICEITWECLQPMKGDPVIYSLQVMLGKDSEFKQIYKGPDSSFRYSSLQLNCEYRFRVCAIRQCQDSLGHQDLVGPYSTTVLFISQRTEPPASTNRDTVESTRTRRALSDEQCAAVILVLFAFFSILIAFIIQYFVIK

SEQ ID NO: 35609 - protein, 1198 aa, Artificial Sequence
  derived and/or modified sequence
MAEHPPLLDTTQILSSDISLLSAPIVSADGTQQVILVQVNPGEAFTIRREDGQFQCITGPAQVPMMSPNGSVPPIYVPPGYAPQVIEDNGVRRVVVVPQAPEFHPGSHTVLHRSPHPPLPGFIPVPTMMPPPPRHMYSPVTGAGDMTTQYMPQYQSSQVYGDVDAHSTHGRSNFRDERSSKTYERLQKKLKDRQGTQKDKMSSPPSSPQKCPSPINEHNGLIKGQIAGGINTGSAKIKSGKGKGGTQVDTEIEEKDEETKAFEALLSNIVKPVASDIQARTVVLTWSPPSSLINGETDESSVPELYGYEVLISSTGKDGKYKSVYVGEETNITLNDLKPAMDYHAKVQAEYNSIKGTPSEAEIFTTLSCEPDIPNPPRIANRTKNSLTLQWKAPSDNGSKIQNFVLEWDEGKGNGEFCQCYMGSQKQFKITKLSPAMGCKFRLSARNDYGTSGFSEEVLYYTSGCAPSMPASPVLTKAGITWLSLQWSKPSGTPSDEGISYILEMEEETSGYGFKPKYDGEDLAYTVKNLRRSTKYKFKVIAYNSEGKSNPSEVVEFTTCPDKPGIPVKPSVKGKIHSHSFKITWDPPKDNGGATINKYVVEMAEGSNGNKWEMIYSGATREHLCDRLNPGCFYRLRVYCISDGGQSAVSESLLVQTPAVPPGPCLPPRLQGRPKAKEIQLRWGPPLVDGGSPISCYSVEMSPIEKDEPREVYQGSEVECTVSSLLPGKTYSFRLRAANKMGFGPFSEKCDITTAPGPPDQCKPPQVTCRSATCAQVNWEVPLSNGTDVTEYRLEWGGVEGSMQICYCGPGLSYEIKGLSPATTYYCRVQALSVVGAGPFSEVVACVTPPSVPGIVTCLQEISDDEIENPHYSPSTCLAISWEKPCDHGSEILAYSIDFGDKQSLTVGKVTSYIINNLQPDTTYRIRIQALNSLGAGPFSHMIKLKTKPLPPDPPRLECVAFSHQNLKLKWGEGTPKTLSTDSIQYHLQMEDKNGRFVSLYRGPCHTYKVQRLNESTSYKFCIQACNEAGEGPLSQEYIFTTPKSVPAALKAPKIEKVNDHICEITWECLQPMKGDPVIYSLQVMLGKDSEFKQIYKGPDSSFRYSSLQLNCEYRFRVCAIRQCQDSLGHQDLVGPYSTTVLFISQRTEPPASTNRDTVESTRTRRALSDEQCAAVILVLFAFFSILIAFIIQYFVIK

SEQ ID NO: 35610 - protein, 684 aa, Artificial Sequence
  derived and/or modified sequence
MAEHPPLLDTTQILSSDISLLSAPIVSADGTQQVILVQVNPGEAFTIRREDGQFQCITGPAQVPMMSPNGSVPPIYVPPGYAPQVIEDNGVRRVVVVPQAPEFHPGSHTVLHRSPHPPLPGFIPVPTMMPPPPRHMYSPVTGAGDMTTQYMPQYQSSQVYGDVDAHSTHGRSNFRDERSSKTYERLQKKLKDRQGTQKDKMSSPPSSPQKCPSPINEHNGLIKGQIAGGINTGSAKIKSGKGKGGTQVDTEIEEKDEETKAFEALLSNIVKPVASDIQARTVVLTWSPPSSLINGETDESSVPELYGYEVLISSTGKDGKYKSVYVGEETNITLNDLKPAMDYHAKVQAEYNSIKGTPSEAEIFTTLSCEPDIPNPPRIANRTKNSLTLQWKAPSDNGSKIQNFVLEWDEGKGNGEFCQCYMGSQKQFKITKLSPAMGCKFRLSARNDYGTSGFSEEVLYYTSGCAPSMPASPVLTKAGITWLSLQWSKPSGTPSDEGISYILEMEEETSGYGFKPKYDGEDLAYTVKNLRRSTKYKFKVIAYNSEGKSNPSEVVEFTTCPDKPGIPVKPSVKGKIHSHSFKITWDPPKDNGGATINKYVVEMAEGSNGNKWEMIYSGATREHLCDRLNPGCFYRLRVYCISDGGQSAVSESLLVQTPAVPPGPCLPPRLQGRPKAKEIQTPSG

SEQ ID NO: 35611 - DNA, 3405 bp, Artificial Sequence
  derived and/or modified sequence
atgatgagccccaacggcagcgtgccccccatctacgtgccccccggctacgccccccaggtgatcgaggacaacggcgtgagaagagtggtggtggtgccccaggcccccgagttccaccccggcagccacaccgtgctgcacagaagcccccacccccccctgcccggcttcatccccgtgcccaccatgatgccccccccccccagacacatgtacagccccgtgaccggcgccggcgacatgaccacccagtacatgccccagtaccagagcagccaggtgtacggcgacgtggacgcccacagcacccacggcagaagcaacttcagagacgagagaagcagcaagacctacgagagactgcagaagaagctgaaggacagacagggcacccagaaggacaagatgagcagcccccccagcagcccccagaagtgccccagccccatcaacgagcacaacggcctgatcaagggccagatcgccggcggcatcaacaccggcagcgccaagatcaagagcggcaagggcaagggcggcacccaggtggacaccgagatcgaggagaaggacgaggagaccaaggccttcgaggccctgctgagcaacatcgtgaagcccgtggccagcgacatccaggccagaaccgtggtgctgacctggagcccccccagcagcctgatcaacggcgagaccgacgagagcagcgtgcccgagctgtacggctacgaggtgctgatcagcagcaccggcaaggacggcaagtacaagagcgtgtacgtgggcgaggagaccaacatcaccctgaacgacctgaagcccgccatggactaccacgccaaggtgcaggccgagtacaacagcatcaagggcacccccagcgaggccgagatcttcaccaccctgagctgcgagcccgacatccccaacccccccagaatcgccaacagaaccaagaacagcctgaccctgcagtggaaggcccccagcgacaacggcagcaagatccagaacttcgtgctggagtgggacgagggcaagggcaacggcgagttctgccagtgctacatgggcagccagaagcagttcaagatcaccaagctgagccccgccatgggctgcaagttcagactgagcgccagaaacgactacggcaccagcggcttcagcgaggaggtgctgtactacaccagcggctgcgcccccagcatgcccgccagccccgtgctgaccaaggccggcatcacctggctgagcctgcagtggagcaagcccagcggcacccccagcgacgagggcatcagctacatcctggagatggaggaggagaccagcggctacggcttcaagcccaagtacgacggcgaggacctggcctacaccgtgaagaacctgagaagaagcaccaagtacaagttcaaggtgatcgcctacaacagcgagggcaagagcaaccccagcgaggtggtggagttcaccacctgccccgacaagcccggcatccccgtgaagcccagcgtgaagggcaagatccacagccacagcttcaagatcacctgggacccccccaaggacaacggcggcgccaccatcaacaagtacgtggtggagatggccgagggcagcaacggcaacaagtgggagatgatctacagcggcgccaccagagagcacctgtgcgacagactgaaccccggctgcttctacagactgagagtgtactgcatcagcgacggcggccagagcgccgtgagcgagagcctgctggtgcagacccccgccgtgccccccggcccctgcctgccccccagactgcagggcagacccaaggccaaggagatccagctgagatggggcccccccctggtggacggcggcagccccatcagctgctacagcgtggagatgagccccatcgagaaggacgagcccagagaggtgtaccagggcagcgaggtggagtgcaccgtgagcagcctgctgcccggcaagacctacagcttcagactgagagccgccaacaagatgggcttcggccccttcagcgagaagtgcgacatcaccaccgcccccggcccccccgaccagtgcaagcccccccaggtgacctgcagaagcgccacctgcgcccaggtgaactgggaggtgcccctgagcaacggcaccgacgtgaccgagtacagactggagtggggcggcgtggagggcagcatgcagatctgctactgcggccccggcctgagctacgagatcaagggcctgagccccgccaccacctactactgcagagtgcaggccctgagcgtggtgggcgccggccccttcagcgaggtggtggcctgcgtgaccccccccagcgtgcccggcatcgtgacctgcctgcaggagatcagcgacgacgagatcgagaacccccactacagccccagcacctgcctggccatcagctgggagaagccctgcgaccacggcagcgagatcctggcctacagcatcgacttcggcgacaagcagagcctgaccgtgggcaaggtgaccagctacatcatcaacaacctgcagcccgacaccacctacagaatcagaatccaggccctgaacagcctgggcgccggccccttcagccacatgatcaagctgaagaccaagcccctgccccccgacccccccagactggagtgcgtggccttcagccaccagaacctgaagctgaagtggggcgagggcacccccaagaccctgagcaccgacagcatccagtaccacctgcagatggaggacaagaacggcagattcgtgagcctgtacagaggcccctgccacacctacaaggtgcagagactgaacgagagcaccagctacaagttctgcatccaggcctgcaacgaggccggcgagggccccctgagccaggagtacatcttcaccacccccaagagcgtgcccgccgccctgaaggcccccaagatcgagaaggtgaacgaccacatctgcgagatcacctgggagtgcctgcagcccatgaagggcgaccccgtgatctacagcctgcaggtgatgctgggcaaggacagcgagttcaagcagatctacaagggccccgacagcagcttcagatacagcagcctgcagctgaactgcgagtacagattcagagtgtgcgccatcagacagtgccaggacagcctgggccaccaggacctggtgggcccctacagcaccaccgtgctgttcatcagccagagaaccgagccccccgccagcaccaacagagacaccgtggagagcaccagaaccagaagagccctgagcgacgagcagtgcgccgccgtgatcctggtgctgttcgccttcttcagcatcctgatcgccttcatcatccagtacttcgtgatcaagtag

SEQ ID NO: 35612 - DNA, 3597 bp, Artificial Sequence
  derived and/or modified sequence
atggccgagcacccccccctgctggacaccacccagatcctgagcagcgacatcagcctgctgagcgcccccatcgtgagcgccgacggcacccagcaggtgatcctggtgcaggtgaaccccggcgaggccttcaccatcagaagagaggacggccagttccagtgcatcaccggccccgcccaggtgcccatgatgagccccaacggcagcgtgccccccatctacgtgccccccggctacgccccccaggtgatcgaggacaacggcgtgagaagagtggtggtggtgccccaggcccccgagttccaccccggcagccacaccgtgctgcacagaagcccccacccccccctgcccggcttcatccccgtgcccaccatgatgccccccccccccagacacatgtacagccccgtgaccggcgccggcgacatgaccacccagtacatgccccagtaccagagcagccaggtgtacggcgacgtggacgcccacagcacccacggcagaagcaacttcagagacgagagaagcagcaagacctacgagagactgcagaagaagctgaaggacagacagggcacccagaaggacaagatgagcagcccccccagcagcccccagaagtgccccagccccatcaacgagcacaacggcctgatcaagggccagatcgccggcggcatcaacaccggcagcgccaagatcaagagcggcaagggcaagggcggcacccaggtggacaccgagatcgaggagaaggacgaggagaccaaggccttcgaggccctgctgagcaacatcgtgaagcccgtggccagcgacatccaggccagaaccgtggtgctgacctggagcccccccagcagcctgatcaacggcgagaccgacgagagcagcgtgcccgagctgtacggctacgaggtgctgatcagcagcaccggcaaggacggcaagtacaagagcgtgtacgtgggcgaggagaccaacatcaccctgaacgacctgaagcccgccatggactaccacgccaaggtgcaggccgagtacaacagcatcaagggcacccccagcgaggccgagatcttcaccaccctgagctgcgagcccgacatccccaacccccccagaatcgccaacagaaccaagaacagcctgaccctgcagtggaaggcccccagcgacaacggcagcaagatccagaacttcgtgctggagtgggacgagggcaagggcaacggcgagttctgccagtgctacatgggcagccagaagcagttcaagatcaccaagctgagccccgccatgggctgcaagttcagactgagcgccagaaacgactacggcaccagcggcttcagcgaggaggtgctgtactacaccagcggctgcgcccccagcatgcccgccagccccgtgctgaccaaggccggcatcacctggctgagcctgcagtggagcaagcccagcggcacccccagcgacgagggcatcagctacatcctggagatggaggaggagaccagcggctacggcttcaagcccaagtacgacggcgaggacctggcctacaccgtgaagaacctgagaagaagcaccaagtacaagttcaaggtgatcgcctacaacagcgagggcaagagcaaccccagcgaggtggtggagttcaccacctgccccgacaagcccggcatccccgtgaagcccagcgtgaagggcaagatccacagccacagcttcaagatcacctgggacccccccaaggacaacggcggcgccaccatcaacaagtacgtggtggagatggccgagggcagcaacggcaacaagtgggagatgatctacagcggcgccaccagagagcacctgtgcgacagactgaaccccggctgcttctacagactgagagtgtactgcatcagcgacggcggccagagcgccgtgagcgagagcctgctggtgcagacccccgccgtgccccccggcccctgcctgccccccagactgcagggcagacccaaggccaaggagatccagctgagatggggcccccccctggtggacggcggcagccccatcagctgctacagcgtggagatgagccccatcgagaaggacgagcccagagaggtgtaccagggcagcgaggtggagtgcaccgtgagcagcctgctgcccggcaagacctacagcttcagactgagagccgccaacaagatgggcttcggccccttcagcgagaagtgcgacatcaccaccgcccccggcccccccgaccagtgcaagcccccccaggtgacctgcagaagcgccacctgcgcccaggtgaactgggaggtgcccctgagcaacggcaccgacgtgaccgagtacagactggagtggggcggcgtggagggcagcatgcagatctgctactgcggccccggcctgagctacgagatcaagggcctgagccccgccaccacctactactgcagagtgcaggccctgagcgtggtgggcgccggccccttcagcgaggtggtggcctgcgtgaccccccccagcgtgcccggcatcgtgacctgcctgcaggagatcagcgacgacgagatcgagaacccccactacagccccagcacctgcctggccatcagctgggagaagccctgcgaccacggcagcgagatcctggcctacagcatcgacttcggcgacaagcagagcctgaccgtgggcaaggtgaccagctacatcatcaacaacctgcagcccgacaccacctacagaatcagaatccaggccctgaacagcctgggcgccggccccttcagccacatgatcaagctgaagaccaagcccctgccccccgacccccccagactggagtgcgtggccttcagccaccagaacctgaagctgaagtggggcgagggcacccccaagaccctgagcaccgacagcatccagtaccacctgcagatggaggacaagaacggcagattcgtgagcctgtacagaggcccctgccacacctacaaggtgcagagactgaacgagagcaccagctacaagttctgcatccaggcctgcaacgaggccggcgagggccccctgagccaggagtacatcttcaccacccccaagagcgtgcccgccgccctgaaggcccccaagatcgagaaggtgaacgaccacatctgcgagatcacctgggagtgcctgcagcccatgaagggcgaccccgtgatctacagcctgcaggtgatgctgggcaaggacagcgagttcaagcagatctacaagggccccgacagcagcttcagatacagcagcctgcagctgaactgcgagtacagattcagagtgtgcgccatcagacagtgccaggacagcctgggccaccaggacctggtgggcccctacagcaccaccgtgctgttcatcagccagagaaccgagccccccgccagcaccaacagagacaccgtggagagcaccagaaccagaagagccctgagcgacgagcagtgcgccgccgtgatcctggtgctgttcgccttcttcagcatcctgatcgccttcatcatccagtacttcgtgatcaagtag

SEQ ID NO: 35613 - DNA, 2055 bp, Artificial Sequence
  derived and/or modified sequence
atggccgagcacccccccctgctggacaccacccagatcctgagcagcgacatcagcctgctgagcgcccccatcgtgagcgccgacggcacccagcaggtgatcctggtgcaggtgaaccccggcgaggccttcaccatcagaagagaggacggccagttccagtgcatcaccggccccgcccaggtgcccatgatgagccccaacggcagcgtgccccccatctacgtgccccccggctacgccccccaggtgatcgaggacaacggcgtgagaagagtggtggtggtgccccaggcccccgagttccaccccggcagccacaccgtgctgcacagaagcccccacccccccctgcccggcttcatccccgtgcccaccatgatgccccccccccccagacacatgtacagccccgtgaccggcgccggcgacatgaccacccagtacatgccccagtaccagagcagccaggtgtacggcgacgtggacgcccacagcacccacggcagaagcaacttcagagacgagagaagcagcaagacctacgagagactgcagaagaagctgaaggacagacagggcacccagaaggacaagatgagcagcccccccagcagcccccagaagtgccccagccccatcaacgagcacaacggcctgatcaagggccagatcgccggcggcatcaacaccggcagcgccaagatcaagagcggcaagggcaagggcggcacccaggtggacaccgagatcgaggagaaggacgaggagaccaaggccttcgaggccctgctgagcaacatcgtgaagcccgtggccagcgacatccaggccagaaccgtggtgctgacctggagcccccccagcagcctgatcaacggcgagaccgacgagagcagcgtgcccgagctgtacggctacgaggtgctgatcagcagcaccggcaaggacggcaagtacaagagcgtgtacgtgggcgaggagaccaacatcaccctgaacgacctgaagcccgccatggactaccacgccaaggtgcaggccgagtacaacagcatcaagggcacccccagcgaggccgagatcttcaccaccctgagctgcgagcccgacatccccaacccccccagaatcgccaacagaaccaagaacagcctgaccctgcagtggaaggcccccagcgacaacggcagcaagatccagaacttcgtgctggagtgggacgagggcaagggcaacggcgagttctgccagtgctacatgggcagccagaagcagttcaagatcaccaagctgagccccgccatgggctgcaagttcagactgagcgccagaaacgactacggcaccagcggcttcagcgaggaggtgctgtactacaccagcggctgcgcccccagcatgcccgccagccccgtgctgaccaaggccggcatcacctggctgagcctgcagtggagcaagcccagcggcacccccagcgacgagggcatcagctacatcctggagatggaggaggagaccagcggctacggcttcaagcccaagtacgacggcgaggacctggcctacaccgtgaagaacctgagaagaagcaccaagtacaagttcaaggtgatcgcctacaacagcgagggcaagagcaaccccagcgaggtggtggagttcaccacctgccccgacaagcccggcatccccgtgaagcccagcgtgaagggcaagatccacagccacagcttcaagatcacctgggacccccccaaggacaacggcggcgccaccatcaacaagtacgtggtggagatggccgagggcagcaacggcaacaagtgggagatgatctacagcggcgccaccagagagcacctgtgcgacagactgaaccccggctgcttctacagactgagagtgtactgcatcagcgacggcggccagagcgccgtgagcgagagcctgctggtgcagacccccgccgtgccccccggcccctgcctgccccccagactgcagggcagacccaaggccaaggagatccagacccccagcggctag

SEQ ID NO: 35614 - DNA, 6161 bp, Artificial Sequence
  derived and/or modified sequence
gagttaaccacctgttcagtcgggaggtggactcgaggctgcagtcctcgcccggttttaacaacctggatcttcgaacttttgacacggctttggaaacgacgtcatgtgttagaattggagcgttattcagtatattaatgtcttattgataatggcagaacatccaccactactggatacaactcagatcttaagtagtgatatttctcttttgtctgcccctattgtaagtgcagatggaacacaacaggttcccctgggaagtgccagtcttacaacataaactaacaggaagggtaatgctttaagtgtacaggcctagtttctttttgggagaacctacagcaggatgtgaacattctgtgccaagcctccaggggtcctgctcaggttccaatgatgtccccaaatggttctgtgcctcctatctatgtgcctcctggatatgccccacaggttattgaagacaatggtgttcgaagagttgtcgtggtccctcaggcaccagagtttcaccctggtagtcacacagttctccaccgttctccacatcctcctctacctggtttcattcctgtcccaactatgatgccgcctccaccacgtcatatgtactcacccgtgactggagctggagacatgacaacacagtatatgccacagtatcagtcttcacaagtctatggagatgtagatgctcactctacacatggaaggtccaactttagagatgaacgatctagtaaaacatatgaacgtttgcagaaaaaattgaaggatcgccaaggaacacagaaagataaaatgagcagtccaccatcatcaccccagaaatgcccttctcccattaatgaacataatggacttataaaaggacaaattgctggtggtataaacacaggatcagcaaaaatcaagtctgggaaggggaaaggtggtacacaagttgatacagaaattgaagaaaaagatgaagaaactaaagcatttgaagcacttctttccaacattgtcaaaccagtggcctccgacatccaggcaaggacagtagtacttacctggtcaccaccttccagcctcattaatggtgaaacagatgaaagtagtgtaccagagctctatggttatgaagttctgatctcaagtactggaaaagatgggaaatacaaaagtgtatatgtaggagaagaaacaaatatcactttaaatgatctcaagccagccatggattaccatgcaaaagtccaggcagaatataattctataaagggaactccttcagaggctgaaatctttaccaccttgagctgtgaacctgatatacctaatccaccaaggatagccaatcggaccaaaaattcactcactttgcaatggaaggcacctagtgacaatggttctaaaatccaaaactttgtattagaatgggatgaaggaaaaggaaatggagaattttgtcagtgttacatgggctcacagaaacaatttaaaattactaaactttcaccagcaatgggctgtaaattcagactatcggccagaaatgactatggtacaagtggttttagtgaagaagtcttatattacacctcaggctgtgctccttctatgccagcaagtcctgtattaaccaaggctggaattacttggttatccttacaatggagtaagccctcaggaacaccatcagatgaaggaatttcttacattttagagatggaggaagaaacttcaggatatggttttaagcctaaatatgatggagaagatcttgcttacacagtgaaaaatctcagacgtagtactaagtataaatttaaggttattgcttacaactcagaaggtaaaagtaatccaagtgaagtagtagaatttactacttgccctgataaaccaggcatacctgtaaagccttcagtgaaaggaaagatacattcacacagttttaaaataacctgggatccaccaaaagacaatggcggagcaaccatcaataaatatgtagtggagatggcagaaggttctaacggaaacaaatgggaaatgatatacagtggtgctaccagggaacatctttgtgatcgactgaatccaggctgtttctatcgtttacgagtttactgcatcagtgatggaggacagagtgcggtctctgaatctttacttgtgcagactccagctgtgcctcctggcccatgcctccctcccagattacagggtagacccaaagcaaaagaaatacagttacgatggggaccccctctggttgatggtggatcacccatttcctgttacagtgtggaaatgtctcctatagaaaaagatgaacctagagaagtttaccaaggttctgaagtagaatgtacagtgagcagccttcttcctggaaagacatacagcttcagactacgtgcagctaacaaaatggggtttggaccattttcagaaaaatgtgatattactacagcccctgggccaccagatcagtgcaagccccctcaagtgacatgtagatctgcaacttgtgcacaagtgaattgggaggttcctttgagtaatggaacagatgtcactgaatatcgactggagtggggaggagttgaaggaagtatgcagatatgttactgtgggcctggtctcagttatgaaataaaaggactttcaccagcaactacctattattgcagggtccaggctctgagtgttgtgggtgcaggccctttcagtgaagtagtagcctgtgtgactccaccatcagttcctggcattgtgacctgtcttcaagaaataagcgatgatgagatagaaaatccccattattcaccttctacatgccttgcaataagctgggaaaagccttgtgatcatggttcggaaatccttgcctacagcatagactttggagataaacaatccctaacagtgggaaaggttacaagctatattatcaacaatttgcaaccagatacaacatacagaatacgaattcaagccttgaatagccttggagctggtcctttcagccatatgataaaattaaaaactaagcctctccctcctgatccacctcgtctggaatgtgttgcctttagccaccagaaccttaagctgaaatggggagaaggaactccaaagacattgtcaaccgattctattcagtaccaccttcagatggaggataagaatggacggtttgtatccctatacagaggaccatgtcatacatacaaagtacaaagacttaatgagtcaacatcctataaattctgtattcaagcttgtaatgaagctggggaaggtcccctctcccaagaatatattttcactactccaaaatctgtcccagctgccttgaaagcccccaaaatagagaaagtaaatgatcacatttgtgaaattacatgggagtgtttacagccaatgaaaggtgatccagttatttacagtcttcaagttatgttgggaaaagattcagaattcaaacagatttacaagggtcccgactcttccttccggtattccagccttcagctgaactgtgaatatcgcttccgtgtatgtgccattcgccagtgccaagactctctgggacaccaggacctcgtaggtccctacagcaccacagtgctcttcatctctcagaggactgaaccaccagccagcaccaacagagacactgtggaaagcacaaggacccgacgggcactgagtgacgagcagtgtgctgccgtcatccttgtgctgtttgctttcttttccattttgattgcctttatcattcagtactttgtaatcaagtgaaaatataactttattttttaactctattacattttattttgtcatgtactaaaattatttctgtattgcttttataaaaaacagtggcatttagcactggcattgagactatagcacatcatttttgccattttcagtgcttatattgttaggtagaggctggcactttattagaatgcaagccacaaaaatatcaattttgttttttttgttagggtgggtcttctttttttctttccctctctctttttttaacaaatgccttcttatagaaaaactttctaagaggcaacaatttagaatggatattttgacgaatcggcatgagtgtaacagtgataacctgatctgtttgttttaaagattattaccaagtgaaaaattcagaatgaatagaatttacactaacatgctatataaaatgttaaagtctgatgctgtgaaagcaatctagtgctatatttctacctcctcatttgtcttaattatttggtaagtgggattatgatgagtaactggaggggcttagaaacaaaaactggatgaaagagtatgcatgaagaaaagcttctttgataaatgtggagttcttcattataaatatatattcatgaattcacagataagtacttaaagaacagacagtttacttggcctaaaaatattttgatgtttactcaaaaagtacctcttcaggtcttgagaacatggaaaagaattgagtgcttttaaatactttttagaaagtaatcataaaagtaaattgaatttcaaacctatttggcttctgttttgtgaacctttgaactatatgtatgtgtataagggtatacacatacatatatggcatataacaagtgtacacatatacacataacaagtgtagaagtatatattacatacatacactcactctgtctggtataggctaattttgaagaactcccataagtttctgctgcttctcccataactgctgccaccaccatcagaattcataatcaaacctaacctttttgtttggggcaccaaatctgaagacaaaattaatttgcaccagtaaacttcaagctgctttctttcttgaaaactaaacgtttaacgtataatgtctgtttggatactgttccaaattgttgattgcatgtggttaatgttgcattagagcactttgcaattgcataattcattaatgttttgtgagcttgcatttgtgagttattggatgatcagactgaattttgtcaagtatcacattgtacatcttgcctagatgtcgatgactgcaagtaataatacagtttataatgaaactatctacaattcttgttttagcacatctgttatccgtaaaacacctgtaactagcttttttaatttattatttgaattttaggatagcgaatcactaatttttagttgctgaggttggcattttagtgattattaagcacttctgtcagtctttgaaaaaagaacgtattttttgtgctttgaagatctctgaagaatttcttttataatagaatgggcatgtattgtaacagttttatgtcaaatgatctgtgctgtagaaaaacattaacccttgttcaaaaaagaaatggataaacttggcctttctaagtggtaagaatgacctgtcactataatatactgtatgtttacattttatttaaatttaatctcttatgtatagggtgataaccttccccagaaacaacagtgattgcgattgttttctagaaacttctttaaagtgccacatttggcagtacaaatgagtctgagtgtaatagcccagagatttatatatagttgaatgtctaaaatggtaaaatgtgccactgtgtcaagttacagtggcttatgtttttcatagtaattcaaatgaacttcctatttttgatagtaaatgtcatttaatagtatacttgccatttgagcctcactgcaaaattagtgcagaggagaaaacaatttttaatgtaatcttgattttacctcatatactgtacattccaaaaactctaaactttttaaagattatagatacactaccaaacatatcaccttaaaattgtataaggctgaatgaacttcatacaaatgaaaaaaatctcataaaaatacataaactatgtagcaaaagtatctgtaaaatccatggaaaataaaagttgtatcattctttttgagatacgtttattgtattcatatatattcattatttgctacctgtttaagaaagtgaaatgttatggtctcccctcttccaatgagcttaaaacatttttcccaacagtatataaatcttcaacatgagaggatgtatatttattatataaagcccagta

SEQ ID NO: 35615 - DNA, 4841 bp, Artificial Sequence
  derived and/or modified sequence
ctcccggctccgtagtaagcatggcggcggcggcgttcgtggtccctcgggtgaaacagaaagcgggagctacgcggagagggagcgaagagcggggctgaggcggcggcgtcactgccaggaaacaaccccaacagtcagcgcgccggcggccgcggcggccctgagagctgactctgcagctgaggtagagagacaacgatcaggaaccctaagaagaggcgccagaggagccgccttctgcctcagaacggcgtgactcggagaattggagcgttattcagtatattaatgtcttattgataatggcagaacatccaccactactggatacaactcagatcttaagtagtgatatttctcttttgtctgcccctattgtaagtgcagatggaacacaacaggttattctggtacaagttaacccaggagaagcatttacaataagaagagaagatggacagtttcagtgcattacaggtcctgctcaggttccaatgatgtccccaaatggttctgtgcctcctatctatgtgcctcctggatatgccccacaggttattgaagacaatggtgttcgaagagttgtcgtggtccctcaggcaccagagtttcaccctggtagtcacacagttctccaccgttctccacatcctcctctacctggtttcattcctgtcccaactatgatgccgcctccaccacgtcatatgtactcacccgtgactggagctggagacatgacaacacagtatatgccacagtatcagtcttcacaagtctatggagatgtagatgctcactctacacatggaaggtccaactttagagatgaacgatctagtaaaacatatgaacgtttgcagaaaaaattgaaggatcgccaaggaacacagaaagataaaatgagcagtccaccatcatcaccccagaaatgcccttctcccattaatgaacataatggacttataaaaggacaaattgctggtggtataaacacaggatcagcaaaaatcaagtctgggaaggggaaaggtggtacacaagttgatacagaaattgaagaaaaagatgaagaaactaaagcatttgaagcacttctttccaacattgtcaaaccagtggcctccgacatccaggcaaggacagtagtacttacctggtcaccaccttccagcctcattaatggtgaaacagatgaaagtagtgtaccagagctctatggttatgaagttctgatctcaagtactggaaaagatgggaaatacaaaagtgtatatgtaggagaagaaacaaatatcactttaaatgatctcaagccagccatggattaccatgcaaaagtccaggcagaatataattctataaagggaactccttcagaggctgaaatctttaccaccttgagctgtgaacctgatatacctaatccaccaaggatagccaatcggaccaaaaattcactcactttgcaatggaaggcacctagtgacaatggttctaaaatccaaaactttgtattagaatgggatgaaggaaaaggaaatggagaattttgtcagtgttacatgggctcacagaaacaatttaaaattactaaactttcaccagcaatgggctgtaaattcagactatcggccagaaatgactatggtacaagtggttttagtgaagaagtcttatattacacctcaggctgtgctccttctatgccagcaagtcctgtattaaccaaggctggaattacttggttatccttacaatggagtaagccctcaggaacaccatcagatgaaggaatttcttacattttagagatggaggaagaaacttcaggatatggttttaagcctaaatatgatggagaagatcttgcttacacagtgaaaaatctcagacgtagtactaagtataaatttaaggttattgcttacaactcagaaggtaaaagtaatccaagtgaagtagtagaatttactacttgccctgataaaccaggcatacctgtaaagccttcagtgaaaggaaagatacattcacacagttttaaaataacctgggatccaccaaaagacaatggcggagcaaccatcaataaatatgtagtggagatggcagaaggttctaacggaaacaaatgggaaatgatatacagtggtgctaccagggaacatctttgtgatcgactgaatccaggctgtttctatcgtttacgagtttactgcatcagtgatggaggacagagtgcggtctctgaatctttacttgtgcagactccagctgtgcctcctggcccatgcctccctcccagattacagggtagacccaaagcaaaagaaatacagttacgatggggaccccctctggttgatggtggatcacccatttcctgttacagtgtggaaatgtctcctatagaaaaagatgaacctagagaagtttaccaaggttctgaagtagaatgtacagtgagcagccttcttcctggaaagacatacagcttcagactacgtgcagctaacaaaatggggtttggaccattttcagaaaaatgtgatattactacagcccctgggccaccagatcagtgcaagccccctcaagtgacatgtagatctgcaacttgtgcacaagtgaattgggaggttcctttgagtaatggaacagatgtcactgaatatcgactggagtggggaggagttgaaggaagtatgcagatatgttactgtgggcctggtctcagttatgaaataaaaggactttcaccagcaactacctattattgcagggtccaggctctgagtgttgtgggtgcaggccctttcagtgaagtagtagcctgtgtgactccaccatcagttcctggcattgtgacctgtcttcaagaaataagcgatgatgagatagaaaatccccattattcaccttctacatgccttgcaataagctgggaaaagccttgtgatcatggttcggaaatccttgcctacagcatagactttggagataaacaatccctaacagtgggaaaggttacaagctatattatcaacaatttgcaaccagatacaacatacagaatacgaattcaagccttgaatagccttggagctggtcctttcagccatatgataaaattaaaaactaagcctctccctcctgatccacctcgtctggaatgtgttgcctttagccaccagaaccttaagctgaaatggggagaaggaactccaaagacattgtcaaccgattctattcagtaccaccttcagatggaggataagaatggacggtttgtatccctatacagaggaccatgtcatacatacaaagtacaaagacttaatgagtcaacatcctataaattctgtattcaagcttgtaatgaagctggggaaggtcccctctcccaagaatatattttcactactccaaaatctgtcccagctgccttgaaagcccccaaaatagagaaagtaaatgatcacatttgtgaaattacatgggagtgtttacagccaatgaaaggtgatccagttatttacagtcttcaagttatgttgggaaaagattcagaattcaaacagatttacaagggtcccgactcttccttccggtattccagccttcagctgaactgtgaatatcgcttccgtgtatgtgccattcgccagtgccaagactctctgggacaccaggacctcgtaggtccctacagcaccacagtgctcttcatctctcagaggactgaaccaccagccagcaccaacagagacactgtggaaagcacaaggacccgacgggcactgagtgacgagcagtgtgctgccgtcatccttgtgctgtttgctttcttttccattttgattgcctttatcattcagtactttgtaatcaagtgaaaatataactttattttttaactctattacattttattttgtcatgtactaaaattatttctgtattgcttttataaaaaacagtggcatttagcactggcattgagactatagcacatcatttttgccattttcagtgcttatattgttaggtagaggctggcactttattagaatgcaagccacaaaaatatcaattttgttttttttgttagggtgggtcttctttttttctttccctctctctttttttaacaaatgccttcttatagaaaaactttctaagaggcaacaatttagaatggatattttgacgaatcggcatgagtgtaacagtgataacctgatctgtttgttttaaagattattaccaagtgaaaaattcagaatgaatagaatttacactaacatgctatataaaatgttaaagtctgatgctgtgaaagcaatctagtgctatatttctacctcctcatttgtcttaattatttggtaagtgggattatgatgagtaactggaggggcttagaaacaaaaactggatgaaagagtatgcatgaagaaaagcttctttgataaatgtggagttcttcattataaatatatattcatgaattcacagataagtacttaaagaacagacagtttacttggcctaaaaatattttgatgtttactcaaaaagtacctcttcaggtcttgagaacatggaaaagaattgagtgcttttaaatactttttagaaagtaatcataaaagtaaattgaatttcaaacctatttggcttctgttttgtgaacctttgaactatatgtatgtgtataagggtatacacatacatatatggcatataacaagtgtacacatatacacataacaagtgtagaagtatatattacatacatacactcactctgtctggtataggctaattttgaa

SEQ ID NO: 35616 - DNA, 4649 bp, Artificial Sequence
  derived and/or modified sequence
ttgacacggctttggaaacgacgtcatgtgttagaattggagcgttattcagtatattaatgtcttattgataatggcagaacatccaccactactggatacaactcagatcttaagtagtgatatttctcttttgtctgcccctattgtaagtgcagatggaacacaacaggttattctggtacaagttaacccaggagaagcatttacaataagaagagaagatggacagtttcagtgcattacaggtcctgctcaggttccaatgatgtccccaaatggttctgtgcctcctatctatgtgcctcctggatatgccccacaggttattgaagacaatggtgttcgaagagttgtcgtggtccctcaggcaccagagtttcaccctggtagtcacacagttctccaccgttctccacatcctcctctacctggtttcattcctgtcccaactatgatgccgcctccaccacgtcatatgtactcacccgtgactggagctggagacatgacaacacagtatatgccacagtatcagtcttcacaagtctatggagatgtagatgctcactctacacatggaaggtccaactttagagatgaacgatctagtaaaacatatgaacgtttgcagaaaaaattgaaggatcgccaaggaacacagaaagataaaatgagcagtccaccatcatcaccccagaaatgcccttctcccattaatgaacataatggacttataaaaggacaaattgctggtggtataaacacaggatcagcaaaaatcaagtctgggaaggggaaaggtggtacacaagttgatacagaaattgaagaaaaagatgaagaaactaaagcatttgaagcacttctttccaacattgtcaaaccagtggcctccgacatccaggcaaggacagtagtacttacctggtcaccaccttccagcctcattaatggtgaaacagatgaaagtagtgtaccagagctctatggttatgaagttctgatctcaagtactggaaaagatgggaaatacaaaagtgtatatgtaggagaagaaacaaatatcactttaaatgatctcaagccagccatggattaccatgcaaaagtccaggcagaatataattctataaagggaactccttcagaggctgaaatctttaccaccttgagctgtgaacctgatatacctaatccaccaaggatagccaatcggaccaaaaattcactcactttgcaatggaaggcacctagtgacaatggttctaaaatccaaaactttgtattagaatgggatgaaggaaaaggaaatggagaattttgtcagtgttacatgggctcacagaaacaatttaaaattactaaactttcaccagcaatgggctgtaaattcagactatcggccagaaatgactatggtacaagtggttttagtgaagaagtcttatattacacctcaggctgtgctccttctatgccagcaagtcctgtattaaccaaggctggaattacttggttatccttacaatggagtaagccctcaggaacaccatcagatgaaggaatttcttacattttagagatggaggaagaaacttcaggatatggttttaagcctaaatatgatggagaagatcttgcttacacagtgaaaaatctcagacgtagtactaagtataaatttaaggttattgcttacaactcagaaggtaaaagtaatccaagtgaagtagtagaatttactacttgccctgataaaccaggcatacctgtaaagccttcagtgaaaggaaagatacattcacacagttttaaaataacctgggatccaccaaaagacaatggcggagcaaccatcaataaatatgtagtggagatggcagaaggttctaacggaaacaaatgggaaatgatatacagtggtgctaccagggaacatctttgtgatcgactgaatccaggctgtttctatcgtttacgagtttactgcatcagtgatggaggacagagtgcggtctctgaatctttacttgtgcagactccagctgtgcctcctggcccatgcctccctcccagattacagggtagacccaaagcaaaagaaatacagttacgatggggaccccctctggttgatggtggatcacccatttcctgttacagtgtggaaatgtctcctatagaaaaagatgaacctagagaagtttaccaaggttctgaagtagaatgtacagtgagcagccttcttcctggaaagacatacagcttcagactacgtgcagctaacaaaatggggtttggaccattttcagaaaaatgtgatattactacagcccctgggccaccagatcagtgcaagccccctcaagtgacatgtagatctgcaacttgtgcacaagtgaattgggaggttcctttgagtaatggaacagatgtcactgaatatcgactggagtggggaggagttgaaggaagtatgcagatatgttactgtgggcctggtctcagttatgaaataaaaggactttcaccagcaactacctattattgcagggtccaggctctgagtgttgtgggtgcaggccctttcagtgaagtagtagcctgtgtgactccaccatcagttcctggcattgtgacctgtcttcaagaaataagcgatgatgagatagaaaatccccattattcaccttctacatgccttgcaataagctgggaaaagccttgtgatcatggttcggaaatccttgcctacagcatagactttggagataaacaatccctaacagtgggaaaggttacaagctatattatcaacaatttgcaaccagatacaacatacagaatacgaattcaagccttgaatagccttggagctggtcctttcagccatatgataaaattaaaaactaagcctctccctcctgatccacctcgtctggaatgtgttgcctttagccaccagaaccttaagctgaaatggggagaaggaactccaaagacattgtcaaccgattctattcagtaccaccttcagatggaggataagaatggacggtttgtatccctatacagaggaccatgtcatacatacaaagtacaaagacttaatgagtcaacatcctataaattctgtattcaagcttgtaatgaagctggggaaggtcccctctcccaagaatatattttcactactccaaaatctgtcccagctgccttgaaagcccccaaaatagagaaagtaaatgatcacatttgtgaaattacatgggagtgtttacagccaatgaaaggtgatccagttatttacagtcttcaagttatgttgggaaaagattcagaattcaaacagatttacaagggtcccgactcttccttccggtattccagccttcagctgaactgtgaatatcgcttccgtgtatgtgccattcgccagtgccaagactctctgggacaccaggacctcgtaggtccctacagcaccacagtgctcttcatctctcagaggactgaaccaccagccagcaccaacagagacactgtggaaagcacaaggacccgacgggcactgagtgacgagcagtgtgctgccgtcatccttgtgctgtttgctttcttttccattttgattgcctttatcattcagtactttgtaatcaagtgaaaatataactttattttttaactctattacattttattttgtcatgtactaaaattatttctgtattgcttttataaaaaacagtggcatttagcactggcattgagactatagcacatcatttttgccattttcagtgcttatattgttaggtagaggctggcactttattagaatgcaagccacaaaaatatcaattttgttttttttgttagggtgggtcttctttttttctttccctctctctttttttaacaaatgccttcttatagaaaaactttctaagaggcaacaatttagaatggatattttgacgaatcggcatgagtgtaacagtgataacctgatctgtttgttttaaagattattaccaagtgaaaaattcagaatgaatagaatttacactaacatgctatataaaatgttaaagtctgatgctgtgaaagcaatctagtgctatatttctacctcctcatttgtcttaattatttggtaagtgggattatgatgagtaactggaggggcttagaaacaaaaactggatgaaagagtatgcatgaagaaaagcttctttgataaatgtggagttcttcattataaatatatattcatgaattcacagataagtacttaaagaacagacagtttacttggcctaaaaatattttgatgtttactcaaaaagtacctcttcaggtcttgagaacatggaaaagaattgagtgcttttaaatactttttagaaagtaatcataaaagtaaattgaatttcaaacctatttggcttctgttttgtgaacctttgaactatatgtatgtgtataagggtatacacatacatatatggcatataacaagtgtacacatatacacataacaagtgtagaagtatatattacatacatacactcactctgtctggtataggctaattttgaagaactcccataagtttctgctgcttctcccataactgctg

SEQ ID NO: 35617 - DNA, 6082 bp, Artificial Sequence
  derived and/or modified sequence
agccgccgaacttgaacgcttttctgaagagagttttccccgctcatcttggggttaaaacctcgaaaacccgccctctgtttgatcctgcgtggctgcttccagtacctggcagttcctctccccgggcgagttaaccacctgttcagtcgggaggtggactcgaggctgcagtcctcgcccggttttaacaacctggatcttcgaacttttgacacggctttggaaacgacgtcatgtgttagaattggagcgttattcagtatattaatgtcttattgataatggcagaacatccaccactactggatacaactcagatcttaagtagtgatatttctcttttgtctgcccctattgtaagtgcagatggaacacaacaggttattctggtacaagttaacccaggagaagcatttacaataagaagagaagatggacagtttcagtgcattacaggtcctgctcaggttccaatgatgtccccaaatggttctgtgcctcctatctatgtgcctcctggatatgccccacaggttattgaagacaatggtgttcgaagagttgtcgtggtccctcaggcaccagagtttcaccctggtagtcacacagttctccaccgttctccacatcctcctctacctggtttcattcctgtcccaactatgatgccgcctccaccacgtcatatgtactcacccgtgactggagctggagacatgacaacacagtatatgccacagtatcagtcttcacaagtctatggagatgtagatgctcactctacacatggaaggtccaactttagagatgaacgatctagtaaaacatatgaacgtttgcagaaaaaattgaaggatcgccaaggaacacagaaagataaaatgagcagtccaccatcatcaccccagaaatgcccttctcccattaatgaacataatggacttataaaaggacaaattgctggtggtataaacacaggatcagcaaaaatcaagtctgggaaggggaaaggtggtacacaagttgatacagaaattgaagaaaaagatgaagaaactaaagcatttgaagcacttctttccaacattgtcaaaccagtggcctccgacatccaggcaaggacagtagtacttacctggtcaccaccttccagcctcattaatggtgaaacagatgaaagtagtgtaccagagctctatggttatgaagttctgatctcaagtactggaaaagatgggaaatacaaaagtgtatatgtaggagaagaaacaaatatcactttaaatgatctcaagccagccatggattaccatgcaaaagtccaggcagaatataattctataaagggaactccttcagaggctgaaatctttaccaccttgagctgtgaacctgatatacctaatccaccaaggatagccaatcggaccaaaaattcactcactttgcaatggaaggcacctagtgacaatggttctaaaatccaaaactttgtattagaatgggatgaaggaaaaggaaatggagaattttgtcagtgttacatgggctcacagaaacaatttaaaattactaaactttcaccagcaatgggctgtaaattcagactatcggccagaaatgactatggtacaagtggttttagtgaagaagtcttatattacacctcaggctgtgctccttctatgccagcaagtcctgtattaaccaaggctggaattacttggttatccttacaatggagtaagccctcaggaacaccatcagatgaaggaatttcttacattttagagatggaggaagaaacttcaggatatggttttaagcctaaatatgatggagaagatcttgcttacacagtgaaaaatctcagacgtagtactaagtataaatttaaggttattgcttacaactcagaaggtaaaagtaatccaagtgaagtagtagaatttactacttgccctgataaaccaggcatacctgtaaagccttcagtgaaaggaaagatacattcacacagttttaaaataacctgggatccaccaaaagacaatggcggagcaaccatcaataaatatgtagtggagatggcagaaggttctaacggaaacaaatgggaaatgatatacagtggtgctaccagggaacatctttgtgatcgactgaatccaggctgtttctatcgtttacgagtttactgcatcagtgatggaggacagagtgcggtctctgaatctttacttgtgcagactccagctgtgcctcctggcccatgcctccctcccagattacagggtagacccaaagcaaaagaaatacagaccccctctggttgatggtggatcacccatttcctgttacagtgtggaaatgtctcctatagaaaaagatgaacctagagaagtttaccaaggttctgaagtagaatgtacagtgagcagccttcttcctggaaagacatacagcttcagactacgtgcagctaacaaaatggggtttggaccattttcagaaaaatgtgatattactacagcccctgggccaccagatcagtgcaagccccctcaagtgacatgtagatctgcaacttgtgcacaagtgaattgggaggttcctttgagtaatggaacagatgtcactgaatatcgactggagtggggaggagttgaaggaagtatgcagatatgttactgtgggcctggtctcagttatgaaataaaaggactttcaccagcaactacctattattgcagggtccaggctctgagtgttgtgggtgcaggccctttcagtgaagtagtagcctgtgtgactccaccatcagttcctggcattgtgacctgtcttcaagaaataagcgatgatgagatagaaaatccccattattcaccttctacatgccttgcaataagctgggaaaagccttgtgatcatggttcggaaatccttgcctacagcatagactttggagataaacaatccctaacagtgggaaaggttacaagctatattatcaacaatttgcaaccagatacaacatacagaatacgaattcaagccttgaatagccttggagctggtcctttcagccatatgataaaattaaaaactaagcctctccctcctgatccacctcgtctggaatgtgttgcctttagccaccagaaccttaagctgaaatggggagaaggaactccaaagacattgtcaaccgattctattcagtaccaccttcagatggaggataagaatggacggtttgtatccctatacagaggaccatgtcatacatacaaagtacaaagacttaatgagtcaacatcctataaattctgtattcaagcttgtaatgaagctggggaaggtcccctctcccaagaatatattttcactactccaaaatctgtcccagctgccttgaaagcccccaaaatagagaaagtaaatgatcacatttgtgaaattacatgggagtgtttacagccaatgaaaggtgatccagttatttacagtcttcaagttatgttgggaaaagattcagaattcaaacagatttacaagggtcccgactcttccttccggtattccagccttcagctgaactgtgaatatcgcttccgtgtatgtgccattcgccagtgccaagactctctgggacaccaggacctcgtaggtccctacagcaccacagtgctcttcatctctcagaggactgaaccaccagccagcaccaacagagacactgtggaaagcacaaggacccgacgggcactgagtgacgagcagtgtgctgccgtcatccttgtgctgtttgctttcttttccattttgattgcctttatcattcagtactttgtaatcaagtgaaaatataactttattttttaactctattacattttattttgtcatgtactaaaattatttctgtattgcttttataaaaaacagtggcatttagcactggcattgagactatagcacatcatttttgccattttcagtgcttatattgttaggtagaggctggcactttattagaatgcaagccacaaaaatatcaattttgttttttttgttagggtgggtcttctttttttctttccctctctctttttttaacaaatgccttcttatagaaaaactttctaagaggcaacaatttagaatggatattttgacgaatcggcatgagtgtaacagtgataacctgatctgtttgttttaaagattattaccaagtgaaaaattcagaatgaatagaatttacactaacatgctatataaaatgttaaagtctgatgctgtgaaagcaatctagtgctatatttctacctcctcatttgtcttaattatttggtaagtgggattatgatgagtaactggaggggcttagaaacaaaaactggatgaaagagtatgcatgaagaaaagcttctttgataaatgtggagttcttcattataaatatatattcatgaattcacagataagtacttaaagaacagacagtttacttggcctaaaaatattttgatgtttactcaaaaagtacctcttcaggtcttgagaacatggaaaagaattgagtgcttttaaatactttttagaaagtaatcataaaagtaaattgaatttcaaacctatttggcttctgttttgtgaacctttgaactatatgtatgtgtataagggtatacacatacatatatggcatataacaagtgtacacatatacacataacaagtgtagaagtatatattacatacatacactcactctgtctggtataggctaattttgaagaactcccataagtttctgctgcttctcccataactgctgccaccaccatcagaattcataatcaaacctaacctttttgtttggggcaccaaatctgaagacaaaattaatttgcaccagtaaacttcaagctgctttctttcttgaaaactaaacgtttaacgtataatgtctgtttggatactgttccaaattgttgattgcatgtggttaatgttgcattagagcactttgcaattgcataattcattaatgttttgtgagcttgcatttgtgagttattggatgatcagactgaattttgtcaagtatcacattgtacatcttgcctagatgtcgatgactgcaagtaataatacagtttataatgaaactatctacaattcttgttttagcacatctgttatccgtaaaacacctgtaactagcttttttaatttattatttgaattttaggatagcgaatcactaatttttagttgctgaggttggcattttagtgattattaagcacttctgtcagtctttgaaaaaagaacgtattttttgtgctttgaagatctctgaagaatttcttttataatagaatgggcatgtattgtaacagttttatgtcaaatgatctgtgctgtagaaaaacattaacccttgttcaaaaaagaaatggataaacttggcctttctaagtggtaagaatgacctgtcactataatatactgtatgtttacattttatttaaatttaatctcttatgtatagggtgataaccttccccagaaacaacagtgattgcgattgttttctagaaacttctttaaagtgccacatttggcagtacaaatgagtctgagtgtaatagcccagagatttatatatagttgaatgtctaaaatggtaaaatgtgccactgtgtcaagttacagtggcttatgtttttcatagtaattcaaatgaacttcctatttttgatagtaaatgtcatttaatagtatacttgccatttgagcctcactgcaaaattagtgcagaggagaaaacaatttttaatgtaatcttgattttacctcatatactgtacattccaaaaactctaaactttttaaagattatagatacactaccaaacatatcaccttaaaattgtataaggctgaatgaacttcatacaaatgaaaaaaatctcataaaaatacataaactatgtagcaaaagtatctgtaaaatccatggaaaataaaagttgtatcattctttttgagatacgtttattgt

SEQ ID NO: 35618 - DNA, 3405 bp, Artificial Sequence
  derived and/or modified sequence
atgatgtcccccaatgggagcgtacccccaatttatgtgcctcctggatatgcacctcaggtcatcgaagacaatggggtgcgacgggtcgttgttgtgcctcaggcacctgagtttcatcctggtagccacaccgtgcttcatcggtcgcctcacccacccttgccaggttttattcctgttcccactatgatgccccctcccccaagacatatgtattcccccgttacaggcgccggcgacatgactactcaatatatgcctcagtaccagtcctcccaagtgtatggagacgttgatgcccattccactcacggcagaagcaacttccgagatgagcgctcttctaagacctacgagagattgcagaagaaattgaaggacaggcaggggacccagaaggataaaatgagctctcccccctcctctccacagaagtgtccatcccctatcaatgaacacaatggacttattaaaggccagattgccggcggcatcaatacaggatctgccaaaatcaagtcaggcaaggggaaaggaggcacacaggtggatacggaaatcgaggaaaaggatgaggaaacgaaggctttcgaggccctgttaagtaatatcgtgaaacccgtcgcctccgatatacaggcacgaacagtcgtactcacctggagccccccttccagcttgatcaacggtgaaactgatgaatccagcgtgcctgagctgtacggctacgaggttctaatctcgtcgactggtaaagacggcaaatacaaaagcgtttatgtcggggaggagaccaacatcactctcaatgatctaaaaccagctatggactatcatgccaaagtgcaggctgagtacaactccattaaaggtactccaagcgaagctgaaatattcacaacattgagctgcgagcctgacatccccaaccccccaagaattgccaacaggacaaaaaatagtctgacactccagtggaaggcaccttcagacaatggatcaaagatccagaatttcgtactggagtgggacgagggtaaggggaacggtgagttttgtcagtgctatatggggtcacagaagcagtttaaaatcacaaaactgagtcctgccatgggctgcaaattccggctatccgccagaaatgactacgggacaagcggcttttcagaggaagtgctttactatacatccggatgtgctccgtctatgccagcttcaccggtgctgacgaaagccggaataacctggctgagcctgcagtggagcaaaccttcaggaaccccaagcgacgaaggaatctcttatatcctcgagatggaagaagagaccagcggatacggattcaagccgaagtacgatggtgaggacctggcgtacacagtcaagaacctcagaagaagtacgaaatataagttcaaggtgattgcatataactcggaggggaaatccaaccccagtgaggtcgtcgagttcacgacctgtcctgacaaacccggaattcccgttaagcccagcgtcaaagggaagatccattctcactcctttaagattacttgggacccaccaaaagacaacggtggggctacaatcaataagtacgtggttgagatggctgaaggttccaacggcaataaatgggaaatgatctattcgggagctacacgtgaacatctctgtgacagactgaaccctggatgtttttacagactccgagtgtattgtatcagtgacggaggccagtctgcggtgagcgaatccctgttggtccagactccagctgtcccccccggaccatgtctccctccaagattgcaaggcagacctaaagccaaagagatccagctgagatgggggcctccacttgtcgatggcggatcacctatctcatgttactcggttgaaatgtcgcctatagagaaggatgaaccaagggaagtgtaccaagggtctgaagtcgaatgcaccgtgtcctcgctgcttcccggcaaaacctattcgtttaggctccgggctgcaaacaaaatggggttcggtcctttcagcgagaaatgcgacataaccactgctcccggcccgccagaccagtgtaaacctccgcaggtcacatgcaggtccgctacgtgcgcccaggtcaattgggaagtgccactctcaaacggcactgacgttacagaatataggcttgaatggggaggcgtggaaggctcaatgcagatctgctactgcggtcctggcctgtcttacgaaatcaaggggttgtctcccgccacgacatactactgtcgggtgcaggccctctctgtcgtcggtgcgggcccgtttagcgaagtcgtggcctgcgttactccacctagcgtgcctgggatcgttacgtgcctgcaggagatttccgatgatgaaattgagaacccacattattcgcctagtacctgcttggccatcagctgggagaagccatgcgatcatggctctgaaatcctggcgtatagtatcgactttggcgataagcagagcctgacggtgggaaaggtcacctcttacataattaacaacctgcagcctgacacaacttacagaatccgaatccaggcactgaattctctgggcgcagggcccttcagtcacatgatcaagctaaaaactaaacccctaccccccgaccctccccgcctcgagtgcgtggcttttagtcatcagaatctgaagctgaaatggggggagggaacacccaagacgctcagtactgattcaatccaataccacctccagatggaagacaagaatggccgatttgtgtccttatacagaggaccctgccacacctataaggtgcaacggctgaatgaatctacttcatataaattctgtattcaggcatgtaacgaagctggcgagggaccgctctcccaggagtacatctttactacacccaaaagcgtgcccgctgcccttaaggcgccgaaaattgagaaagttaacgaccatatatgcgagattacttgggaatgtctgcagccaatgaagggcgatcccgtgatatactctcttcaagtaatgcttggcaaagatagcgagtttaagcagatctacaaagggcctgacagcagcttccgctattctagcctccaattgaattgtgagtatagattcagggtttgcgccatccggcagtgccaggatagtctcggacaccaggacttagtcggcccctattctacaacagttctgtttatctctcagcgtaccgaaccgccggccagcactaaccgggacaccgtggagagcactcgtacaaggcgcgctctatccgatgagcagtgtgctgcggtgattctcgttctctttgccttcttttccatcctcattgctttcattattcagtattttgtgatcaagtag

SEQ ID NO: 35619 - DNA, 3597 bp, Artificial Sequence
  derived and/or modified sequence
atggctgaacatccaccactgctggatacaacacagatcctttctagcgatatctctctattgagcgcccccatagtatcggcagatggtacacagcaagtaatcctcgtccaggtcaatccaggtgaagcgttcaccatacggcgcgaagatggccaatttcagtgtatcacgggccccgcacaagtgcctatgatgagtcccaatggatcggtacctcctatctacgtgccccccggctacgcccctcaggtcatcgaggataacggtgtgcgtcgagttgtggtagtccctcaggccccggagtttcatcctgggtcacacaccgtactgcaccggtctccacacccaccgcttcctgggtttataccggtccctacaatgatgccccctcctcccagacatatgtactcccctgtcacaggcgctggcgatatgacaacccagtacatgccacaatatcagagctcacaggtctacggcgacgtggatgcgcatagcacacatggccgcagcaattttagggacgagcgatcgagtaaaacctacgaaagactacagaagaaattgaaggaccgccagggtacgcagaaagataagatgagctctcctccgagttcaccacagaaatgcccgtcgcctatcaatgagcacaatggactgattaaaggccaaattgctggaggtattaataccggaagcgctaaaataaaaagtggcaagggtaagggcggaactcaggtcgatacagagatcgaggagaaagatgaagagacaaaggcgttcgaagcgttactgtcaaatattgtgaagcctgtcgcctcagatatacaggctagaacggtcgtgcttacatggtcaccgccatcatccctgataaacggcgaaaccgatgagagctccgttccagagttatacggctatgaagtactcattagctcaaccgggaaggatggaaagtataaatctgtctatgtgggggaggagacgaacataacactgaacgacttgaagccagcgatggactaccacgcgaaagtccaggccgagtataactcaatcaagggcactccctccgaagctgaaatatttaccacgctgtcatgtgagcctgacatacccaatcctccaaggattgccaacagaacgaaaaactcgctgacactgcagtggaaggctccaagcgataatggaagtaagattcagaattttgtgctggagtgggatgaaggtaaggggaatggcgagttctgtcagtgctatatgggctcccagaagcagtttaagatcactaaactctctccagcaatgggttgcaaattccggctcagcgctcgcaacgattacggtacctccggatttagtgaggaggtcttgtactatacgtctggatgtgccccatcaatgcctgcctcacccgtgcttacaaaggcggggataacatggctgtctctgcagtggtctaaacccagtggaaccccctcggatgagggtataagttatattctcgaaatggaagaggaaactagtggctacggcttcaagccaaaatacgacggggaggacctggcgtataccgtgaaaaatctaaggaggtccacaaagtacaagtttaaagtgatagcctacaactcagagggaaaatcaaacccttctgaggtggtggagttcacgacctgcccagataaacctggaatccctgtcaaaccttccgtcaaggggaagattcacagccatagctttaagatcacttgggatccgccaaaagacaacggaggagccaccatcaacaagtacgttgtagagatggctgaggggagcaatggcaataaatgggagatgatctatagtggagcgaccagggagcatttatgcgatcgtctaaaccccggatgtttctatcggttaagagtgtactgtattagcgacggcggccagtctgccgtctcagagagcctccttgtacagactcctgcagtcccccccggaccttgtttgccacctcgccttcaaggcaggccaaaggccaaggaaatacagctacggtggggaccacctctggttgatggtgggtcccctatatcttgctatagtgtagagatgtctcctattgagaaggacgagccccgcgaggtttatcaggggtccgaggtggaatgtactgtctcctccctgctcccaggtaaaacctatagcttccgcctgagagcagcaaacaagatgggcttcggtccgttttctgaaaaatgcgacatcacaaccgcccctggtccccctgaccagtgtaaaccacctcaggttacctgccgatccgctacctgtgctcaggtgaattgggaggtgcccctgtcaaatggcaccgatgtgactgagtaccgacttgaatggggtggagttgaaggatcgatgcaaatctgttactgcgggcctggattgagttatgaaatcaagggactgagcccggcgactacgtattactgtagagtgcaagccctgtctgttgtaggggccggacccttttccgaggtggtggcctgtgtgacacctccttctgttcccggaatcgtaacgtgtctacaggagatctcggacgatgagattgaaaaccctcattatagcccatccacatgcttggccatatcgtgggaaaagccctgtgaccacggaagtgaaatcctggcatacagcatagacttcggagacaagcaatcactcaccgtcgggaaggtcacgagttacataataaataatctgcagccggatacgacctaccgtatcaggattcaggctctgaactctcttggagccggtcctttttctcatatgatcaaactgaagacaaagccacttccacctgaccctcctagacttgaatgcgtggctttctctcaccagaatctgaagctgaaatggggggaaggcacccctaaaaccttgtccaccgactctatccagtaccatctgcaaatggaggataagaatggccggttcgtttcgctctacagagggccttgccatacatataaagtacaaagactaaatgagtccacctcatacaagttttgtattcaggcctgcaacgaggctggagaaggcccattatcccaagagtatatctttacgaccccgaagtctgtcccagccgccctcaaagccccaaaaattgaaaaggttaatgaccatatctgcgaaatcacctgggagtgtctacaacctatgaagggtgatccggtgatttatagcttgcaagtcatgctgggtaaggactccgaattcaaacagatatacaaggggcctgattcctcatttaggtatagctctctgcagctgaattgtgagtaccgcttccgggtgtgcgcaatcaggcagtgtcaagactcattggggcaccaggatctggtcgggccttactccaccacggtgctctttatttcacagcggaccgagccccccgcatccactaatagagacacggtggagtctacccgaactcgccgcgcgttaagtgatgagcaatgcgccgcagtgattctggtgctgttcgcattcttttccatactcattgctttcattatacagtactttgtaatcaagtag

SEQ ID NO: 35620 - DNA, 3597 bp, Artificial Sequence
  derived and/or modified sequence
atggccgagcatcctccattactggacactacacagattctatcttcagacatttctctgctgtctgctcccatcgtgagtgccgacggcacacagcaggtgatcctcgtgcaggtcaaccctggcgaggccttcacaataagacgggaggatgggcagttccagtgcatcacgggacctgcacaggtgccgatgatgagccctaacgggagcgtgccacctatttatgtccccccaggctatgccccgcaggtgatagaagataacggggtgaggagggtggttgttgtgcctcaggcgccagagtttcatcctggcagccacaccgtgcttcaccgatccccacatcctccattgcctggtttcatcccggtgccaacaatgatgccccctccacctagacacatgtactcaccagttaccggcgccggcgacatgaccacacagtacatgccccaataccagagctcacaagtctacggtgatgttgacgcccactccacacacggacgaagcaattttcgcgatgagagatccagcaaaacctatgaacgcctgcaaaagaaattaaaggatcggcagggcacacagaaggataaaatgagctcaccgccttcgtcacctcagaagtgtcctagtccaattaatgaacacaacggactgatcaaggggcagattgcaggcggcatcaataccggttccgcaaagattaagagcgggaaaggtaaaggggggacccaagtcgacaccgagatcgaggaaaaagacgaagagacaaaggcctttgaggccctcttgagtaatattgtcaagcccgttgctagtgatatccaggcccggacagtagtgctgacctggagccctccctcctcactcattaatggcgagaccgatgagtccagtgttccagagctgtacgggtacgaggttctgatcagctctactggaaaggatggtaagtacaagtcagtctatgtaggagaagaaacaaatataacactgaacgatttgaagccggccatggactatcatgcaaaggttcaagctgagtacaacagcatcaagggcacaccctctgaggctgagatttttaccaccctctcatgcgaaccggatattccgaatcctcccagaatcgcaaaccgtaccaaaaatagcttgaccttacagtggaaagctccatccgacaatggcagcaaaattcagaatttcgtgctggagtgggacgaaggtaagggaaacggggaattctgtcagtgctatatggggtcacaaaagcagttcaagataactaagttgagccccgccatggggtgtaagtttaggctctccgctagaaatgattatgggaccagcgggttcagcgaggaggttttgtattacacaagtggctgcgcgccaagtatgcctgcctccccagtactgacaaaggccggaattacttggctctctctccagtggtccaaaccctcaggaacccccagtgacgagggaatttcctatatcttggagatggaggaggagacaagtggttacgggtttaagcctaagtatgacggtgaagatctggcatacaccgtcaagaacttaaggaggtcaacaaagtacaagttcaaggtgattgcgtataatagcgaagggaagtccaatccatccgaggtagtggagtttacaacatgccctgacaagccagggattccagtcaagccgtcagttaagggcaagatccacagccatagcttcaaaatcacctgggaccccccaaaagataatggcggggctaccattaataagtatgtcgtggagatggccgagggatctaacggaaataagtgggagatgatctactcaggagctacccgggaacacctatgtgaccgattgaatccgggatgcttttaccgcctgagggtttactgtataagcgacggcggccagtccgctgtttccgagtctctgcttgtccaaacaccagcggtgccaccaggcccctgtctgccccccaggctgcaggggcggcccaaagccaaggaaatccagctccgctggggccctcctctagtggatgggggatcacccatttcatgttactcagtcgagatgtcccctatcgagaaagacgaaccccgggaggtctatcaggggtctgaggttgagtgcactgttagctcactgctgccaggtaagacctacagctttaggttgcgcgccgcaaacaaaatggggttcgggccttttagcgaaaagtgcgatattacaacggcaccaggaccccccgatcagtgtaaaccccctcaagttacctgcagaagcgcaacctgcgcccaggtcaattgggaagtaccccttagtaacggcactgatgtaactgaataccgtctggagtggggtggcgtcgaaggctccatgcaaatctgttactgtggtcccggactgtcttacgagattaagggtctctcaccagccacaacgtactactgtagagtgcaggcactgagcgtcgtgggcgctggacccttttctgaggtggttgcctgtgtgaccccaccatccgtgccagggatcgtaacttgcctgcaggagatctcagacgatgagattgaaaacccccattactctcccagtacttgcctagcaatctcttgggagaaaccttgtgatcatggaagtgaaatccttgcctactccatcgacttcggtgacaagcagtcccttaccgtgggcaaagtaacaagttatatcatcaataatttgcagcctgatacaacctacagaattcggatacaggccctgaattctctgggagccggccccttctcccatatgattaagctcaagactaaacccttgcccccagacccaccacgacttgaatgtgtggctttcagccaccagaacttgaagttgaagtggggtgaggggacaccaaaaacattgagcacagattctatccagtatcatctacagatggaagacaaaaacggtcgcttcgtgtctctgtaccgcggaccttgccacacctacaaggtacagcgtctgaatgagagtacctcttacaaattttgtattcaagcctgcaacgaagccggagagggaccactcagccaggagtatatctttactacccctaaatcagtgccagctgcccttaaagctcccaagatcgaaaaagtcaacgaccatatatgcgaaattacttgggaatgccttcaacctatgaaaggcgacccggtgatatacagtctgcaggtcatgctgggcaaagattcagagttcaaacagatatataaaggaccagactcttcttttcgatatagcagcttacagttgaactgcgagtaccgtttccgggtctgcgcgatacggcagtgccaggatagcctagggcaccaagatctggtggggccttacagcacaacagtgctttttatatcccagcgaacagagccgcctgcctctaccaatcgggatactgtcgagagcacacggacccgacgggccttgtctgatgaacagtgcgctgctgtcatcctggtgctattcgcctttttctcgatcctgattgcctttatcattcagtacttcgtgataaagtag

SEQ ID NO: 35621 - DNA, 2055 bp, Artificial Sequence
  derived and/or modified sequence
atggctgagcacccaccccttcttgatacaacacaaatccttagttcagatatctctctcctgtccgctcccatcgttagcgcggacggaactcagcaggtaatcctggtccaggttaacccaggagaagccttcaccattcgacgagaggatgggcagttccaatgcattacagggcccgctcaggtgcctatgatgagccccaatgggtctgtacctccaatttacgttcccccgggttatgctcctcaggtgatcgaggacaatggcgttcggagggtggtcgttgtcccacaggctcccgaatttcaccctggcagtcacacagtgctgcaccggtcaccccacccccctctaccaggtttcattcccgtccccactatgatgccacccccgcctagacacatgtactcaccagtgacgggcgctggggatatgactacacagtacatgccacagtaccagtcctcccaggtttatggagatgtcgatgcacactctacacatggacgatcaaacttccgagacgagcgatcgtcgaagacctatgagcggttgcagaaaaaacttaaggacagacagggcacccagaaggataagatgtcttcgccccctagcagtcctcaaaaatgcccatccccaatcaacgaacataacggactaatcaagggtcagatcgccggtggtatcaacacaggatcggcaaaaataaagagcgggaagggcaagggagggacccaggtggatacagagatcgaggagaaagacgaagaaaccaaggcattcgaggccttactgagtaatatagtgaagcccgtcgcatccgatatacaagcacggacagtagtgttgacctggagtccaccatcaagccttatcaatggcgaaacagatgagtccagtgtgccagagctgtatggatacgaggtgctgatttcaagcaccggcaaggatggaaaatacaagagcgtgtacgtgggcgaggagaccaacataacattgaatgatttgaagccggccatggactatcacgccaaagtacaggctgagtataatagcatcaaaggtacaccgtccgaagcagagatattcacgaccctgagttgtgagcccgacatccccaatccacctaggatcgcaaaccggactaagaatagcttgactttacaatggaaagcgcctagtgataatggatcaaaaattcaaaactttgtacttgagtgggacgaggggaagggcaatggagagttttgtcaatgttacatggggtcccagaagcaatttaaaataaccaaattgtccccagccatgggctgcaaattccggctgagcgccagaaacgactacggcacatcgggtttctctgaggaagtcctgtattacacttcaggctgtgcccccagcatgccagcatctccagtcctgacgaaagcgggcatcacttggcttagcctgcagtggtcaaagccatcaggcaccccgagcgacgagggtattagctacatccttgagatggaggaggagacaagcggatatggcttcaaacccaagtacgatggcgaggaccttgcctataccgtgaaaaacctgagacggtccaccaaatataagtttaaggtgattgcctataattcagagggaaaaagtaatccctccgaggtggtcgagttcacaacgtgtccagacaagcccgggatcccagtaaagccaagcgtcaaaggtaaaatacactctcatagctttaaaattacatgggacccacccaaagataatggcggagcaactattaataagtacgtagtggagatggctgaaggctccaacggtaacaaatgggagatgatttattcaggagccacaagggagcatctctgtgatagactcaatcctgggtgtttctacagacttcgggtgtattgtatcagcgacggaggtcagtcagcagtgtccgagtcgctccttgttcagactcctgcagttcctcctggaccgtgcctcccacccaggctgcaggggcgacctaaagccaaggagattcagacgcccagcggatag

SEQ ID NO: 35622 - DNA, 3405 bp, Artificial Sequence
  derived and/or modified sequence
atgatgagccccaatggatctgtgccccccatctacgtgcccccaggctacgccccccaggtgattgaagataatggagtgcggcgggtggtggtggtgccccaggcccctgagttccaccctggcagccacacagtgctgcacaggagcccccacccccccctgcccggcttcatccctgtgcccaccatgatgcctcctccacccaggcacatgtacagccctgtgactggagctggggacatgaccacccagtacatgccccagtaccagagcagccaggtgtatggagatgtggatgcccacagcacccacggccgcagcaacttcagagatgagaggagcagcaagacctatgagcggctgcagaagaagctgaaggaccggcagggcacccagaaggacaagatgagcagcccccccagcagcccccagaagtgccccagccccatcaatgagcacaacggcctcatcaagggccagattgctgggggcatcaacacaggcagcgccaagatcaagtctggaaaaggaaaaggaggcacccaggtggacacagaaattgaggagaaggatgaggagaccaaggcctttgaggccctgctgagcaacatcgtgaagcctgtggccagtgacatccaggccaggacagtggtgctgacctggagcccccccagcagcctcatcaacggggagacagatgagagctctgtgcctgagctgtatggctatgaggtgctgatcagcagcacaggcaaggatggcaagtacaagtctgtgtatgtgggggaggagaccaacatcaccctgaatgacctgaagccagccatggactaccacgccaaggtgcaggccgagtacaacagcatcaagggcaccccatctgaggccgagatcttcaccaccctgagctgtgagccagacatccccaaccccccaagaattgccaacagaaccaagaacagcctgaccctgcagtggaaggcccccagcgacaatggcagcaagatccagaactttgtgctggagtgggatgagggcaaaggaaatggagagttctgccagtgctacatgggcagccagaagcagttcaagatcaccaagctgagccctgccatgggctgcaagttccggctgagcgccagaaatgactatggcaccagcggcttcagcgaggaggtgctgtactacaccagcggctgtgcccccagcatgcctgccagccctgtgctgaccaaggccggcatcacctggctgagcctgcagtggagcaagcccagcggcacccccagtgatgagggcatctcctacatcctggagatggaggaggagaccagcggctacggcttcaagcccaagtatgatggagaggacctggcctacacagtgaagaacctgcggcgcagcaccaagtacaagttcaaggtgattgcctacaacagcgagggcaagagcaaccccagcgaggtggtggagttcaccacctgcccagacaagccaggcatccctgtgaagcccagcgtgaagggcaagatccacagccacagcttcaagatcacctgggacccccccaaggacaatggaggagccaccatcaacaagtatgtggtggagatggccgagggcagcaatggaaacaagtgggagatgatctacagcggggccacccgggagcacctgtgtgaccggctgaaccctggctgcttctaccgcctgcgggtgtactgcatcagtgatggcggccagagcgctgtgtctgagagcctgctggtgcagaccccagctgtgcccccaggcccctgcctgcccccccggctgcagggccggcccaaggccaaggagatccagctgcgctggggcccccccctggtggatggcggcagccccatcagctgctacagcgtggagatgagccccatcgagaaggatgagccccgggaggtgtaccagggcagcgaggtggagtgcaccgtgagcagcctgctgcccgggaagacctacagcttccggctgcgggccgccaacaagatgggcttcggccccttcagcgagaagtgtgacatcaccacagcccctggccccccagaccagtgcaagccaccccaggtgacctgccgcagcgccacctgtgcccaggtgaactgggaggtgcccctgagcaatggaacagatgtgacagagtaccgcctggagtggggcggcgtggagggctccatgcagatctgctactgcggccctggcctgtcctatgagatcaagggcctgagccctgccaccacctactactgccgggtgcaggccctgtctgtggtgggcgccggccccttcagcgaggtggtggcctgtgtgaccccaccttctgtgcccggcatcgtgacctgcctgcaggagatcagtgatgatgaaattgagaacccccactacagccccagcacctgcctggccatctcctgggagaagccctgtgaccacggcagcgagatcctggcctacagcattgactttggagacaagcagagcctgactgtgggcaaggtgaccagctacatcatcaacaacctgcagcctgacaccacctaccgcatccgcatccaggccctgaacagcctgggcgccggccccttcagccacatgatcaagctgaagaccaagcccctgcccccagaccccccccggctggagtgtgtggccttcagccaccagaacctgaagctgaagtggggcgagggcacccccaagaccctgagcacagacagcatccagtaccacctgcagatggaggacaagaatggccgctttgtgtccctgtaccggggcccctgccacacctacaaggtgcagaggctgaatgaaagcaccagctacaagttctgcatccaggcctgcaatgaagctggggagggccccctgagccaggagtacatcttcaccacccccaagtctgtgcctgctgccctgaaggcccccaagattgagaaggtgaatgaccacatctgtgagatcacctgggagtgcctgcagcccatgaagggggaccctgtgatctacagcctgcaggtgatgctgggcaaggacagcgagttcaagcagatctacaagggccctgacagcagcttccgctacagcagcctgcagctgaactgtgagtaccgcttccgggtgtgtgccatccggcagtgccaggacagcctgggccaccaggacctggtgggcccctacagcaccaccgtgctcttcatcagccagaggacagagcccccagccagcaccaacagagacacagtggagagcaccaggacccggcgggccctgagtgatgagcagtgtgccgctgtgatcctggtgctgtttgccttcttcagcatcctgattgccttcatcatccagtactttgtgatcaagtag

SEQ ID NO: 35623 - DNA, 3597 bp, Artificial Sequence
  derived and/or modified sequence
atggccgagcacccccccctgctggacaccacccagatcctgagcagtgacatcagcctgctgagcgcccccatcgtgtctgcagatggcacccagcaggtgatcctggtgcaggtgaaccctggagaggccttcaccatccggcgggaggatggccagttccagtgcatcaccggccctgcccaggtgcccatgatgagccccaatggatctgtgccccccatctacgtgcccccaggctacgccccccaggtgattgaagataatggagtgcggcgggtggtggtggtgccccaggcccctgagttccaccctggcagccacacagtgctgcacaggagcccccacccccccctgcccggcttcatccctgtgcccaccatgatgcctcctccacccaggcacatgtacagccctgtgactggagctggggacatgaccacccagtacatgccccagtaccagagcagccaggtgtatggagatgtggatgcccacagcacccacggccgcagcaacttcagagatgagaggagcagcaagacctatgagcggctgcagaagaagctgaaggaccggcagggcacccagaaggacaagatgagcagcccccccagcagcccccagaagtgccccagccccatcaatgagcacaacggcctcatcaagggccagattgctgggggcatcaacacaggcagcgccaagatcaagtctggaaaaggaaaaggaggcacccaggtggacacagaaattgaggagaaggatgaggagaccaaggcctttgaggccctgctgagcaacatcgtgaagcctgtggccagtgacatccaggccaggacagtggtgctgacctggagcccccccagcagcctcatcaacggggagacagatgagagctctgtgcctgagctgtatggctatgaggtgctgatcagcagcacaggcaaggatggcaagtacaagtctgtgtatgtgggggaggagaccaacatcaccctgaatgacctgaagccagccatggactaccacgccaaggtgcaggccgagtacaacagcatcaagggcaccccatctgaggccgagatcttcaccaccctgagctgtgagccagacatccccaaccccccaagaattgccaacagaaccaagaacagcctgaccctgcagtggaaggcccccagcgacaatggcagcaagatccagaactttgtgctggagtgggatgagggcaaaggaaatggagagttctgccagtgctacatgggcagccagaagcagttcaagatcaccaagctgagccctgccatgggctgcaagttccggctgagcgccagaaatgactatggcaccagcggcttcagcgaggaggtgctgtactacaccagcggctgtgcccccagcatgcctgccagccctgtgctgaccaaggccggcatcacctggctgagcctgcagtggagcaagcccagcggcacccccagtgatgagggcatctcctacatcctggagatggaggaggagaccagcggctacggcttcaagcccaagtatgatggagaggacctggcctacacagtgaagaacctgcggcgcagcaccaagtacaagttcaaggtgattgcctacaacagcgagggcaagagcaaccccagcgaggtggtggagttcaccacctgcccagacaagccaggcatccctgtgaagcccagcgtgaagggcaagatccacagccacagcttcaagatcacctgggacccccccaaggacaatggaggagccaccatcaacaagtatgtggtggagatggccgagggcagcaatggaaacaagtgggagatgatctacagcggggccacccgggagcacctgtgtgaccggctgaaccctggctgcttctaccgcctgcgggtgtactgcatcagtgatggcggccagagcgctgtgtctgagagcctgctggtgcagaccccagctgtgcccccaggcccctgcctgcccccccggctgcagggccggcccaaggccaaggagatccagctgcgctggggcccccccctggtggatggcggcagccccatcagctgctacagcgtggagatgagccccatcgagaaggatgagccccgggaggtgtaccagggcagcgaggtggagtgcaccgtgagcagcctgctgcccgggaagacctacagcttccggctgcgggccgccaacaagatgggcttcggccccttcagcgagaagtgtgacatcaccacagcccctggccccccagaccagtgcaagccaccccaggtgacctgccgcagcgccacctgtgcccaggtgaactgggaggtgcccctgagcaatggaacagatgtgacagagtaccgcctggagtggggcggcgtggagggctccatgcagatctgctactgcggccctggcctgtcctatgagatcaagggcctgagccctgccaccacctactactgccgggtgcaggccctgtctgtggtgggcgccggccccttcagcgaggtggtggcctgtgtgaccccaccttctgtgcccggcatcgtgacctgcctgcaggagatcagtgatgatgaaattgagaacccccactacagccccagcacctgcctggccatctcctgggagaagccctgtgaccacggcagcgagatcctggcctacagcattgactttggagacaagcagagcctgactgtgggcaaggtgaccagctacatcatcaacaacctgcagcctgacaccacctaccgcatccgcatccaggccctgaacagcctgggcgccggccccttcagccacatgatcaagctgaagaccaagcccctgcccccagaccccccccggctggagtgtgtggccttcagccaccagaacctgaagctgaagtggggcgagggcacccccaagaccctgagcacagacagcatccagtaccacctgcagatggaggacaagaatggccgctttgtgtccctgtaccggggcccctgccacacctacaaggtgcagaggctgaatgaaagcaccagctacaagttctgcatccaggcctgcaatgaagctggggagggccccctgagccaggagtacatcttcaccacccccaagtctgtgcctgctgccctgaaggcccccaagattgagaaggtgaatgaccacatctgtgagatcacctgggagtgcctgcagcccatgaagggggaccctgtgatctacagcctgcaggtgatgctgggcaaggacagcgagttcaagcagatctacaagggccctgacagcagcttccgctacagcagcctgcagctgaactgtgagtaccgcttccgggtgtgtgccatccggcagtgccaggacagcctgggccaccaggacctggtgggcccctacagcaccaccgtgctcttcatcagccagaggacagagcccccagccagcaccaacagagacacagtggagagcaccaggacccggcgggccctgagtgatgagcagtgtgccgctgtgatcctggtgctgtttgccttcttcagcatcctgattgccttcatcatccagtactttgtgatcaagtag

SEQ ID NO: 35624 - DNA, 2055 bp, Artificial Sequence
  derived and/or modified sequence
atggccgagcacccccccctgctggacaccacccagatcctgagcagtgacatcagcctgctgagcgcccccatcgtgtctgcagatggcacccagcaggtgatcctggtgcaggtgaaccctggagaggccttcaccatccggcgggaggatggccagttccagtgcatcaccggccctgcccaggtgcccatgatgagccccaatggatctgtgccccccatctacgtgcccccaggctacgccccccaggtgattgaagataatggagtgcggcgggtggtggtggtgccccaggcccctgagttccaccctggcagccacacagtgctgcacaggagcccccacccccccctgcccggcttcatccctgtgcccaccatgatgcctcctccacccaggcacatgtacagccctgtgactggagctggggacatgaccacccagtacatgccccagtaccagagcagccaggtgtatggagatgtggatgcccacagcacccacggccgcagcaacttcagagatgagaggagcagcaagacctatgagcggctgcagaagaagctgaaggaccggcagggcacccagaaggacaagatgagcagcccccccagcagcccccagaagtgccccagccccatcaatgagcacaacggcctcatcaagggccagattgctgggggcatcaacacaggcagcgccaagatcaagtctggaaaaggaaaaggaggcacccaggtggacacagaaattgaggagaaggatgaggagaccaaggcctttgaggccctgctgagcaacatcgtgaagcctgtggccagtgacatccaggccaggacagtggtgctgacctggagcccccccagcagcctcatcaacggggagacagatgagagctctgtgcctgagctgtatggctatgaggtgctgatcagcagcacaggcaaggatggcaagtacaagtctgtgtatgtgggggaggagaccaacatcaccctgaatgacctgaagccagccatggactaccacgccaaggtgcaggccgagtacaacagcatcaagggcaccccatctgaggccgagatcttcaccaccctgagctgtgagccagacatccccaaccccccaagaattgccaacagaaccaagaacagcctgaccctgcagtggaaggcccccagcgacaatggcagcaagatccagaactttgtgctggagtgggatgagggcaaaggaaatggagagttctgccagtgctacatgggcagccagaagcagttcaagatcaccaagctgagccctgccatgggctgcaagttccggctgagcgccagaaatgactatggcaccagcggcttcagcgaggaggtgctgtactacaccagcggctgtgcccccagcatgcctgccagccctgtgctgaccaaggccggcatcacctggctgagcctgcagtggagcaagcccagcggcacccccagtgatgagggcatctcctacatcctggagatggaggaggagaccagcggctacggcttcaagcccaagtatgatggagaggacctggcctacacagtgaagaacctgcggcgcagcaccaagtacaagttcaaggtgattgcctacaacagcgagggcaagagcaaccccagcgaggtggtggagttcaccacctgcccagacaagccaggcatccctgtgaagcccagcgtgaagggcaagatccacagccacagcttcaagatcacctgggacccccccaaggacaatggaggagccaccatcaacaagtatgtggtggagatggccgagggcagcaatggaaacaagtgggagatgatctacagcggggccacccgggagcacctgtgtgaccggctgaaccctggctgcttctaccgcctgcgggtgtactgcatcagtgatggcggccagagcgctgtgtctgagagcctgctggtgcagaccccagctgtgcccccaggcccctgcctgcccccccggctgcagggccggcccaaggccaaggagatccagaccccatctggatag

SEQ ID NO: 35625 - DNA, 3405 bp, Artificial Sequence
  derived and/or modified sequence
atgatgagccccaacggcagcgtgccccccatctacgtgccccccggctatgcaccgcaggttatcgaggacaacggggtacgacgggtggtggtcgtaccccaggctcccgaattccacccgggtagccatactgtgttacacagaagccctcaccccccactcccaggattcattcctgtacccaccatgatgccgcctcccccccgacacatgtactcaccggtcaccggcgctggggacatgacaactcagtacatgccgcagtatcagtctagccaggtctacggggacgtcgatgcgcactccacacacggccgaagtaactttagggatgaacggtcctctaagacatacgaaagattgcagaagaagctcaaagatcggcagggaacgcagaaagacaaaatgtccagcccaccatcatcgccccagaagtgcccctcacctattaacgagcacaacggtttgataaagggacaaatcgcggggggcatcaataccggctccgcaaagatcaaaagtggcaaaggcaagggcggcacacaggttgatacggagatagaagaaaaagacgaagagacaaaggctttcgaagcactcctctcaaacatcgttaagcccgtagcgagtgacatccaggcccgtacagtagtccttacttggtcaccgccttcaagcctcatcaacggagaaacagacgaaagctcagttccagaactatatgggtatgaggtgctgatttcatctaccggaaaagatgggaaatacaaatctgtttacgtcggcgaggagacgaatatcacgctcaacgatctgaaacccgctatggactatcacgctaaagtgcaggccgaatataactcaatcaagggcactccgagtgaggccgaaatttttacgaccctgtcttgtgagcctgatatccctaatcctccccgaatcgctaataggaccaaaaatagtctgaccctgcaatggaaggcaccctcggacaacggaagcaagatacagaatttcgtgctggaatgggacgaaggtaaaggtaacggagaattctgccaatgttacatgggctcacagaagcagtttaaaattacaaagctcagccctgctatggggtgtaaatttaggctctctgcgcgaaacgattatggcactagcggcttcagtgaggaagttctatattatacctccggttgtgctccatccatgccagcctctcctgtactgaccaaagcgggaattacctggctgtcattacaatggtctaagccaagcggcactccatctgacgaggggatcagttacattctcgagatggaagaggaaacatctggctacggctttaagccaaagtacgatggagaggatctggcttataccgttaaaaatcttaggcgctccactaaatacaagtttaaagtgatagcctacaactcggaaggaaagagcaacccaagtgaggttgtggagttcaccacatgccccgacaaaccagggatccccgtgaaaccctctgtcaagggaaagattcatagccatagcttcaaaatcacatgggatcccccaaaggacaacggtggagccacaattaacaagtacgtagtggagatggctgagggcagcaatggtaacaagtgggagatgatttatagcggggcgaccagagagcacttatgtgaccgactgaacccaggctgtttttacagactacgggtttactgtatatctgacggaggccagagcgccgtttcagaatccctgcttgtgcagacccccgcagtgcccccaggcccatgcctgcctcctcgcctgcagggtaggcccaaagcaaaagagatccagcttcggtggggccctcctctggtcgacggcggctccccaatctcttgctatagtgtcgagatgtcgcccatcgagaaggacgagcccagggaggtgtatcagggttccgaagtagaatgcaccgtctcttccctgctgccagggaaaacttactcatttagactaagagccgctaataagatgggtttcggcccatttagcgagaagtgcgacatcactactgcccccggtccgcccgaccaatgcaagcctccccaggttacatgtcggagcgctacctgtgcccaggtcaattgggaggtaccattgtccaatggaacagacgtgactgagtatcggctggaatggggtggggtggagggaagtatgcagatttgctactgcggacccggactgtcctacgaaatcaagggcctctcgccagctaccacatattattgccgcgtgcaggctttgtcagtggtgggggccgggcctttctccgaagtggtagcttgcgtaaccccaccctccgtgcccggcattgtgacctgcctccaggagatcagcgacgacgagatcgagaacccacattatagtccttctacttgtctggcaatatcctgggaaaagccatgcgatcacggcagcgagatcctggcctactccatcgatttcggagataaacaatctctgacagtgggcaaagtgacatcttacattattaacaatctgcagcctgacacaacctaccgaatccgcatacaggctctgaatagtctgggcgctggcccattcagtcatatgattaagctaaagacgaagcccctgccccccgatccacccaggctggagtgtgtggccttttcacaccagaacctgaaactgaagtggggcgagggcaccccaaagactctatcaaccgactccattcaataccacttgcagatggaggataaaaacgggagatttgtgagcctttatagaggcccatgtcacacctacaaggttcagagactgaacgagtccactagttataagttctgcatccaggcttgcaatgaggctggagagggccctttatcccaggaatatatattcactacccccaagagcgtgccggctgccctcaaagcgccaaaaatcgagaaagttaatgatcacatctgtgagattacctgggaatgcctccagcccatgaagggtgaccccgttatctacagtctgcaagtcatgcttggaaaggactccgagttcaaacaaatttataaaggcccagactctagctttcgttattcatcactccaactgaattgcgaatatagattcagagtttgtgccattcggcagtgccaggactccctggggcaccaagatctcgtgggaccatacagcaccaccgtgctttttatttcacagaggacagagccacccgcctccactaaccgtgacacagtcgagtcgaccaggacgcgccgcgcgctgagcgacgagcagtgcgccgccgtgatcctggtcctattcgccttcttttctatcctgatcgcgttcattattcagtattttgtgatcaagtag

SEQ ID NO: 35626 - DNA, 3597 bp, Artificial Sequence
  derived and/or modified sequence
atggccgagcacccccccctgctggacaccacccagatcctgagctccgatatttctctcctgtcagctcctattgtgagcgctgacgggactcagcaagtaattctcgtacaggttaatccgggcgaggccttcaccattcgccgggaagacgggcagttccagtgtatcaccggcccggcgcaggtgcccatgatgagtccaaacggcagcgtgccccctatttacgtccctccaggctatgctccacaggttattgaggacaatggtgtgcgccgagtagtagtggtaccacaggccccagagttccatcctgggagccatactgtgctgcatcggtccccacaccccccgctgccagggttcatccccgtgcctaccatgatgcccccacctccacgccatatgtacagtcctgtgacaggtgctggagatatgaccactcaatatatgccacaatatcaaagctctcaggtgtatggggacgtggacgcacactccacccacgggaggagtaacttcagggacgaacgctcatctaaaacttatgaacgcctgcagaagaagctcaaggaccgccagggcacgcaaaaggacaaaatgtcatctcctccctcatcaccacaaaaatgcccctcacccataaatgaacacaacggtctcattaagggtcaaatcgccggcggaataaataccggatccgccaagatcaaatccggcaaaggtaagggcggcactcaggtagacacagaaatcgaggagaaggatgaggaaacgaaggcttttgaggctctgctgtccaatatcgttaaaccagtggcctcggatattcaggcccgaacggtggtcctcacatggagcccccccagtagtctgattaatggagaaaccgacgagtcatccgtgccagagctgtacgggtacgaggtgctgattagtagcacgggaaaggacggaaaatacaaatccgtttacgtcggcgaagaaactaatattaccctgaacgaccttaaaccagcaatggactatcacgccaaagtgcaagccgaatataacagtataaagggaaccccgtcggaagctgaaattttcacgacactgtcttgtgagccagacattcccaaccccccgagaatagcaaataggaccaagaatagcttgacattgcagtggaaggccccatcagacaacggtagcaagatacagaatttcgttctggagtgggacgaaggtaagggaaacggcgagttctgccagtgctacatgggaagtcaaaagcaatttaagattacaaaactgagccctgcgatggggtgcaagttcagactgtccgcccggaatgattatggaacgtcaggcttttctgaagaagtgctttactatacttctggttgcgcacctagcatgccagcaagtccggttctgactaaggccggaattacctggctctcgcttcaatggtcaaagccctctgggacaccatctgatgaaggcatttcctacatcctcgagatggaggaagagacctcaggctacgggtttaagcccaagtatgatggagaagacctcgcctatactgtgaaaaatttgcggagaagcacaaagtataagtttaaagtcatcgcttataactccgagggtaagtcgaatccctctgaagtggtggagtttacaacctgtccagacaagcccggcattccggtgaagccgtctgtgaaaggcaagatccacagtcacagcttcaaaatcacctgggatccccccaaagacaacggcggcgcgactatcaacaaatatgtggtggaaatggctgagggatccaacgggaacaaatgggagatgatttacagcggcgcaacacgcgagcatctgtgtgaccgtctcaatcccggctgtttctaccgattgcgggtgtattgtattagtgacggcgggcagagcgcggtgagtgaatccttattggttcagacgcctgctgtccctcccggaccctgcctcccgccccgattacagggacggccaaaagctaaggaaatccagctgaggtggggccctccacttgttgatggcggatccccaatcagctgctactccgtcgagatgagtccgattgaaaaggacgagcctagggaggtttatcaaggttctgaagttgagtgcaccgtgtcatctctcttgcctggcaaaacatatagtttcagactgcgggctgccaacaagatggggtttggcccattttcagaaaagtgtgatataacaacggcccctggtcctcctgaccaatgtaagcctccacaagtcacttgccgctccgctacatgcgcacaagtgaattgggaggtacccctttcgaacggaacagatgtcaccgagtacaggctggagtggggaggcgtcgaagggtctatgcagatttgttactgtgggccaggattgtcttacgagattaaagggctgtcccccgctacgacgtattactgccgggtgcaagccctctccgtggttggagcaggaccttttagcgaggtggtggcatgcgttacccccccttctgtgcccggtattgttacatgcctgcaggaaatctccgacgacgagattgaaaatcctcactacagcccatccacatgcctcgccatcagttgggaaaagccctgtgaccacgggtcagaaatcctcgcatactcgatcgactttggggacaaacagtctctgaccgtggggaaggttacttcatacatcattaacaacctccagcccgacactacgtaccggatcagaatccaggcattaaatagtctgggggcagggccttttagccatatgatcaaactgaagactaagccacttccccctgacccccccaggcttgagtgcgtggccttctcacatcagaacctgaaactgaagtggggcgagggtacacctaaaacgctttcgaccgactctattcaatatcacctgcaaatggaggataaaaacgggaggttcgtgagcctctatcgcgggccctgtcacacctacaaggtgcaacgcctgaacgaaagtacttcatacaagttttgcattcaggcctgcaacgaagcgggggagggaccgctttcgcaggaatatatattcactacacctaagtctgttcccgcggcgctgaaagcccccaagatcgagaaagtgaacgaccacatctgcgaaatcacctgggagtgcctccagcccatgaagggggatccagtcatttatagcctgcaggtgatgttgggaaaggatagcgaatttaaacaaatttacaaaggacccgactcgagctttcgctattcgtcactccagctgaattgtgaatacaggttcagggtgtgtgctatccgccagtgccaggattccttaggtcatcaggacctcgtaggcccttactctactacagttctattcatcagtcaacgtactgaaccacccgccagcactaaccgcgatacagtggaatccacccggacaagacgagcactctccgacgagcagtgcgcggccgtgatactggtcctgtttgcctttttctctatcctcatagcgttcataatccaatactttgtcatcaaatag

SEQ ID NO: 35627 - DNA, 3597 bp, Artificial Sequence
  derived and/or modified sequence
atggccgagcacccccccctgctggacaccacccagatcctgagcagtgatattagtctgctttcagcccccatcgttagtgcagacggcacacaacaggtaattctggtgcaggtcaatccaggcgaggcatttactatccgtagagaggatggacagttccaatgtatcaccggacccgcccaagtgcccatgatgtcaccgaatggctccgtgccgcccatttacgttccccctgggtacgcgccacaggtcatcgaggacaacggggtgcggagagtggtcgtcgtgccacaggcccctgagttccaccctggctcccataccgtgttacatcgctctccacacccccctcttcccggttttatccccgtccctacaatgatgcccccgcctccaaggcacatgtattcccccgtgaccggagccggcgatatgactacccagtatatgccacagtaccaatcaagccaggtgtatggtgatgtcgacgctcacagtacacatggtaggagcaacttccgggatgaacgttcctcaaagacatatgagcggcttcagaaaaagctcaaggaccgccagggaacccaaaaagataagatgagctccccacccagcagtccccagaagtgtcctagccccatcaatgaacacaatgggctgataaaaggccagattgcaggaggaattaataccggatccgccaagataaagtctggcaaaggtaaggggggcacccaggtggataccgagatcgaagagaaagacgaagagactaaggcttttgaggcactcctgtctaacatagtgaaacctgtggcaagtgacattcaagcgagaaccgtcgtgctgacatggtccccgcctagctccctgatcaacggagaaaccgatgagtcttctgtccctgaactatatggatatgaagtgcttatctccagcaccggaaaagacggaaagtataaatcagtgtatgtgggggaagaaaccaacatcacactgaacgatcttaagcctgctatggactatcacgcgaaggtccaggcagagtataactcaatcaaagggacaccttcagaggccgaaatttttacaaccctgagctgcgaacctgacatacccaacccaccacggattgctaatcggactaaaaacagcctcactctgcagtggaaagccccatctgataacggaagcaaaatccagaactttgtcctggagtgggatgagggcaaaggtaatggagaattttgccagtgttacatggggagccagaagcaatttaagatcacaaaactgagtccagccatgggctgcaaattccggctgagcgctcgaaacgactacggcacaagtggcttctcggaggaagttttgtattatacgtccggctgtgccccttcgatgcccgcttctcctgtgctgacgaaagcgggaataacatggttgtccctgcaatggtctaaaccatccggcacaccctcagatgaagggatttcctacatccttgagatggaggaagaaacaagtgggtacgggtttaagccaaagtatgatggggaggacctggcatataccgtcaaaaacttaaggcggtccacaaagtacaagtttaaagttattgcatacaacagtgagggcaaatcaaatccatccgaagttgttgagttcactacgtgccccgacaagccaggtatcccagtgaagccttctgtaaaaggaaagattcattcacattcgtttaagattacctgggatccccccaaagacaatgggggcgctacaataaacaagtatgttgtggagatggctgaaggatctaatggcaacaagtgggagatgatctatagtggcgcaaccagggaacatctctgcgacagactcaatccggggtgcttctaccgtctgcgggtctactgcatttctgatggtggacaaagtgccgtgagcgaatctttgctggttcaaactccagcagtgccccccggcccatgtctgcctccgcgcctgcaaggcaggcccaaggcaaaggagatccagctgagatgggggcccccactggtggatggggggtctccgattagttgctactctgttgagatgtcccctatcgagaaggatgaaccgagggaagtctatcagggcagtgaagtggagtgcactgtttcatccctgcttccagggaagacatacagctttaggctgcgtgccgccaacaaaatgggttttggcccgttctccgaaaaatgcgacatcaccactgccccaggaccacccgatcagtgtaagccccctcaggttacctgcagatccgcgacttgcgcacaggtcaactgggaggtgcccctgagcaacggcacagacgtgaccgaatataggctggagtgggggggcgttgagggttctatgcagatttgctactgcggacccggcctgtcctacgagattaaggggctaagcccagccaccacttactattgcagggtgcaggcactgtctgtggtcggcgccggacccttctcagaagtagttgcctgcgtgactcctccctcagtccctggtatcgtgacatgcctccaggaaatctctgatgacgaaatagagaacccgcattactcacctagcacgtgcctggctatatcatgggagaaaccatgcgatcatgggtcagagattctggcctactcaatagactttggggataaacagtctctcaccgtgggaaaggtaacctcgtacatcattaataatctgcagcccgatacaacatataggattaggatccaggccctgaattccctgggtgcaggcccgttttcccacatgatcaagctgaaaactaaacccttacctccagacccgcccagacttgagtgcgtggcattttctcaccagaatttgaaactgaagtggggggaaggcactcccaagaccctctccacagacagtattcagtaccacctgcagatggaagacaagaatgggagatttgtgagcctgtatcgaggcccctgtcatacttataaagtgcagaggctgaacgaaagtactagctacaaattctgtatccaggcatgcaacgaggctggcgaaggtccactctcccaagagtacattttcaccacacccaaatccgtccctgcagctctcaaagctccaaagattgaaaaggtcaacgatcatatttgcgaaattacctgggagtgccttcagcccatgaaaggggaccctgtgatttatagcctgcaggttatgttgggaaaagactccgagttcaaacagatttataaagggcctgactcctccttcaggtatagctctctccaactaaactgtgaatatcgcttcagggtgtgtgctattcgacagtgtcaggattctttggggcatcaggaccttgtgggcccatatagcaccaccgtattgttcatctctcagcggaccgaaccaccggcttctaccaatagggacacggtagaaagcaccaggacgagaagagcgctgagcgatgaacaatgcgccgcagtgatccttgtgctctttgcatttttctctatcctgatcgccttcatcatacagtacttcgtgataaagtag

SEQ ID NO: 35628 - DNA, 2055 bp, Artificial Sequence
  derived and/or modified sequence
atggccgagcacccccccctgctggacaccacccagatcctgagctctgatataagccttctgagcgcccctattgtctccgctgatggcacacagcaggtcattctggtgcaggttaaccccggggaggcatttactattaggcgggaggatggtcaatttcaatgtatcacaggacctgcacaggtgccaatgatgtctcctaatgggagtgtcccgcctatatatgttcctccaggctacgctccgcaagtcatcgaggacaacggagtgcgaagagtggtggtggttcctcaggccccagagtttcatcctgggtcccacacagtgcttcatcgttcgccacaccctcccctgcccggcttcatacccgtccctactatgatgcccccccctccacggcacatgtatagtcccgtaaccggagctggcgatatgactactcaatacatgccgcagtaccagtcttctcaggtatatggagatgtggacgcgcactctacccacgggcgttcaaatttccgcgacgaacgaagttctaagacgtatgaacggctgcagaagaaactaaaagacagacagggcacccagaaagataaaatgtcttcgccgccctcttcgccacagaaatgtcctagccccattaatgaacataatggccttatcaaaggacagatcgccggtggcatcaatactgggagtgccaagatcaaatccgggaagggcaagggtggcactcaggtggacaccgaaatcgaggagaaagatgaggagacgaaggcgtttgaggcacttctgtccaacatagtgaagccagttgcttcagatatccaggcccgtacagtcgtgctcacctggagccccccatcaagtttgattaacggcgagacggacgaatctagtgttcctgagctctatggctatgaggtgttgatttcgagcaccggcaaagatgggaaatacaaaagcgtctatgtgggcgaggagacaaatataacgttgaatgatctaaaaccagctatggactatcatgcgaaggtgcaggctgagtacaacagcatcaaggggactccatccgaagcagaaatcttcaccacactctcctgcgagccagacatccctaaccccccacgaattgccaaccggaccaagaacagcctgaccctccagtggaaagccccctcagacaatggttctaaaatccagaattttgtgttggaatgggacgaaggcaagggaaacggagagttttgtcaatgttacatgggctcacagaagcagtttaagatcactaaactatcaccggcaatgggatgcaaattccgtctgagtgcgagaaacgattacggcacttctggcttctctgaagaagtactttactacacttctgggtgtgccccttccatgccagctagtcctgttctgactaaagccggcatcacatggctgtcacttcagtggagcaaaccctcaggcactccatcagacgaggggatctcctacattctcgaaatggaggaggaaacctccggttatggattcaagcccaaatatgacggagaggacctggcatacacagtcaagaatctgcgcaggtcaacaaagtacaaatttaaagtcatagcctataattctgaaggtaagtcaaacccatcagaagttgtggagttcacaacctgccccgacaagcctggaattccggtgaagccctctgttaagggaaagattcattcccactcatttaagatcacttgggatccccccaaggataatgggggagcaactatcaacaaatacgtcgtggagatggcggaaggttcaaacgggaataaatgggaaatgatctattccggggccaccagggaacacctctgcgacaggcttaatcctggctgtttctacaggttacgggtttattgcatctcagatggcggacaatctgccgtgtccgaatctctgctggtgcaaacccccgctgttccacctggcccttgtctacccccaagactgcaagggaggcctaaagctaaagagatccaaactcctagtggatag

SEQ ID NO: 35629 - DNA, 3405 bp, Artificial Sequence
  derived and/or modified sequence
atgatgagcccaaatggatcagtcccccctatctatgtcccaccgggttatgccccacaggtaattgaagacaatggtgtgagacgcgttgtagtggtcccacaggctcccgagttccacccaggctcccacacagtcctccatagaagcccacatcccccactgccgggattcataccagtgcccaccatgatgcctcctcccccacggcacatgtactctccagttactggcgcaggggatatgacaacccagtacatgccccaataccaatcctcacaggtttatggtgatgtggatgctcacagcacgcacggccgatctaatttccgtgatgagcggagcagtaagacgtacgagcggctccaaaaaaaactgaaagaccggcagggcacgcaaaaggacaaaatgtcatctccacccagctcccctcaaaagtgccccagtcccatcaatgaacataatggcttaataaaggggcagatcgctggtggcattaacaccgggagcgccaaaattaagtccggaaagggcaaaggtggcacacaggtggataccgagatcgaagagaaagatgaagagaccaaggctttcgaggccctcctgagcaatattgtgaaacccgtcgcatcagacatacaggcccgtacagttgtgctgacttggagcccaccttcctccctaattaacggcgagaccgatgaaagtagtgtaccagagctatacggatatgaggtgctgatctcgagtacaggtaaagacggcaagtacaagtcggtgtatgtgggagaagaaacaaatattaccctgaacgatttgaaaccagcgatggattaccacgcaaaagtacaggcagagtacaatagtattaagggcaccccctcagaggccgaaatcttcacaacattatcctgcgaacccgatatccctaacccccctcgtatcgccaaccgtactaaaaactccctcaccctgcagtggaaggcaccctctgataacggtagtaaaattcagaactttgtcctcgaatgggacgaggggaaaggcaatggggagttttgtcaatgctatatgggaagccagaaacaattcaaaatcaccaagttgagccctgcaatgggttgcaagttcagattgagtgctcgcaacgactacggcacatcaggattctctgaagaggtgctttattatacatcggggtgcgcaccttcgatgcccgctagcccagtgctgacaaaggctgggataacctggctgtctttacaatggagtaagcctagcggaacacccagtgatgaaggaatcagttatattttagaaatggaggaagaaacatccggctatggcttcaagcccaagtacgatggcgaagacctggcttatactgtgaagaacctgaggagatccaccaaatacaagtttaaggttatagcatacaattctgaaggcaaatccaatccttcagaggtggtagagttcaccacatgtcctgataaacccggaatccccgtcaaacctagcgtgaagggcaagatccactctcatagcttcaaaattacttgggacccccctaaggacaacgggggagcaaccatcaacaagtacgtggtggagatggccgagggctctaacggcaacaagtgggagatgatttatagtggggcaacccgcgaacacctgtgtgatcgtcttaatccaggatgcttttacagacttcgcgtgtactgcatcagcgacgggggacagtcagccgtttctgagagcttgctggtccagactccagctgtaccacccggtccctgcctcccacctagactccaaggcaggccgaaggcaaaggagatccaactgaggtggggcccacccctggtcgacggcggatctcccataagctgttattcagtggagatgagtcccatcgagaaggatgagccacgcgaagtgtaccagggaagtgaagttgaatgtaccgtcagctccttgctccctggaaaaacctattctttccggttgcgggctgcaaacaagatgggcttcgggccattctcggaaaaatgcgacataactacagcaccgggacctcctgaccagtgcaaaccacctcaggtcacttgccgttctgccacttgcgctcaggtgaactgggaagttccattatctaacggaaccgatgtgaccgaataccggctggagtggggcggtgtggagggaagcatgcagatctgctactgtgggcctggcttgagctacgaaataaagggcttaagtcctgctaccacatactactgtcgtgtgcaagctctgagcgttgtcggcgctgggccatttagcgaggtggtcgcatgtgtaaccccacccagcgttcccggtatcgtcacgtgtctccaagagatctctgacgatgaaattgaaaacccgcactatagcccttctacctgtttggcaatcagctgggagaagccctgcgaccacgggtctgagatcttggcttacagtattgacttcggtgacaagcaatcgctaaccgtgggaaaagtgacgtcatacattatcaataacttgcagccagataccacataccgaatccgtatccaagcccttaacagcctaggagccggacccttcagtcatatgatcaagttaaaaactaaacctctcccaccagatccccctcggttagagtgtgtcgccttcagccaccagaatctcaagctgaagtggggagaggggacccccaaaacgctatcaaccgatagcattcagtatcaccttcagatggaggataagaacgggagattcgtcagcctgtatcgcggaccatgccacacttacaaggttcagcgcctcaatgaatctaccagttacaaattttgtatccaggcttgtaatgaggccggagaagggccactgagccaggaatacatctttaccacccctaagagcgttcccgctgcactcaaagccccaaaaattgagaaagtgaacgatcacatttgcgagatcacgtgggagtgcctgcagccaatgaaaggtgacccggtaatctattctcttcaggtgatgttggggaaagacagcgagttcaagcagatctacaaaggccctgattctagcttccgttatagttcgttgcagctcaactgtgaataccggttcagggtgtgtgctatccgtcagtgccaggactcccttggtcatcaggatctggttggaccttactctactaccgttcttttcatctcccagagaaccgagccccctgcctccactaatcgcgatacagtcgaatctacccgcacgaggcgagccctcagcgacgagcagtgcgccgcagtgatcctagtgttattcgcattcttctctatactcatcgccttcatcattcaatactttgtcataaaatag

SEQ ID NO: 35630 - DNA, 3597 bp, Artificial Sequence
  derived and/or modified sequence
atggcggagcaccctcctttgctggacacaacacagattctcagctccgacatatctctcctcagtgcccctatcgtctctgcagacggcactcagcaagtaatactggtgcaggtcaatcctggcgaggcttttacgatcaggcgagaagatggccagtttcagtgcatcaccggcccagcccaagttcccatgatgtctccaaacgggagcgtgccgcctatatatgtaccacctgggtacgctcctcaagtgatagaggataacggagtgaggcgtgtcgttgttgtccctcaagcaccagaattccatcctgggtctcatactgtgttacaccgctccccccaccctcctctaccaggttttatccctgtcccaacaatgatgcccccacctcctcgtcatatgtattctccagttaccggagcgggtgatatgacgacacaatatatgccccaatatcagtcaagccaagtgtacggggacgtggatgcccacagcacacacggccgttccaacttcagggacgagaggagctctaagacctacgagaggttacagaagaagctgaaggacaggcaggggacacagaaggacaagatgtcgtctcccccatcaagcccacaaaagtgcccttccccgatcaatgagcacaacgggctaattaaggggcagatcgccggaggcattaatactgggagcgcaaagattaagtccggcaaaggcaaaggaggaacccaggtcgacaccgagatcgaggaaaaggacgaagagacaaaggcctttgaggcactgctgtcaaatatagtgaagccagtcgcatcggatatacaggccagaacggtggttctgacatggtcccccccatctagcctgattaacggagaaactgacgaatccagcgttcccgagctgtacggttacgaggtgctgatttccagcactgggaaggacgggaagtataagtcagtatatgtgggggaagagacgaatatcacacttaacgatctgaagccagccatggattaccatgcgaaggtccaggcggagtataatagtatcaaggggacaccctccgaagcagagatctttaccaccctgtcctgtgagcccgacataccaaaccccccacgaatcgccaaccgcactaagaactccctcacacttcaatggaaagcgccttcagacaacggctctaagattcagaactttgtgttagagtgggacgagggaaaagggaacggtgaattctgtcagtgctatatgggctctcaaaaacagtttaagatcacaaagctgagtcctgccatgggctgcaaattccgactgagtgcgagaaacgactatggcacctcaggcttctccgaggaagtgttatattacacaagcggctgtgcccctagcatgccggctagccccgttctgactaaggctggaattacctggttgtctctgcagtggtccaagccaagtgggacacccagcgatgagggcatctcctatatcctagaaatggaagaggagacgagcggctacgggtttaaaccaaaatatgacggcgaggacttggcctacacagtgaaaaacctcagacgctctactaaatacaagtttaaggtcattgcttacaactctgagggcaagagcaaccctagcgaagttgtcgagttcacgacttgccctgataagcctggcatcccagtcaaaccttccgtcaaaggaaagattcactctcattcatttaaaatcacatgggaccccccaaaagacaacggaggtgccacaataaacaaatacgttgttgaaatggccgaaggcagtaatggcaacaaatgggagatgatttactcaggggctactagggaacatttatgcgatagacttaaccctggttgtttctaccgcctgagggtgtactgcatttccgatggcggtcagtccgcagtgtcagagtccctcctggtgcagacacctgcggtgccaccaggtccctgtcttcctcctcgcctgcagggacggccaaaagctaaagagatccagctgcgctgggggcctccacttgtagatgggggatccccgattagctgttacagcgtcgaaatgagcccaatcgagaaagatgaaccaagagaggtgtaccagggctctgaggtcgagtgtacggtgagctccctcctgcccggtaaaacttactccttcagactacgagcagctaacaagatgggtttcggaccattttccgaaaaatgcgatattaccaccgccccaggcccacctgaccagtgcaaaccaccccaagttacctgcagatccgcaacgtgcgcccaggttaactgggaggtacctctgtcgaatgggacggatgtgactgaataccgactcgaatggggcggtgtagaggggagcatgcagatctgctattgtggtcctggactgagttatgagattaaagggctcagcccggcaacaacatactattgccgcgtacaggccctcagtgtcgttggagccggtccatttagtgaggtggtcgcctgtgtcacgcctccctcagtgcccggtatcgttacctgcctacaggagattagcgatgatgagatcgagaacccccattacagcccttcaacctgcctggcgattagctgggaaaagccttgcgaccacggttctgaaattctggcttattcaatagactttggagataaacagagcctgaccgtggggaaagtgacctcctacattatcaataacctgcagcccgacaccacatacagaatcagaatccaggctctgaacagcctgggcgctggccctttcagtcacatgatcaagctgaaaacaaaacctctgccaccggacccacctcggcttgagtgtgtggctttttcccaccaaaacttaaaactgaaatggggtgaaggcaccccaaaaaccctgagcaccgactcaatccagtaccacctgcaaatggaagacaagaacggtaggttcgtttccctgtacagagggccttgccatacttataaggtgcagcgcctgaatgaatctacctcctataaattctgtattcaggcctgcaatgaggctggtgaggggccactctcccaagaatatatctttactacaccaaaaagcgtgccagccgctctgaaggcccctaagatcgaaaaagtaaatgatcacatctgcgaaattacctgggaatgcctgcagcccatgaaaggcgatcccgttatctattcccttcaagtgatgctgggcaaggattccgagttcaaacaaatctacaagggtcctgattcttcatttcggtacagcagtctgcagctgaattgtgagtacagatttcgcgtttgcgccattagacagtgtcaggacagtctcggccaccaggatcttgtgggtccatacagcacgaccgttttattcatctctcagcgcacagagcctcccgctagtaccaatcgcgacacagttgagagcacccggactagacgagcactgtccgatgaacagtgcgccgctgtgatactggtgctctttgccttcttttctatcttgatcgcgttcatcatccagtactttgtgattaagtag

SEQ ID NO: 35631 - DNA, 3597 bp, Artificial Sequence
  derived and/or modified sequence
atggcagaacacccaccgttactcgacacaacccagattctgagcagtgacatctctttgctgtcagctcctatagtgtcagctgacgggacacaacaggtcatcctcgtccaagttaacccaggggaagcatttacaatcaggagagaagacggccaatttcagtgcataactggacctgctcaagttccaatgatgtcccccaacgggagtgttccacccatctacgtcccacccggatatgcccctcaggtcatcgaggataacggcgtgcgtagggtcgtggtcgtgccacaagcgcctgaattccacccaggaagccacactgtcctccacagatctccacaccctccactccctgggtttattcctgtgcccactatgatgccacccccaccacggcatatgtactcccccgtgacaggagcaggggatatgaccacacagtatatgccgcagtaccagtcttctcaggtgtatggggatgtcgacgctcatagtacacacggcaggtcgaatttccgcgacgagcgctcttcaaaaacctatgagcggcttcagaaaaaactaaaagaccgccagggaacccaaaaagacaagatgtccagtccaccttcaagcccccagaagtgcccaagccctatcaacgaacacaacggattgattaaagggcaaatcgcaggcggaatcaacaccgggagcgccaagataaagtccgggaagggcaagggaggcacccaggttgataccgagatcgaggagaaagatgaggaaaccaaggcgtttgaggcactcctgagcaacattgtgaaacctgttgcatctgacatacaagcacgcaccgtggtcctgacatggagtcccccatcctccctgataaacggtgaaactgacgaaagttctgttcccgaattgtatggctacgaagtgctgatctcaagcacgggcaaagacgggaagtacaagtcagtgtacgtgggcgaggaaactaatattacactaaacgatttgaagccagctatggactaccacgctaaggtgcaggcggagtacaacagcataaaggggacaccctcagaggcagaaatatttacaacgctctcctgcgagcccgacattcccaatccacctcgtatcgccaaccgaacaaagaactcgctgacgctgcagtggaaggcccctagtgacaacggtagtaagatccaaaactttgttctggaatgggatgaaggcaaaggaaacggtgagttctgtcaatgttacatgggctcccagaagcagttcaaaattacaaagctttcgcccgcaatggggtgcaagtttaggttaagcgctcgtaacgactatgggacctccggtttcagtgaggaagttctgtattacacttctgggtgcgctccatctatgcccgcaagccccgtcctcaccaaagctggcataacctggttgagtctgcaatggagcaaacctagcggcacccccagcgatgagggcatctcttatatccttgagatggaggaggaaacgtccggttatggattcaaaccaaagtacgatggagaggacttggcctacaccgtgaagaatctcagaagaagtacaaaatacaagttcaaagtgatagcatacaattcagaaggcaagtcgaacccatccgaggtggtcgaattcacaacctgcccagacaagcccggaatcccagtcaagcctagcgtgaaaggcaaaatccacagtcactctttcaagattacatgggatcctcctaaggacaatggtggcgcaacgatcaacaaatatgtggtggaaatggccgagggcagcaatggcaacaaatgggaaatgatttactctggcgctaccagagaacatttgtgcgataggctgaatccaggctgtttttacaggctccgagtgtactgtattagcgacggaggccagtcggcggtgagtgagagcctcttagtccagacacctgcagtgccccctgggccttgcttacctccaagattacagggcagacctaaggctaaggagatccagttaaggtggggtccacctctcgttgatgggggtagtccaatttcttgttattccgttgaaatgtccccaattgagaaggacgagcctcgtgaagtgtatcaaggctccgaagtcgagtgtactgtgagcagtcttctgccgggaaagacctatagcttcaggctgcgggcagccaacaagatgggcttcggcccatttagcgaaaaatgcgatatcactactgcaccaggacccccagatcagtgcaagccccctcaggtcacctgtagaagtgcaacttgcgctcaggtgaattgggaagttcccttgtctaatggaaccgatgtcacagaatatcggttggagtgggggggtgtggaaggctctatgcagatttgttactgtggtcctggtctgagctacgaaatcaagggcctatctccggctaccacgtattattgtagagtgcaggcactgtcagtggttggagcagggcctttttcagaggtcgtggcttgtgttacgcccccaagtgtaccaggaatcgtgacatgtctgcaggagattagcgatgatgagatcgagaatcctcactactccccaagcacctgtctcgcaatcagctgggaaaaaccttgtgatcatgggagtgagatcctcgcctatagcatcgacttcggagataaacagtcgctgacagtcggcaaagtcacaagctacatcatcaataatctgcagcccgacaccacctatagaattcggattcaggctctcaatagtctcggcgcaggtccctttagccatatgataaagctcaagaccaagcctctccctccagatcctcccagacttgagtgtgtagccttctcgcaccagaatttgaaacttaaatggggggaggggacccccaaaacgctctccaccgactctatacagtaccacttgcagatggaggataagaatggccgattcgtcagcctctacagagggccatgccacacctacaaggttcagagacttaacgaatccactagctacaagttttgcatccaggcatgcaatgaagctggagagggcccactgagccaggaatacatattcaccacgcccaagtccgtacccgcagctctcaaggcccctaagatcgagaaggtcaacgatcacatctgcgaaatcacttgggagtgtctccaacctatgaaaggggatcccgtcatttacagtctgcaggtcatgctgggcaaagattcagaatttaaacagatttacaaaggccctgattctagctttcgatacagcagtctgcagttgaattgcgagtacaggttcagagtctgcgccattcgacaatgtcaggatagtctcggtcatcaggatttagtgggcccatactccaccaccgttcttttcatcagccagaggactgaacccccagctagtactaatagggatacggttgaatctactagaaccagacgggcactgagcgatgagcagtgtgccgctgtcattctagtgttgttcgcgttcttctcgattcttatcgccttcatcattcagtacttcgtcataaagtag

SEQ ID NO: 35632 - DNA, 2055 bp, Artificial Sequence
  derived and/or modified sequence
atggccgaacatccccctttgctcgacaccacgcagattctcagttcagatatcagtctgctctctgcccctattgtgtcagccgacggtacccagcaggtgatcctggttcaggtgaatccaggtgaggcctttaccatcagacgtgaagacggacagttccaatgtataactggccctgcccaggtgcctatgatgtctcccaacgggtctgtacccccaatatacgttcccccaggatatgcacctcaagttattgaagataacggggtgcggagggtggtggtggtcccccaggcccctgagtttcaccctggctcgcacaccgtactgcacagaagtccccaccccccattgcccggattcatacctgtacctactatgatgcctccaccccctcggcacatgtacagccccgtgacaggggctggggacatgactacccagtatatgccgcagtaccagtcctcccaggtatatggagacgtggacgctcacagcactcatggtaggtccaatttccgggacgaaaggtccagcaagacgtacgaacggctgcagaaaaagctaaaggataggcagggcacacagaaggacaagatgtctagccctccctcttctccccagaagtgtccttcccctatcaacgagcataatgggttgatcaagggacaaatcgcaggcggaatcaataccggcagcgccaaaatcaaaagcggaaagggcaaaggtgggacacaagttgatactgaaattgaggagaaagatgaagagacaaaagcctttgaagccctactgtcaaacatagtgaagcccgtcgcatcagacatccaggccagaaccgtagtgctgacatggagtcctcctagttccttgatcaacggggaaaccgacgaaagcagtgttcctgaactttatgggtacgaggtgcttatatcaagcaccggaaaggacggaaagtacaagagcgtgtatgttggggaagagactaacattactctgaatgatcttaagccggctatggattatcacgcgaaagttcaagctgagtataacagtattaagggaacaccctccgaagcagaaattttcactactctgtcatgtgaacccgacattcctaaccctccccgaatcgccaacagaacaaagaatagtctcacccttcaatggaaggccccatcggacaacggttcaaagatccagaatttcgtcctggaatgggatgaaggtaaaggaaatggcgaattctgccagtgctacatgggcagccagaaacaattcaagatcaccaaattaagtcctgcgatggggtgtaagttccgcctgtctgccaggaacgactacgggaccagcgggtttagcgaggaagtgctgtactacacatccggctgtgccccatccatgccggcaagtcccgtactgactaaggctggcataacctggctgtctctgcagtggtctaagcctagcggaacgccttcagacgaagggatttcctacattctggagatggaggaagagacaagcggctatggttttaagcccaagtacgatggggaagacctggcatataccgtgaaaaatctacgtcgatccacaaagtataagtttaaggtaatcgcttacaacagcgagggaaagagcaacccgtccgaggtagtagagttcacaacatgccctgataagccaggtattcccgttaaaccctcagttaagggaaaaatacattctcacagttttaaaataacctgggatccgcctaaagataacgggggagctacaattaataagtatgtggtcgagatggctgagggcagcaatggaaataaatgggaaatgatttactcaggtgctacaagggaacacttgtgcgatcgcctaaatccagggtgtttctatagactgcgggtgtactgtatctcagacggtggccagtcagctgtgagtgagagcctgttagtgcaaacgcccgcagtaccgcctggtccgtgcctcccaccgcgacttcaaggtcggccaaaggccaaagagattcaaacccccagcggatag

SEQ ID NO: 35633 - protein, 484 aa, Artificial Sequence
  derived and/or modified sequence
MERRMKAGYLDQQVPYTFSSKSPGNGSLREALIGPLGKLMDPGSLPPLDSEDLFQDLSHFQETWLAEAQVPDSDEQFVPDFHSENLAFHSPTTRIKKEPQSPRTDPALSCSRKPPLPYHHGEQCLYSSAYDPPRQIAIKSPAPGALGQSPLQPFPRAEQRNFLRSSGTSQPHPGHGYLGEHSSVFQQPLDICHSFTSQGGGREPLPAPYQHQLSEPCPPYPQQSFKQEYHDPLYEQAGQPAVDQGGVNGHRYPGAGVVIKQEQTDFAYDSDVTGCASMYLHTEGFSGPSPGDGAMGYGYEKPLRPFPDDVCVVPEKFEGDIKQEGVGAFREGPPYQRRGALQLWQFLVALLDDPTNAHFIAWTGRGMEFKLIEPEEVARLWGIQKNRPAMNYDKLSRSLRYYYEKGIMQKVAGERYVYKFVCEPEALFSLAFPDNQRPALKAEFDRPVSEEDTVPLSHLDESPAYLPELAGPAQPFGPKGGYSY

SEQ ID NO: 35634 - protein, 445 aa, Artificial Sequence
  derived and/or modified sequence
MDPGSLPPLDSEDLFQDLSHFQETWLAEAQVPDSDEQFVPDFHSENLAFHSPTTRIKKEPQSPRTDPALSCSRKPPLPYHHGEQCLYSSAYDPPRQIAIKSPAPGALGQSPLQPFPRAEQRNFLRSSGTSQPHPGHGYLGEHSSVFQQPLDICHSFTSQGGGREPLPAPYQHQLSEPCPPYPQQSFKQEYHDPLYEQAGQPAVDQGGVNGHRYPGAGVVIKQEQTDFAYDSDVTGCASMYLHTEGFSGPSPGDGAMGYGYEKPLRPFPDDVCVVPEKFEGDIKQEGVGAFREGPPYQRRGALQLWQFLVALLDDPTNAHFIAWTGRGMEFKLIEPEEVARLWGIQKNRPAMNYDKLSRSLRYYYEKGIMQKVAGERYVYKFVCEPEALFSLAFPDNQRPALKAEFDRPVSEEDTVPLSHLDESPAYLPELAGPAQPFGPKGGYSY

SEQ ID NO: 35635 - protein, 430 aa, Artificial Sequence
  derived and/or modified sequence
MERRMKAGYLDQQVPYTFSSKSPGNGSLREALIGPLGKLMDPGSLPPLDSEDLFQDLSHFQETWLAEAQVPDSDEQFVPDFHSENLAFHSPTTRIKKEPQSPRTDPALSCSRKPPLPYHHGEQCLYSSSVFQQPLDICHSFTSQGGGREPLPAPYQHQLSEPCPPYPQQSFKQEYHDPLYEQAGQPAVDQGGVNGHRYPGAGVVIKQEQTDFAYDSDVTGCASMYLHTEGFSGPSPGDGAMGYGYEKPLRPFPDDVCVVPEKFEGDIKQEGVGAFREGPPYQRRGALQLWQFLVALLDDPTNAHFIAWTGRGMEFKLIEPEEVARLWGIQKNRPAMNYDKLSRSLRYYYEKGIMQKVAGERYVYKFVCEPEALFSLAFPDNQRPALKAEFDRPVSEEDTVPLSHLDESPAYLPELAGPAQPFGPKGGYSY

SEQ ID NO: 35636 - DNA, 2298 bp, Artificial Sequence
  derived and/or modified sequence
cacgttcttatgtaaccgagcccgggtaaagcagggctgcagaaagcagaaacggcgagcccggctcctgggagcaggtctcggcccccgcttggggccccggccgtgcggccggagggagcggccggatggagcggaggatgaaagccggatacttggaccagcaagtgccctacaccttcagcagcaaatcgcccggaaatgggagcttgcgcgaagcgctgatcggcccgctggggaagctcatggacccgggctccctgccgcccctcgactctgaagatctcttccaggatctaagtcacttccaggagacgtggctcgctgaagctcaggtaccagacagtgatgagcagtttgttcctgatttccattcagaaaacctagctttccacagccccaccaccaggatcaagaaggagccccagagtccccgcacagacccggccctgtcctgcagcaggaagccgccactcccctaccaccatggcgagcagtgcctttactccagtgcctatgacccccccagacaaatcgccatcaagtcccctgcccctggtgcccttggacagtcgcccctacagccctttccccgggcagagcaacggaatttcctgagatcctctggcacctcccagccccaccctggccatgggtacctcggggaacatagctccgtcttccagcagcccctggacatttgccactccttcacatctcagggagggggccgggaacccctcccagccccctaccaacaccagctgtcggagccctgcccaccctatccccagcagagctttaagcaagaataccatgatcccctgtatgaacaggcgggccagccagccgtggaccagggtggggtcaatgggcacaggtacccaggggcgggggtggtgatcaaacaggaacagacggacttcgcctacgactcagatgtcaccgggtgcgcatcaatgtacctccacacagagggcttctctgggccctctccaggtgacggggccatgggctatggctatgagaaacctctgcgaccattcccagatgatgtctgcgttgtccctgagaaatttgaaggagacatcaagcaggaaggggtcggtgcatttcgagaggggccgccctaccagcgccggggtgccctgcagctgtggcaatttctggtggccttgctggatgacccaacaaatgcccatttcattgcctggacgggccggggaatggagttcaagctcattgagcctgaggaggtcgccaggctctggggcatccagaagaaccggccagccatgaattacgacaagctgagccgctcgctccgatactattatgagaaaggcatcatgcagaaggtggctggtgagcgttacgtgtacaagtttgtgtgtgagcccgaggccctcttctctttggccttcccggacaatcagcgtccagctctcaaggctgagtttgaccggcctgtcagtgaggaggacacagtccctttgtcccacttggatgagagccccgcctacctcccagagctggctggccccgcccagccatttggccccaagggtggctactcttactagcccccagcggctgttccccctgccgcaggtgggtgctgccctgtgtacatataaatgaatctggtgttggggaaaccttcatctgaaacccacagatgtctctggggcagatccccactgtcctaccagttgccctagcccagactctgagctgctcaccggagtcattgggaaggaaaagtggagaaatggcaagtctagagtctcagaaactcccctgggggtttcacctgggccctggaggaattcagctcagcttcttcctaggtccaagccccccacaccttttccccaaccacagagaacaagagtttgttctgttctgggggacagagaaggcgcttcccaacttcatactggcaggagggtgaggaggttcactgagctccccagatctcccactgcggggagacagaagcctggactctgccccacgctgtggccctggagggtcccggtttgtcagttcttggtgctctgtgttcccagaggcaggcggaggttgaagaaaggaacctgggatgaggggtgctgggtataagcagagagggatgggttcctgctccaagggaccctttgcctttcttctgccctttcctaggcccaggcctgggtttgtacttccacctccaccacatctgccagaccttaataaaggcccccacttctcccattaaaaaaaaaaaaaaaaaaaaaaaaaaaaaaaaaaaaaaaa

SEQ ID NO: 35637 - DNA, 1455 bp, Artificial Sequence
  derived and/or modified sequence
atggagagaagaatgaaggccggctacctggaccagcaggtgccctacaccttcagcagcaagagccccggcaacggcagcctgagagaggccctgatcggccccctgggcaagctgatggaccccggcagcctgccccccctggacagcgaggacctgttccaggacctgagccacttccaggagacctggctggccgaggcccaggtgcccgacagcgacgagcagttcgtgcccgacttccacagcgagaacctggccttccacagccccaccaccagaatcaagaaggagccccagagccccagaaccgaccccgccctgagctgcagcagaaagccccccctgccctaccaccacggcgagcagtgcctgtacagcagcgcctacgacccccccagacagatcgccatcaagagccccgcccccggcgccctgggccagagccccctgcagcccttccccagagccgagcagagaaacttcctgagaagcagcggcaccagccagccccaccccggccacggctacctgggcgagcacagcagcgtgttccagcagcccctggacatctgccacagcttcaccagccagggcggcggcagagagcccctgcccgccccctaccagcaccagctgagcgagccctgccccccctacccccagcagagcttcaagcaggagtaccacgaccccctgtacgagcaggccggccagcccgccgtggaccagggcggcgtgaacggccacagataccccggcgccggcgtggtgatcaagcaggagcagaccgacttcgcctacgacagcgacgtgaccggctgcgccagcatgtacctgcacaccgagggcttcagcggccccagccccggcgacggcgccatgggctacggctacgagaagcccctgagacccttccccgacgacgtgtgcgtggtgcccgagaagttcgagggcgacatcaagcaggagggcgtgggcgccttcagagagggccccccctaccagagaagaggcgccctgcagctgtggcagttcctggtggccctgctggacgaccccaccaacgcccacttcatcgcctggaccggcagaggcatggagttcaagctgatcgagcccgaggaggtggccagactgtggggcatccagaagaacagacccgccatgaactacgacaagctgagcagaagcctgagatactactacgagaagggcatcatgcagaaggtggccggcgagagatacgtgtacaagttcgtgtgcgagcccgaggccctgttcagcctggccttccccgacaaccagagacccgccctgaaggccgagttcgacagacccgtgagcgaggaggacaccgtgcccctgagccacctggacgagagccccgcctacctgcccgagctggccggccccgcccagcccttcggccccaagggcggctacagctactag

SEQ ID NO: 35638 - DNA, 1293 bp, Artificial Sequence
  derived and/or modified sequence
atggagagaagaatgaaggccggctacctggaccagcaggtgccctacaccttcagcagcaagagccccggcaacggcagcctgagagaggccctgatcggccccctgggcaagctgatggaccccggcagcctgccccccctggacagcgaggacctgttccaggacctgagccacttccaggagacctggctggccgaggcccaggtgcccgacagcgacgagcagttcgtgcccgacttccacagcgagaacctggccttccacagccccaccaccagaatcaagaaggagccccagagccccagaaccgaccccgccctgagctgcagcagaaagccccccctgccctaccaccacggcgagcagtgcctgtacagcagcagcgtgttccagcagcccctggacatctgccacagcttcaccagccagggcggcggcagagagcccctgcccgccccctaccagcaccagctgagcgagccctgccccccctacccccagcagagcttcaagcaggagtaccacgaccccctgtacgagcaggccggccagcccgccgtggaccagggcggcgtgaacggccacagataccccggcgccggcgtggtgatcaagcaggagcagaccgacttcgcctacgacagcgacgtgaccggctgcgccagcatgtacctgcacaccgagggcttcagcggccccagccccggcgacggcgccatgggctacggctacgagaagcccctgagacccttccccgacgacgtgtgcgtggtgcccgagaagttcgagggcgacatcaagcaggagggcgtgggcgccttcagagagggccccccctaccagagaagaggcgccctgcagctgtggcagttcctggtggccctgctggacgaccccaccaacgcccacttcatcgcctggaccggcagaggcatggagttcaagctgatcgagcccgaggaggtggccagactgtggggcatccagaagaacagacccgccatgaactacgacaagctgagcagaagcctgagatactactacgagaagggcatcatgcagaaggtggccggcgagagatacgtgtacaagttcgtgtgcgagcccgaggccctgttcagcctggccttccccgacaaccagagacccgccctgaaggccgagttcgacagacccgtgagcgaggaggacaccgtgcccctgagccacctggacgagagccccgcctacctgcccgagctggccggccccgcccagcccttcggccccaagggcggctacagctactag

SEQ ID NO: 35639 - DNA, 1455 bp, Artificial Sequence
  derived and/or modified sequence
atggagcggaggatgaaagcagggtacttggatcagcaggtgccttacacattctcatctaagtcacccggcaacgggtcattgcgagaagcgctcatcggcccacttggaaaattgatggatcctggaagcctgccccctctggattcagaagacctgttccaggatctgagtcacttccaggagacttggctggctgaagcacaggtaccagacagtgacgaacaatttgtgcctgattttcattcagaaaatctggcatttcactcaccaacaactaggatcaagaaggagcctcagtctcctcggactgaccctgctctgagttgtagtagaaagcctccgctcccctaccatcacggcgagcagtgcctctacagctcggcctacgacccgccgaggcaaattgccatcaagtcacctgcgccgggtgcattgggacagtcgccgctgcagccttttcccagagcagagcagagaaattttctgcgatcttctggcacatcacagccacatcctggccatgggtacctcggggagcatagcagcgtctttcagcagcctcttgacatatgtcactcatttacctcacaaggaggtgggagggaaccattgcccgccccctaccagcatcaactgagtgagccttgccccccttacccacaacagtcttttaaacaagaataccatgatccactgtacgaacaggctggccagcctgccgtagaccaaggaggcgtcaatggccatcggtacccgggtgcaggcgttgtcattaaacaggaacagaccgactttgcctacgactccgatgtcactggatgtgcatctatgtatctccacaccgaggggttttctgggccatcccccggtgacggcgccatggggtatggctacgaaaagcccttacgcccatttccggacgatgtatgtgtcgttcccgagaaatttgagggggacataaaacaggaaggtgtgggtgccttccgagaggggccaccctatcagcgtcggggcgccctgcagctctggcagttccttgtcgccctccttgatgaccccaccaatgcccactttatcgcctggaccgggcggggaatggaattcaagctcatcgaacccgaagaggtggcacggctgtggggaatccagaaaaaccggccagctatgaattatgacaaattgagccggagcctaaggtattactacgaaaaggggataatgcagaaggtagccggggagcgatatgtgtacaagttcgtttgtgagccagaggcccttttctccttagcattccccgacaatcagcgccctgcacttaaggcggaattcgatcgtcccgtcagtgaggaggacaccgtacctctgtcccacttggatgaatcgccagcttatctacccgagctggccgggcccgcgcagccatttggaccaaagggcggatacagctattag

SEQ ID NO: 35640 - DNA, 1455 bp, Artificial Sequence
  derived and/or modified sequence
atggagaggagaatgaaagccggatatctcgaccagcaggtcccatacacattcagctccaagagcccagggaatgggtcgttgcgagaagccctgatcggcccgctggggaagctgatggacccaggcagtctccccccactggacagcgaggacctgtttcaggatctatctcatttccaggaaacctggctcgccgaagctcaagtgccggacagtgacgaacagtttgtgcctgatttccacagcgaaaatctggcgttccattcgccaaccacacgaataaagaaggagccgcaaagccctcgcacagatcctgctctgagttgctcaaggaaaccccccctgccctaccaccacggtgagcaatgtctttacagctcagcatacgatccaccaagacaaattgccatcaagtcccctgctccaggcgcgctcggacagtccccactgcagccgttccctcgggcagaacaaaggaactttctcaggtcttctgggacatcacagccacacccaggacatggctatcttggggagcacagcagcgtgtttcagcagcctttggatatatgtcattcctttactagccagggcgggggaagagagcctctaccagccccataccagcatcaactctccgaaccatgtcccccctacccacagcagagtttcaaacaggagtatcacgacccactgtatgagcaggccggtcaaccagccgttgatcaggggggtgtgaacggacaccgatacccaggtgcgggcgttgtgatcaaacaggagcagacagatttcgcgtatgactctgacgtgacggggtgcgcctccatgtatcttcatacagagggcttctcaggcccgtcccctggagatggcgcgatgggatacgggtatgagaaacccttacgtcccttccccgatgatgtgtgcgtcgtgcccgaaaagtttgaaggagacattaaacaggagggcgtgggtgcatttcgagaagggccaccttatcagcggaggggggcgctgcaattatggcaatttctggttgcgctgctggacgacccgactaacgcacactttatcgcttggacaggaaggggaatggaatttaagttaatcgagcctgaggaagtggcccgtctttggggcattcagaaaaatcggccagcgatgaattacgataagctgagcagatcacttcggtactattacgagaagggcatcatgcagaaagttgcaggagaacggtacgtctataagttcgtgtgcgagccagaagccctcttctctctcgctttccccgacaaccagcggcccgctctcaaagctgagttcgacagaccagtatctgaggaggacacagtaccgctgagccacttggatgaaagccccgcttaccttcctgaattagcaggccctgcacagccatttgggcctaaaggcggctactcttattag

SEQ ID NO: 35641 - DNA, 1293 bp, Artificial Sequence
  derived and/or modified sequence
atggaacgcagaatgaaggccgggtatcttgatcaacaggtgccatatactttcagttcgaagtctccaggaaacgggtcactacgggaagcgctgatcggccctctggggaaactcatggatccaggtagccttccacccctcgatagtgaggacctcttccaggatttgtcccacttccaagagacgtggcttgctgaagcccaggtaccagacagcgatgagcaatttgttcccgatttccactctgagaacctcgctttccacagcccaacaaccagaatcaaaaaagagcctcagtcaccacgcactgacccagcgctgtcctgtagccgtaagccccctctgccttaccatcatggcgagcagtgcttatacagcagcagcgttttccaacagcccctggacatatgccattcatttacaagtcaggggggcggaagagaacctctccccgccccttaccagcaccaactcagtgagccctgccctccctatccccagcagtcttttaagcaggagtatcacgatcctctgtacgaacaggcaggccagcctgctgtggatcagggtggggtcaacggtcatcggtacccgggagccggcgtggtgattaaacaggaacagacagacttcgcctacgatagcgatgtgaccggttgcgcatctatgtacctgcacaccgagggcttctccggtccctcacctggcgatggggcgatggggtatggctacgagaaacctctgcgacctttccctgacgatgtttgcgtggtacctgagaaattcgagggcgatatcaagcaggaaggagtgggtgcattcagagaaggccctccatatcagcggaggggtgcactgcagctgtggcaatttcttgtggcactcttggatgacccgaccaatgcccacttcatcgcttggaccggacgggggatggaattcaagctaattgagccagaggaggttgctagattatggggtatccagaagaacagaccagctatgaactacgacaagttgtccagaagcttgcgttactattatgaaaaaggtattatgcagaaggtggcaggcgaacggtacgtctacaagttcgtttgtgagcccgaggctctgttctctctggcatttccagacaatcagcgccctgctctgaaggccgagttcgacagaccggtgtcagaggaagatacggtaccgctgagtcatttagatgagtctccagcatatcttcctgaacttgccggacccgcacagccctttggacccaaaggcggttacagctactag

SEQ ID NO: 35642 - DNA, 2391 bp, Artificial Sequence
  derived and/or modified sequence
gggtggagagctgaggccgagcgaaggaaatgcaccaatcagctgctcccccgggctcacaactgtctgctgcgcccgaaaaacaagtcggtgcgctggggacccggggccggggccgccttactccggcctagccccgcggccctcggtgcgggctccagggcatgctcgggaccccccgcggctccagcccagacgccccggcctcaggtctcggcccccgcttggggccccggccgtgcggccggagggagcggccggatggagcggaggatgaaagccggatacttggaccagcaagtgccctacaccttcagcagcaaatcgcccggaaatgggagcttgcgcgaagcgctgatcggcccgctggggaagctcatggacccgggctccctgccgcccctcgactctgaagatctcttccaggatctaagtcacttccaggagacgtggctcgctgaagctcaggtaccagacagtgatgagcagtttgttcctgatttccattcagaaaacctagctttccacagccccaccaccaggatcaagaaggagccccagagtccccgcacagacccggccctgtcctgcagcaggaagccgccactcccctaccaccatggcgagcagtgcctttactccagtgcctatgacccccccagacaaatcgccatcaagtcccctgcccctggtgcccttggacagtcgcccctacagccctttccccgggcagagcaacggaatttcctgagatcctctggcacctcccagccccaccctggccatgggtacctcggggaacatagctccgtcttccagcagcccctggacatttgccactccttcacatctcagggagggggccgggaacccctcccagccccctaccaacaccagctgtcggagccctgcccaccctatccccagcagagctttaagcaagaataccatgatcccctgtatgaacaggcgggccagccagccgtggaccagggtggggtcaatgggcacaggtacccaggggcgggggtggtgatcaaacaggaacagacggacttcgcctacgactcagatgtcaccgggtgcgcatcaatgtacctccacacagagggcttctctgggccctctccaggtgacggggccatgggctatggctatgagaaacctctgcgaccattcccagatgatgtctgcgttgtccctgagaaatttgaaggagacatcaagcaggaaggggtcggtgcatttcgagaggggccgccctaccagcgccggggtgccctgcagctgtggcaatttctggtggccttgctggatgacccaacaaatgcccatttcattgcctggacgggccggggaatggagttcaagctcattgagcctgaggaggtcgccaggctctggggcatccagaagaaccggccagccatgaattacgacaagctgagccgctcgctccgatactattatgagaaaggcatcatgcagaaggtggctggtgagcgttacgtgtacaagtttgtgtgtgagcccgaggccctcttctctttggccttcccggacaatcagcgtccagctctcaaggctgagtttgaccggcctgtcagtgaggaggacacagtccctttgtcccacttggatgagagccccgcctacctcccagagctggctggccccgcccagccatttggccccaagggtggctactcttactagcccccagcggctgttccccctgccgcaggtgggtgctgccctgtgtacatataaatgaatctggtgttggggaaaccttcatctgaaacccacagatgtctctggggcagatccccactgtcctaccagttgccctagcccagactctgagctgctcaccggagtcattgggaaggaaaagtggagaaatggcaagtctagagtctcagaaactcccctgggggtttcacctgggccctggaggaattcagctcagcttcttcctaggtccaagccccccacaccttttccccaaccacagagaacaagagtttgttctgttctgggggacagagaaggcgcttcccaacttcatactggcaggagggtgaggaggttcactgagctccccagatctcccactgcggggagacagaagcctggactctgccccacgctgtggccctggagggtcccggtttgtcagttcttggtgctctgtgttcccagaggcaggcggaggttgaagaaaggaacctgggatgaggggtgctgggtataagcagagagggatgggttcctgctccaagggaccctttgcctttcttctgccctttcctaggcccaggcctgggtttgtacttccacctccaccacatctgccagaccttaataaaggcccccacttctcccatt

SEQ ID NO: 35643 - DNA, 2258 bp, Artificial Sequence
  derived and/or modified sequence
cacgttcttatgtaaccgagcccgggtaaagcagggctgcagaaagcagaaacggcgagcccggctcctgggagcaggtctcggcccccgcttggggccccggccgtgcggccggagggagcggccggatggagcggaggatgaaagccggatacttggaccagcaagtgccctacaccttcagcagcaaatcgcccggaaatgggagcttgcgcgaagcgctgatcggcccgctggggaagctcatggacccgggctccctgccgcccctcgactctgaagatctcttccaggatctaagtcacttccaggagacgtggctcgctgaagctcaggtaccagacagtgatgagcagtttgttcctgatttccattcagaaaacctagctttccacagccccaccaccaggatcaagaaggagccccagagtccccgcacagacccggccctgtcctgcagcaggaagccgccactcccctaccaccatggcgagcagtgcctttactccagtgcctatgacccccccagacaaatcgccatcaagtcccctgcccctggtgcccttggacagtcgcccctacagccctttccccgggcagagcaacggaatttcctgagatcctctggcacctcccagccccaccctggccatgggtacctcggggaacatagctccgtcttccagcagcccctggacatttgccactccttcacatctcagggagggggccgggaacccctcccagccccctaccaacaccagctgtcggagccctgcccaccctatccccagcagagctttaagcaagaataccatgatcccctgtatgaacaggcgggccagccagccgtggaccagggtggggtcaatgggcacaggtacccaggggcgggggtggtgatcaaacaggaacagacggacttcgcctacgactcagatgtcaccgggtgcgcatcaatgtacctccacacagagggcttctctgggccctctccaggtgacggggccatgggctatggctatgagaaacctctgcgaccattcccagatgatgtctgcgttgtccctgagaaatttgaaggagacatcaagcaggaaggggtcggtgcatttcgagaggggccgccctaccagcgccggggtgccctgcagctgtggcaatttctggtggccttgctggatgacccaacaaatgcccatttcattgcctggacgggccggggaatggagttcaagctcattgagcctgaggaggtcgccaggctctggggcatccagaagaaccggccagccatgaattacgacaagctgagccgctcgctccgatactattatgagaaaggcatcatgcagaaggtggctggtgagcgttacgtgtacaagtttgtgtgtgagcccgaggccctcttctctttggccttcccggacaatcagcgtccagctctcaaggctgagtttgaccggcctgtcagtgaggaggacacagtccctttgtcccacttggatgagagccccgcctacctcccagagctggctggccccgcccagccatttggccccaagggtggctactcttactagcccccagcggctgttccccctgccgcaggtgggtgctgccctgtgtacatataaatgaatctggtgttggggaaaccttcatctgaaacccacagatgtctctggggcagatccccactgtcctaccagttgccctagcccagactctgagctgctcaccggagtcattgggaaggaaaagtggagaaatggcaagtctagagtctcagaaactcccctgggggtttcacctgggccctggaggaattcagctcagcttcttcctaggtccaagccccccacaccttttccccaaccacagagaacaagagtttgttctgttctgggggacagagaaggcgcttcccaacttcatactggcaggagggtgaggaggttcactgagctccccagatctcccactgcggggagacagaagcctggactctgccccacgctgtggccctggagggtcccggtttgtcagttcttggtgctctgtgttcccagaggcaggcggaggttgaagaaaggaacctgggatgaggggtgctgggtataagcagagagggatgggttcctgctccaagggaccctttgcctttcttctgccctttcctaggcccaggcctgggtttgtacttccacctccaccacatctgccagaccttaataaaggcccccacttctcccatt

SEQ ID NO: 35644 - DNA, 2024 bp, Artificial Sequence
  derived and/or modified sequence
gcagaaagcagaaacggcgagcccggctcctgggagcagaaatcgcccggaaatgggagcttgcgcgaagcgctgatcggcccgctggggaagctcatggacccgggctccctgccgcccctcgactctgaagatctcttccaggatctaagtcacttccaggagacgtggctcgctgaagctcaggtaccagacagtgatgagcagtttgttcctgatttccattcagaaaacctagctttccacagccccaccaccaggatcaagaaggagccccagagtccccgcacagacccggccctgtcctgcagcaggaagccgccactcccctaccaccatggcgagcagtgcctttactccagtgcctatgacccccccagacaaatcgccatcaagtcccctgcccctggtgcccttggacagtcgcccctacagccctttccccgggcagagcaacggaatttcctgagatcctctggcacctcccagccccaccctggccatgggtacctcggggaacatagctccgtcttccagcagcccctggacatttgccactccttcacatctcagggagggggccgggaacccctcccagccccctaccaacaccagctgtcggagccctgcccaccctatccccagcagagctttaagcaagaataccatgatcccctgtatgaacaggcgggccagccagccgtggaccagggtggggtcaatgggcacaggtacccaggggcgggggtggtgatcaaacaggaacagacggacttcgcctacgactcagatgtcaccgggtgcgcatcaatgtacctccacacagagggcttctctgggccctctccaggtgacggggccatgggctatggctatgagaaacctctgcgaccattcccagatgatgtctgcgttgtccctgagaaatttgaaggagacatcaagcaggaaggggtcggtgcatttcgagaggggccgccctaccagcgccggggtgccctgcagctgtggcaatttctggtggccttgctggatgacccaacaaatgcccatttcattgcctggacgggccggggaatggagttcaagctcattgagcctgaggaggtcgccaggctctggggcatccagaagaaccggccagccatgaattacgacaagctgagccgctcgctccgatactattatgagaaaggcatcatgcagaaggtggctggtgagcgttacgtgtacaagtttgtgtgtgagcccgaggccctcttctctttggccttcccggacaatcagcgtccagctctcaaggctgagtttgaccggcctgtcagtgaggaggacacagtccctttgtcccacttggatgagagccccgcctacctcccagagctggctggccccgcccagccatttggccccaagggtggctactcttactagcccccagcggctgttccccctgccgcaggtgggtgctgccctgtgtacatataaatgaatctggtgttggggaaaccttcatctgaaacccacagatgtctctggggcagatccccactgtcctaccagttgccctagcccagactctgagctgctcaccggagtcattgggaaggaaaagtggagaaatggcaagtctagagtctcagaaactcccctgggggtttcacctgggccctggaggaattcagctcagcttcttcctaggtccaagccccccacaccttttccccaaccacagagaacaagagtttgttctgttctgggggacagagaaggcgcttcccaacttcatactggcaggagggtgaggaggttcactgagctccccagatctcccactgcggggagacagaagcctggactctgccccacgctgtggccctggagggtcccggtttgtcagttcttggtgctctgtgttcccagaggcaggcggaggttgaagaaaggaacctgggatgaggggtgctgggtataagcagagagggatgggttcctgctccaagggaccctttgcctttcttctg

SEQ ID NO: 35645 - DNA, 1628 bp, Artificial Sequence
  derived and/or modified sequence
agccctccctggacggtgtgcgaacgcagccccctcccccaccaggtctcggcccccgcttggggccccggccgtgcggccggagggagcggccggatggagcggaggatgaaagccggatacttggaccagcaagtgccctacaccttcagcagcaaatcgcccggaaatgggagcttgcgcgaagcgctgatcggcccgctggggaagctcatggacccgggctccctgccgcccctcgactctgaagatctcttccaggatctaagtcacttccaggagacgtggctcgctgaagctcaggtaccagacagtgatgagcagtttgttcctgatttccattcagaaaacctagctttccacagccccaccaccaggatcaagaaggagccccagagtccccgcacagacccggccctgtcctgcagcaggaagccgccactcccctaccaccatggcgagcagtgcctttactccagctccgtcttccagcagcccctggacatttgccactccttcacatctcagggagggggccgggaacccctcccagccccctaccaacaccagctgtcggagccctgcccaccctatccccagcagagctttaagcaagaataccatgatcccctgtatgaacaggcgggccagccagccgtggaccagggtggggtcaatgggcacaggtacccaggggcgggggtggtgatcaaacaggaacagacggacttcgcctacgactcagatgtcaccgggtgcgcatcaatgtacctccacacagagggcttctctgggccctctccaggtgacggggccatgggctatggctatgagaaacctctgcgaccattcccagatgatgtctgcgttgtccctgagaaatttgaaggagacatcaagcaggaaggggtcggtgcatttcgagaggggccgccctaccagcgccggggtgccctgcagctgtggcaatttctggtggccttgctggatgacccaacaaatgcccatttcattgcctggacgggccggggaatggagttcaagctcattgagcctgaggaggtcgccaggctctggggcatccagaagaaccggccagccatgaattacgacaagctgagccgctcgctccgatactattatgagaaaggcatcatgcagaaggtggctggtgagcgttacgtgtacaagtttgtgtgtgagcccgaggccctcttctctttggccttcccggacaatcagcgtccagctctcaaggctgagtttgaccggcctgtcagtgaggaggacacagtccctttgtcccacttggatgagagccccgcctacctcccagagctggctggccccgcccagccatttggccccaagggtggctactcttactagcccccagcggctgttccccctgccgcaggtgggtgctgccctgtgtacatataaatgaatctggtgttggggaaaccttcatctgaaacccacagatgtctctggggcagatccccactgtcctaccagttgccctagcccagactctgagctgctcaccggagtcattgggaaggaaaagtggagaaatggcaagtctagagtctcagaaactcccctgggggtttcacctgggccct

SEQ ID NO: 35646 - DNA, 1455 bp, Artificial Sequence
  derived and/or modified sequence
atggagaggaggatgaaggccggctacctggaccagcaggtgccctacaccttcagcagcaagagccctggaaatggcagcctgcgggaggccctgattggccccctgggcaagctgatggaccccggcagcctgccccccctggacagtgaagatctcttccaggacctgagccacttccaggagacctggctggccgaggcccaggtgcctgacagtgatgagcagtttgtgcctgacttccacagcgagaacctggccttccacagccccaccacccgcatcaagaaggagccccagagccccaggacagatcctgccctgagctgcagcaggaagccacccctgccctaccaccacggggagcagtgcctgtacagcagcgcctatgaccccccccggcagatcgccatcaagagccctgcccctggggccctgggccagagccccctgcagcccttccccagggctgagcagaggaacttcctgcggagcagcggcaccagccagccccaccctggccacggctacctgggggagcacagctctgtgttccagcagcccctggacatctgccacagcttcaccagccagggcggcggccgggagcccctgcctgccccctaccagcaccagctgtctgagccctgccccccctacccccagcagagcttcaagcaggagtaccatgaccccctgtatgagcaggccggccagcctgctgtggaccagggcggcgtgaatggccaccgctacccaggagctggggtggtgatcaagcaggagcagacagactttgcctatgacagtgatgtgacaggctgtgcctccatgtacctgcacacagagggcttcagcggccccagccctggagatggagccatgggctacggctatgagaagcccctgcggcccttcccagatgatgtgtgtgtggtgcctgagaagtttgaaggagacatcaagcaggagggcgtgggcgccttccgggagggccccccctaccagaggagaggagccctgcagctgtggcagttcctggtggccctgctggatgaccccaccaatgcccacttcatcgcctggacaggccggggcatggagttcaagctgattgagcctgaggaggtggcccggctgtggggcatccagaagaacagacctgccatgaactatgacaagctgagccgcagcctgcgctactactatgagaagggcatcatgcagaaggtggccggggagcgctacgtgtacaagtttgtgtgtgagcctgaggccctcttcagcctggccttcccagacaaccagaggcctgccctgaaggccgagtttgacaggcctgtgtctgaagaagatactgtgcccctgagccacctggatgagagccctgcctacctgcctgagctggccggccctgcccagcccttcggccccaagggcggctacagctactag

SEQ ID NO: 35647 - DNA, 1293 bp, Artificial Sequence
  derived and/or modified sequence
atggagaggaggatgaaggccggctacctggaccagcaggtgccctacaccttcagcagcaagagccctggaaatggcagcctgcgggaggccctgattggccccctgggcaagctgatggaccccggcagcctgccccccctggacagtgaagatctcttccaggacctgagccacttccaggagacctggctggccgaggcccaggtgcctgacagtgatgagcagtttgtgcctgacttccacagcgagaacctggccttccacagccccaccacccgcatcaagaaggagccccagagccccaggacagatcctgccctgagctgcagcaggaagccacccctgccctaccaccacggggagcagtgcctgtacagcagctctgtgttccagcagcccctggacatctgccacagcttcaccagccagggcggcggccgggagcccctgcctgccccctaccagcaccagctgtctgagccctgccccccctacccccagcagagcttcaagcaggagtaccatgaccccctgtatgagcaggccggccagcctgctgtggaccagggcggcgtgaatggccaccgctacccaggagctggggtggtgatcaagcaggagcagacagactttgcctatgacagtgatgtgacaggctgtgcctccatgtacctgcacacagagggcttcagcggccccagccctggagatggagccatgggctacggctatgagaagcccctgcggcccttcccagatgatgtgtgtgtggtgcctgagaagtttgaaggagacatcaagcaggagggcgtgggcgccttccgggagggccccccctaccagaggagaggagccctgcagctgtggcagttcctggtggccctgctggatgaccccaccaatgcccacttcatcgcctggacaggccggggcatggagttcaagctgattgagcctgaggaggtggcccggctgtggggcatccagaagaacagacctgccatgaactatgacaagctgagccgcagcctgcgctactactatgagaagggcatcatgcagaaggtggccggggagcgctacgtgtacaagtttgtgtgtgagcctgaggccctcttcagcctggccttcccagacaaccagaggcctgccctgaaggccgagtttgacaggcctgtgtctgaagaagatactgtgcccctgagccacctggatgagagccctgcctacctgcctgagctggccggccctgcccagcccttcggccccaagggcggctacagctactag

SEQ ID NO: 35648 - DNA, 1455 bp, Artificial Sequence
  derived and/or modified sequence
atggagcggcggatgaaggccggctacctggaccagcaggtgccctatactttctcctcgaagagccctggtaacggctctctccgggaagccttgatcggccctcttgggaagctgatggatccgggtagtctccctcctttggacagcgaagatttgttccaagacctaagtcacttccaggagacatggctggcggaggcccaagtgcctgatagcgacgaacagttcgttcccgactttcactcagaaaacctggctttccactctcctaccactcggattaaaaaggaaccgcaatctcctcgcacagatccagccctcagctgctcccgcaaacccccactgccctaccaccacggggaacagtgcctgtactcctctgcatacgatccgccgcggcagattgcgatcaaatcgcccgcacctggagctctgggccagtcccctctccaaccttttccacgggctgaacagagaaattttcttcgtagctctggaaccagccagcctcatccaggacatggttatctgggagaacactctagcgtatttcagcagcctttggacatctgccattccttcacttcacaaggcggaggacgtgaaccgctccccgccccctatcagcatcaactttccgaaccctgccctccatacccgcaacaaagctttaagcaagagtaccacgaccccctttatgaacaggctggacagcctgccgtcgaccagggcggtgtgaatgggcacaggtatccaggcgccggagtcgtgatcaagcaggaacaaaccgatttcgcgtacgactccgacgtcaccggctgtgcctcgatgtacctccacaccgaagggttttcaggcccaagccctggtgacggagctatgggatatggctacgagaaacccttgcgcccatttccagatgacgtttgtgtggtgcctgaaaaattcgagggggacataaaacaggagggggttggcgcctttagggagggacccccctaccagcgccgcggagcattgcagctctggcagttcctggtcgcactgctggacgacccaaccaacgcccacttcattgcttggaccgggaggggaatggaattcaaattaatcgagcctgaagaggtggccagactttggggcattcagaaaaaccggcccgctatgaactacgataagctgtccagatccctgagatattattatgagaagggaatcatgcaaaaagtggccggtgagaggtacgtctacaagtttgtctgtgagcctgaggccctgttttcgctagcgtttccagacaaccagcgccccgccctgaaggcggagtttgaccggcccgttagtgaagaagatacagtgcccctctctcacctggatgagtccccagcttacctgcctgaactggccggcccagctcagcccttcgggcccaagggcggctattcctattag

SEQ ID NO: 35649 - DNA, 1455 bp, Artificial Sequence
  derived and/or modified sequence
atggagcggcggatgaaggccggctacctggaccagcaggtgccctatactttttcctccaagtctcctggaaatgggtccctgagagaggccctgataggaccactcggaaagctgatggatcctggctcactgcctcctcttgactccgaagacctcttccaggatcttagtcactttcaagaaacatggctagctgaagcgcaagtccctgactccgacgaacagttcgtgcctgattttcattccgagaatctagcgttccatagtcctacgactcgcataaagaaggagccacagagccctaggactgaccctgctctctcctgcagtcgcaagccgccattaccctaccaccatggcgagcagtgcctgtatagcagtgcctacgaccccccccgccagattgctatcaagtctccagcccccggagcccttgggcagagtcctttacagccctttcctagggctgagcagagaaattttctcagatcttctggtacctcccagccacatcctggccacgggtacttaggagaacacagcagcgtatttcaacagccactggacatttgtcatagcttcacatctcagggcggcggtcgcgagcctctgccagcaccctaccaacaccagctgagcgaaccgtgcccaccttatccccagcagtcctttaagcaggagtaccacgatcctttgtatgagcaggcagggcaacccgccgttgatcagggaggcgtgaacggccacaggtaccccggcgccggtgtggtaatcaaacaggaacagactgacttcgcctatgattctgacgttacagggtgtgcttctatgtacctacacaccgagggcttctccggaccatctcctggcgatggggctatgggctacgggtatgagaaaccactccggccttttcccgatgacgtgtgtgtggtgcccgagaagttcgaaggcgatattaaacaggagggagtgggcgcattcagggagggccccccctaccaacgtaggggcgctctgcaactctggcagtttttggtcgcccttttagatgaccctacaaatgctcatttcatcgcttggaccggtcggggtatggagtttaagttgatcgagccagaagaagtagcccgtctttggggcatccaaaaaaatcgtcccgcaatgaattatgataaactcagcaggtcgcttcgatattattatgagaaagggatcatgcagaaggtagcaggcgaacggtatgtttacaagttcgtatgcgagcctgaggccctgttttctctggccttccctgacaaccagaggcctgctctcaaagccgaattcgatagacctgtgagtgaggaagacacagtacctttatcccaccttgacgaaagcccagcatacttgcctgaacttgctggccctgcccagccctttggccccaaaggaggttattcttattag

SEQ ID NO: 35650 - DNA, 1293 bp, Artificial Sequence
  derived and/or modified sequence
atggagcggcggatgaaggccggctacctggaccagcaggtgccctacactttttccagcaagagcccgggcaacggatcactcagggaagctcttatcggtccacttggcaagctaatggaccccggttctctccctcccctggatagcgaagacctttttcaggacctttcccacttccaagagacctggcttgcagaagctcaggtgcctgatagcgatgagcaatttgtgcccgacttccactccgagaacctagcctttcatagcccaaccacacggattaagaaggagccccagagccctagaaccgatcctgccttgtcatgttcccggaagcctccactgccttaccatcacggggaacaatgcctgtacagtagctcagtgttccaacagcctcttgatatctgccacagtttcaccagtcagggcggcggccgggaacccctcccagccccctatcaacaccagctgagcgagccgtgccctccttatcctcagcaatctttcaaacaagagtaccacgatcccctgtacgaacaagcgggacagccagctgtggatcagggtggcgtcaacggacatcggtatcctggggctggggtagttatcaaacaggagcagaccgactttgcctatgattctgacgtaactgggtgtgcgtccatgtatctccatactgagggtttctctggtcccagtcctggcgatggcgccatgggctacggctatgaaaagccactacggccttttcccgacgacgtctgtgtcgtgcccgaaaaattcgaaggtgatatcaaacaagaaggcgttggagcctttcgagaaggccccccttaccagagacgcggggctctgcaactgtggcagtttttggtcgcactattggatgacccgaccaatgcccacttcatcgcttggacgggtcgcgggatggaattcaagctcattgagcctgaagaggtggccagactgtggggaattcagaagaatcgccctgccatgaactacgacaagctgagtcgctctttgcgctactactacgagaaaggcatcatgcagaaggtagccggtgagaggtatgtctacaagttcgtttgcgagcctgaagcccttttctccttagcattcccagacaatcagagaccagcgctcaaagcagaatttgaccgacctgtctctgaagaagatactgttcctttgagccacctagacgaaagccccgcttatctacccgaattagctggccctgcccagccattcgggccgaaaggcgggtattcttactag

SEQ ID NO: 35651 - DNA, 1455 bp, Artificial Sequence
  derived and/or modified sequence
atggagcgcagaatgaaagccggttatctggaccagcaggtgccttatactttttcctctaaaagtcccggtaatgggtccctgcgagaggccctgattggcccattaggcaaactcatggatcctggttcactcccgcctctcgactcggaggacctattccaagatctgagtcacttccaagagacatggctcgccgaggcccaggttcctgacagcgacgagcaattcgtacccgacttccactctgagaatctggccttccactcccccacaacacgtatcaagaaagagcctcagtcgcctaggaccgatccggctctatcatgctctcgaaagcctcctctcccctatcatcacggtgaacagtgtctgtacagctctgcctatgaccccccaagacagatcgcgattaagtccccggcaccaggagctctgggtcagagccctctgcaaccattccccagggcagagcaacggaacttcctgcggtcctcaggaacatctcagccccatcctggacacggttatctgggtgagcatagttctgttttccagcaaccgctggacatctgtcatagcttcacgagccaggggggagggcgagagcctctcccagccccttatcagcaccagctgtctgaaccctgccccccttacccgcagcagtcttttaaacaagagtaccacgaccctttgtatgagcaagccggacagccagcggtggatcagggaggggttaacggccacagatacccgggagccggtgtcgtgatcaagcaagagcagacagacttcgcttatgattctgatgtcacaggctgcgcatcaatgtaccttcacacagaaggattcagtgggccatcccccggtgatggagcaatgggatatggttatgagaagccattgcgaccctttccagacgacgtttgtgtagtgcctgaaaagtttgagggtgacatcaaacaggaaggagtgggggcttttcgtgagggacccccatatcagcggaggggagccctccagctatggcagttcctcgtggccctgctggatgatccaacaaacgctcacttcatagcatggactggtcgtggaatggaattcaagctcatcgaacctgaggaggtggcgcgactgtggggcatccagaaaaacaggcctgcaatgaactacgataaattgagtaggagcttgcgctattactacgagaaaggaataatgcagaaagtcgccggtgagcgctacgtgtacaaatttgtgtgcgaacctgaggctctgttctctctggccttccctgacaatcagaggccagccctgaaagctgagtttgataggccagtaagtgaggaagatacggtgcccctgtcgcatctggatgaatcccccgcttatttacctgagcttgccggacccgcacaaccatttggtccgaagggcggatattcctattag

SEQ ID NO: 35652 - DNA, 1455 bp, Artificial Sequence
  derived and/or modified sequence
atggaaaggcgtatgaaggccggttatctagatcaacaagttccttataccttcagttccaagagtccaggaaacggctcgctgcgagaggctctcattgggccactggggaaattaatggaccccggttcactgcctcccctcgactctgaggacctgttccaagatcttagccacttccaagagacttggctggccgaggcacaggttcccgactcagatgaacagtttgtgccggatttccacagcgaaaatttggccttccactctcctacaacgagaattaagaaggaaccccagagccctagaaccgacccagctctgagctgcagccgcaagccacccctgccttaccaccacggcgaacaatgtctgtattctagcgcctacgatccacccaggcagatcgccataaaatctcccgcacctggtgcactgggccagagcccacttcagccatttcctcgggctgagcagagaaactttcttagatcctcaggcacctcccagccacaccccggtcatggctatcttggcgaacattctagcgtgtttcagcaacccctggacatctgtcactcattcacgtcccagggcggaggacgagagcctctccccgcaccttaccagcaccagctgtcagaaccttgcccaccttacccgcagcagtcgtttaagcaggaataccacgatccgctttacgaacaggccggacaaccagctgttgaccagggaggagtgaacggccatcggtaccccggtgccggagtggtgataaaacaagaacagactgactttgcctatgattctgatgtaaccggatgcgcatctatgtaccttcatactgagggattcagtggacccagtcccggagatggagccatgggttacggctatgagaaacccctgcgcccttttccagatgacgtgtgtgtggtaccagagaagttcgaaggcgacatcaagcaggagggcgtaggggcatttcgagaaggtcccccatatcaaagaaggggcgctttgcagttgtggcagttccttgtagccctcctcgatgaccctaccaatgcacatttcatcgcttggaccgggagagggatggagttcaaactgatagagccagaagaagttgctcgattatgggggatacaaaaaaacaggcccgctatgaattatgacaagctatctcgctctctccgttactattacgaaaagggcattatgcagaaggtggccggtgagcggtatgtgtataagttcgtgtgcgaacctgaagcgttattctcactagcatttcccgacaatcaacgcccagccctcaaggctgagtttgacaggccagtttccgaagaagacactgttcctctgagccacttggacgaatccccagcttatctccccgaattggctgggccagcccaaccgtttggaccaaagggagggtatagttattag

SEQ ID NO: 35653 - DNA, 1293 bp, Artificial Sequence
  derived and/or modified sequence
atggaacggagaatgaaagcaggctatctcgaccagcaggtgccctatacattctcttcaaaaagtcccggtaatggcagcctacgcgaagccttgattgggcctctggggaaactgatggatcctggaagtttgcctcccctggattccgaggatttatttcaagatctgagccatttccaggaaacctggcttgcggaagcacaggtccctgattctgacgaacaattcgtccctgacttccattcggaaaacttagctttccactcacctacgacacgaatcaagaaggaaccgcaatcaccccgtaccgaccctgccctgtcctgttctcgcaagccaccattgccataccatcatggagaacagtgtttgtactcgtcctctgtgtttcagcagccacttgacatctgtcactcatttacatcacaggggggaggcagggaacccttacccgcaccgtaccagcatcaactaagcgaaccatgcccaccgtatccccagcaaagttttaagcaggaataccacgacccgctttacgagcaggccggacaacctgccgtcgaccaggggggtgtgaacggccatcgctatccaggcgcaggggtggtgattaagcaggaacagaccgattttgcctatgattctgatgttaccggctgcgcatcaatgtatctgcacacagaagggttctccggcccaagccccggtgatggagcaatgggctacgggtatgaaaagcccctcagacccttccctgacgacgtctgtgttgtgccggaaaaattcgaaggtgacattaagcaggaaggcgtaggtgcttttagagagggcccaccctatcagaggcgcggtgcactccagttgtggcaatttctggtggccctcctggatgacccaactaatgcacacttcatcgcttggaccggcaggggtatggaattcaaattaatcgaacccgaggaggtggcccgtctctggggcatccaaaaaaataggccagcgatgaactatgacaaattgagtcggtcactacgatactactacgaaaagggtatcatgcagaaagttgccggagagcggtacgtttacaagttcgtgtgcgaacctgaggctcttttcagcctggcctttcccgataaccaacgcccagccttaaaagcggagttcgaccggccagtgtcagaggaggacacagttccactgtcccaccttgacgagtctccagcctacctgcccgagctcgcgggtcctgctcagccattcggcccaaaaggaggatacagctactag

SEQ ID NO: 35654 - protein, 173 aa, Artificial Sequence
  derived and/or modified sequence
MEDSFLQSFGRLSLQPQQQQQRQRPPRPPPRGTPPRRHSFRKHLYLLRGLPGSGKTTLARQLQHDFPRALIFSTDDFFFREDGAYEFNPDFLEEAHEWNQKRARKAMRNGISPIIIDNTNLHAWEMKPYAVMVFQTEQKNLFRLEMDMVVFRPEMKKHSWCLKRKNPPNERTV

SEQ ID NO: 35655 - DNA, 522 bp, Artificial Sequence
  derived and/or modified sequence
atggaggacagcttcctgcagagcttcggcagactgagcctgcagccccagcagcagcagcagagacagagaccccccagacccccccccagaggcaccccccccagaagacacagcttcagaaagcacctgtacctgctgagaggcctgcccggcagcggcaagaccaccctggccagacagctgcagcacgacttccccagagccctgatcttcagcaccgacgacttcttcttcagagaggacggcgcctacgagttcaaccccgacttcctggaggaggcccacgagtggaaccagaagagagccagaaaggccatgagaaacggcatcagccccatcatcatcgacaacaccaacctgcacgcctgggagatgaagccctacgccgtgatggtgttccagaccgagcagaagaacctgttcagactggagatggacatggtggtgttcagacccgagatgaagaagcacagctggtgcctgaagagaaagaacccccccaacgagagaaccgtgtag

SEQ ID NO: 35656 - DNA, 522 bp, Artificial Sequence
  derived and/or modified sequence
atggaagatagtttcttacagtctttcgggcgcctctcattgcagccacagcagcaacagcagcggcagcgtccacctcggccgcctccaagagggactcctccgcggaggcacagctttcgaaagcatctctatcttttgagaggattacccggctccggtaaaaccacactggcgaggcaactgcagcacgatttccctcgcgcccttatcttcagcacagatgattttttctttagggaggatggtgcctatgagtttaaccctgatttcctggaagaggcacacgaatggaaccagaaaagagctaggaaagccatgcgcaacggcatatctccaattattatcgataacactaacctgcatgcgtgggagatgaaaccgtatgctgtgatggtgttccagaccgagcagaagaacctttttcggcttgaaatggatatggtggtgttccgccccgaaatgaagaaacacagctggtgcctaaagcggaagaatcccccaaatgaaagaacagtgtag

SEQ ID NO: 35657 - DNA, 522 bp, Artificial Sequence
  derived and/or modified sequence
atggaggacagcttcctgcagagctttggccgcctgagcctgcagccccagcagcagcagcagaggcagaggcctccccggcccccaccccggggcaccccaccccggcggcacagcttcaggaagcacctgtacctgctgcggggcctgcccggcagcggcaagaccaccctggcccggcagctgcagcacgacttcccccgggccctgatcttcagcacagatgacttcttcttcagagaagatggagcctatgagttcaacccagacttcctggaggaggcccacgagtggaaccagaagagggccaggaaggccatgagaaatggcatcagccccatcatcatcgacaacaccaacctgcacgcctgggagatgaagccctatgctgtgatggtgttccagacagagcagaagaacctcttccggctggagatggacatggtggtgttccggcctgagatgaagaagcacagctggtgcctgaagaggaagaaccccccaaatgaaagaacagtgtag

SEQ ID NO: 35658 - DNA, 522 bp, Artificial Sequence
  derived and/or modified sequence
atggaggacagcttcctgcagagcttcggccggctgagcctgcagccacaacagcaacagcaacggcagcggcccccgagaccaccaccccgcgggaccccgccccgtagacactcctttaggaaacacctgtacctgctcaggggcctgccgggcagtggcaagaccacgctggcaagacagctgcaacacgattttccaagagcacttattttctcgaccgacgatttcttttttagggaggatggcgcttatgagttcaacccagattttcttgaggaggcccatgagtggaatcaaaaacgagcccggaaagcgatgcgtaacggcatctctccgatcattattgataataccaatctgcatgcctgggaaatgaagccttacgcagtcatggtgttccagaccgagcagaagaatctcttcagactcgaaatggatatggtagtcttccggcctgagatgaagaagcatagctggtgcctaaaacgtaagaatccgccaaatgagcgaactgtttag

SEQ ID NO: 35659 - DNA, 2040 bp, Artificial Sequence
  derived and/or modified sequence
cgtgacttcagtaaagggaacccggggctctcgcagccagccctcctgcccatggaggacagtttccttcaatcttttgggaggctgagcctccagccccagcagcagcagcagcggcagcggccgccccggccgcccccgcgggggacacctcctcgccgccacagctttaggaaacacctctacctcctgcgaggcctcccgggctccgggaaaactacactggccagacaattgcagcatgactttcccagggccctgattttcagcacggatgattttttcttcagggaagatggtgcctatgagttcaatcctgacttcctggaggaagctcatgaatggaaccaaaaaagagcaagaaaagcaatgaggaatggcatatcccccattattattgataataccaacctccacgcctgggaaatgaagccctatgcagtcatggtatttcagaccgaacaaaagaatcttttcaggctggaaatggacatggtagttttcaggccagaaatgaagaaacattcatggtgtctcaagagaaaaaatccaccgaatgaaagaacggtatgaacacgatgttacttttcacagtgtgcttcatgcagaaaagccaagcagaatgaacagaaaccaggacaggaataatgcattgccttccaacaatgccagatactggaattcctacacagagtttccaaaccggagggcccacggtggatttacaaatgagagctcctatcacagaaggggcggttgtcaccatggatattagaggcctatcttacagccaggcagaattttcctaagtcagtttctacttcagtttttgttattttttgttgcattttagtcagagctccaattccagtgtaaatagctgaactcaaaagtttctgagcaaagtcattatattcactttcttcaccaaaatttgttaaagtgcttctatatgcatggtctgatgctgggaattctgcagatttgagtaaacagtctctttctctagggtaagaatttgaaaccaaaacttgagaacacacccaagaatatatttacataggttcatagatgaaataaagtgtttatattatatataagcttcagtaccatttgctctgaagtgatctatttattttttcaggaaattcatctccatcggtaaagttgggaaggtggagagaagtggtgggggggcattgctacttatcaaagtgccattgctactttgataatctatgtatctaaaaatgtgagatgtgcgactcttatgatactgattttcctttaatgttaatatgccagaaagcatacatctaagggaacattgtccttcaaagtagacactttgggaagttatttctttattttaatgatgtatcattgttaaaaatgctgtcaaatccttaatagctacaggagctactgagggaaatcagtgtcattatttaaagtcacgccttgtgtttttactactttattcagcaggattaaacctgaataacttttggctgttgtgctaatagtgtaaataaaataagcctgccttcataaaacactaacttttaaaaggaataaacgacttctaaaattatgcctattaacatgtgtaattagtcggcagctcaaatgtttgggagtgcaagaaattaggcaccccaggatataggtcatacagggatatataaaagccatgctcattacaaaatgagcagttgatgttttatgtggcattaagacaatcaagtcctcacaactctggaatgtcttcttatactgatgctgaatttatgaatccaaattaatttccaacaggttggaatcagatttaatgtgagatcatgatagacaagaccacagaggacgtatgctctatttcttgttggccaacagcttctttctaatgttctgtgaaaaattattttaagtgtcttatataatggtgcttttatggttattaaaaattgtaaatggtatcacatttatatggatttgtcattggatctttttttggttcaacaataaaaaaatttaattacc

SEQ ID NO: 35660 - DNA, 522 bp, Artificial Sequence
  derived and/or modified sequence
atggaggactcatttcttcagtcctttggtcgtttgagcctacagccccagcaacagcagcagcgccagcgccctcctcgccctccccctaggggcaccccacctagacgtcactcatttcgcaaacacctctatctccttcggggattgccaggaagcggcaaaacaacactggcccgtcagctgcaacacgatttcccccgagcactgatcttttcaacggatgattttttctttagagaggacggcgcttacgagtttaacccagatttcctcgaggaggcacatgagtggaatcagaaaagagcgaggaaggctatgagaaatggtataagtcccatcatcatagacaacacaaacctgcatgcctgggagatgaagccatacgctgtcatggttttccagaccgagcagaagaacctgttcagacttgaaatggacatggttgtgtttagaccagagatgaaaaagcatagctggtgtctcaagcgtaagaaccctcctaacgagaggaccgtgtag

SEQ ID NO: 35661 - protein, 461 aa, Artificial Sequence
  derived and/or modified sequence
MSRINKNVVLALLTLTSSAFLLFQLYYYKHYLSTKNGAGLSKSKGSRIGFDSTQWRAVKKFIMLTSNQNVPVFLIDPLILELINKNFEQVKNTSHGSTSQCKFFCVPRDFTAFALQYHLWKNEEGWFRIAENMGFQCLKIESKDPRLDGIDSLSGTEIPLHYICKLATHAIHLVVFHERSGNYLWHGHLRLKEHIDRKFVPFRKLQFGRYPGAFDRPELQQVTVDGLEVLIPKDPMHFVEEVPHSRFIECRYKEARAFFQQYLDDNTVEAVAFRKSAKELLQLAAKTLNKLGVPFWLSSGTCLGWYRQCNIIPYSKDVDLGIFIQDYKSDIILAFQDAGLPLKHKFGKVEDSLELSFQGKDDVKLDVFFFYEETDHMWNGGTQAKTGKKFKYLFPKFTLCWTEFVDMKVHVPCETLEYIEANYGKTWKIPVKTWDWKRSPPNVQPNGIWPISEWDEVIQLY

SEQ ID NO: 35662 - DNA, 1386 bp, Artificial Sequence
  derived and/or modified sequence
atgagcagaatcaacaagaacgtggtgctggccctgctgaccctgaccagcagcgccttcctgctgttccagctgtactactacaagcactacctgagcaccaagaacggcgccggcctgagcaagagcaagggcagcagaatcggcttcgacagcacccagtggagagccgtgaagaagttcatcatgctgaccagcaaccagaacgtgcccgtgttcctgatcgaccccctgatcctggagctgatcaacaagaacttcgagcaggtgaagaacaccagccacggcagcaccagccagtgcaagttcttctgcgtgcccagagacttcaccgccttcgccctgcagtaccacctgtggaagaacgaggagggctggttcagaatcgccgagaacatgggcttccagtgcctgaagatcgagagcaaggaccccagactggacggcatcgacagcctgagcggcaccgagatccccctgcactacatctgcaagctggccacccacgccatccacctggtggtgttccacgagagaagcggcaactacctgtggcacggccacctgagactgaaggagcacatcgacagaaagttcgtgcccttcagaaagctgcagttcggcagataccccggcgccttcgacagacccgagctgcagcaggtgaccgtggacggcctggaggtgctgatccccaaggaccccatgcacttcgtggaggaggtgccccacagcagattcatcgagtgcagatacaaggaggccagagccttcttccagcagtacctggacgacaacaccgtggaggccgtggccttcagaaagagcgccaaggagctgctgcagctggccgccaagaccctgaacaagctgggcgtgcccttctggctgagcagcggcacctgcctgggctggtacagacagtgcaacatcatcccctacagcaaggacgtggacctgggcatcttcatccaggactacaagagcgacatcatcctggccttccaggacgccggcctgcccctgaagcacaagttcggcaaggtggaggacagcctggagctgagcttccagggcaaggacgacgtgaagctggacgtgttcttcttctacgaggagaccgaccacatgtggaacggcggcacccaggccaagaccggcaagaagttcaagtacctgttccccaagttcaccctgtgctggaccgagttcgtggacatgaaggtgcacgtgccctgcgagaccctggagtacatcgaggccaactacggcaagacctggaagatccccgtgaagacctgggactggaagagaagcccccccaacgtgcagcccaacggcatctggcccatcagcgagtgggacgaggtgatccagctgtactag

SEQ ID NO: 35663 - DNA, 1386 bp, Artificial Sequence
  derived and/or modified sequence
atgtcacgcattaataagaatgtggtgctggcactattgacactgactagcagcgcatttctgttattccaactgtactactataaacactatctgtctacaaaaaacggagcaggcttaagcaaaagcaaaggcagcagaataggcttcgattccacccagtggcgagctgtgaaaaaattcatcatgcttacaagcaatcagaacgttcccgtcttcttgattgaccctctcattctcgaactgatcaataaaaactttgagcaggtaaaaaacacatctcatggctctacctctcagtgtaagttcttttgtgtgcctcgggatttcactgctttcgcactgcagtaccacctctggaagaatgaagagggatggttcagaatcgccgagaacatgggtttccagtgcctgaagatcgagagcaaagatcctaggctcgatgggatcgactcattatctgggacagagatccctcttcactatatatgcaagttggctacccacgcgatccaccttgtcgttttccatgagcggtcaggtaattacctgtggcacggtcatctgagactgaaggaacacattgatcgcaagtttgttcccttccgtaaactccagttcggccgatatcccggtgccttcgatcggccggagctacaacaggtgacggtagacggcctggaggtgctgataccaaaggatcccatgcacttcgtggaggaagtgccgcactctcgatttatcgaatgtagatacaaagaggcgcgggctttttttcagcagtatctggacgacaacacggtggaagcggtcgccttcaggaagagcgcaaaggaactgctgcagcttgcagctaagacgctcaacaagctgggtgtgccattctggctcagctccggtacatgccttggttggtaccggcagtgtaacattataccttactctaaggatgtggaccttggtatatttatccaggattacaaaagtgatatcattctcgcattccaagatgcggggctcccactcaagcacaagtttgggaaagtggaggattcactggagttgtcgtttcagggcaaagacgatgtgaaactcgatgtattctttttttacgaagaaacagatcatatgtggaacggcggcacacaggcaaaaactggcaaaaagtttaagtatctcttcccaaaattcacactgtgctggacagagttcgtggacatgaaagttcacgtaccatgtgagaccctcgaatatatagaagcaaattatgggaagacttggaaaatacctgtcaaaacttgggattggaaacggtcaccacctaatgtccagcctaacggaatctggcccatctctgaatgggacgaggtcatccagttgtattag

SEQ ID NO: 35664 - DNA, 1386 bp, Artificial Sequence
  derived and/or modified sequence
atgagccgcatcaacaagaatgtggtgctggccctgctgaccctgaccagcagcgccttcctgctcttccagctgtactactacaagcactacctgagcaccaagaatggagctggcctgagcaagagcaagggcagccgcatcggctttgacagcacccagtggagggctgtgaagaagttcatcatgctgaccagcaaccagaatgtgcctgtgttcctgattgaccccctcatcctggagctgatcaacaagaactttgagcaggtgaagaacaccagccacggcagcaccagccagtgcaagttcttctgtgtgccccgggacttcaccgcctttgccctgcagtaccacctgtggaagaatgaggagggctggttcagaattgctgagaacatgggcttccagtgcctgaagattgagagcaaggacccccggctggatggcatcgacagcctgagcggcacagagatccccctgcactacatctgcaagctggccacccacgccatccacctggtggtgttccacgagaggagcggcaactacctgtggcacggccacctgcggctgaaggagcacatcgacaggaagtttgtgcccttcaggaagctgcagtttggccgctacccaggggcctttgacaggcctgagctgcagcaggtgacagtggatggcctggaggtgctgatccccaaggaccccatgcactttgtggaggaggtgccccacagccgcttcattgaatgtcgctacaaggaggcccgggccttcttccagcagtacctggatgacaacacagtggaggccgtggccttcaggaagagcgccaaggagctgctgcagctggccgccaagaccctgaacaagctgggcgtgcccttctggctgagcagcggcacctgcctgggctggtaccggcagtgcaacatcatcccctacagcaaggatgtggacctgggcatcttcatccaggactacaagagtgacatcatcctggccttccaggatgctggcctgcccctgaagcacaagtttgggaaggtggaggacagcctggagctgtccttccagggcaaggatgatgtgaagctggatgtgttcttcttctatgaggagacagaccacatgtggaatggaggcacccaggccaagacaggcaagaagttcaagtacctgttccccaagttcaccctgtgctggacagaatttgtggacatgaaggtgcacgtgccctgtgagaccctggagtacatcgaggccaactacggcaagacctggaagatccctgtgaagacctgggactggaagaggagcccccccaacgtgcagcccaacggcatctggcccatcagcgagtgggatgaagtcatccagctgtactag

SEQ ID NO: 35665 - DNA, 1386 bp, Artificial Sequence
  derived and/or modified sequence
atgagccggatcaacaagaacgtggtgctggccctgctgaccctgacctccagtgctttcctcctttttcaactgtattactacaagcactaccttagcacgaaaaacggtgccggtctgtctaagagcaaaggatcaagaataggatttgatagcacgcagtggagggccgttaagaaattcataatgcttacctccaaccagaacgtgccagtatttctcattgatcccttgatcttagaactgatcaataaaaattttgagcaggtcaagaataccagtcatgggtctacgtcccaatgtaaatttttctgcgttcctcgggacttcactgccttcgccctgcagtatcatctctggaagaacgaggaagggtggttccgcatcgccgagaacatggggttccagtgcctgaagatcgaatcaaaagatccacgccttgacgggatcgacagtctgtctggcacggaaatccccctgcactacatatgcaagttagcaacgcacgcaatacatctggtcgtgttccatgaacggtctgggaactatctttggcacggccacttacgattaaaggaacacattgatcgaaagtttgttcctttccgcaaactgcagttcgggagatatcccggagccttcgatcgcccagaactgcagcaggtgaccgtcgatgggctggaggtgctgatacccaaggatccaatgcactttgtcgaagaggtgccgcacagcaggtttatcgagtgccgctataaggaggctcgagcattttttcagcagtatttggacgataatacagtggaagctgtggctttcagaaaaagcgccaaagagctgcttcaactagcagcaaaaaccctaaataaactgggtgtgccattttggctgtcttcgggaacgtgcctcggctggtacagacagtgtaacataatcccctattcgaaggacgtggacctaggtatattcatacaggattacaaatccgatattattctggctttccaggatgcaggactccctctcaagcataaatttgggaaggttgaggactcccttgagctctcatttcaggggaaagatgacgtcaaattagacgtgttcttcttctacgaagagacagaccacatgtggaacggcggcacgcaggccaagactgggaaaaagttcaaatacttgttcccaaagtttaccctgtgctggaccgaattcgtagatatgaaggtgcatgtgccctgcgagactttggaatatattgaagctaactatggaaagacttggaaaattcccgttaaaacatgggactggaagcggtctccaccgaacgtgcagccaaatggcatctggcccatatcagagtgggatgaggtgatccagctgtattag

SEQ ID NO: 35666 - DNA, 1386 bp, Artificial Sequence
  derived and/or modified sequence
atgagcaggatcaataagaatgtggtcctcgcgctcctcacccttacaagctcggccttcctcctgtttcagctctactactataaacactacctgtcaacgaaaaacggcgctgggctgtctaaaagtaaaggctctaggatcggtttcgactcaacacaatggcgagccgttaagaaatttattatgctcacaagcaatcagaacgtgcctgtgtttttgatcgacccactcatattagaacttatcaataaaaacttcgagcaagttaaaaacaccagccacggctctacctcccaatgcaagttcttttgtgtccctagagacttcacagccttcgcactccagtaccatctgtggaagaacgaagaagggtggttcagaattgccgaaaatatgggattccaatgcctgaagatcgaaagcaaggaccctaggttggacgggattgactcattatcagggacagagatcccacttcattacatttgtaaactggctacacatgcgatacacctcgtggttttccatgagagaagtgggaattatctgtggcacgggcacctccggcttaaagagcacatcgaccgcaagttcgtgccttttaggaagctgcagtttggacgctatcctggcgctttcgacaggcctgaattgcagcaagtgaccgttgatggtttggaggttttgattcccaaggatcccatgcactttgtggaagaagtgccccactcccggtttatcgagtgtcgatataaggaggcccgagcattcttccagcagtatcttgatgacaataccgtagaggccgtggcattccggaaatccgctaaggagctgctgcagcttgcagctaaaacactcaacaagctgggtgtgcccttctggctttcttctggcacttgtctgggatggtataggcaatgtaatataatcccttactctaaggacgttgatctggggatctttatccaggactacaaatctgatattattctggccttccaggatgcgggtctacccctgaagcacaaattcgggaaggtcgaagactcactggagctgtctttccaggggaaagatgatgtgaagctcgatgtgttttttttctatgaagagacagatcacatgtggaacggcggaactcaagcgaagactggtaagaagtttaaatatctgttcccaaagttcactttgtgctggacggagttcgtcgatatgaaagtgcatgtgccatgcgaaacattggaatacattgaagctaactacggtaaaacctggaagatcccggtaaagacatgggattggaaaagatccccccctaacgtacagcccaatggcatttggccgattagtgagtgggatgaagtaatccaactatattag

SEQ ID NO: 35667 - DNA, 7364 bp, Artificial Sequence
  derived and/or modified sequence
gtaaagcggagcggctgcagcctgctgttgagtgagaaaacaaaattatcttcctttccaaatccaaaaagatgaaaacgactgagatactttcaaaagacaaccaagtgagcagcacagactaatgagtagaatcaataagaacgtggttttggcccttttaacgctgacaagttctgcatttctgctgtttcagttgtactactacaagcactatttatcaacaaagaatggagctggtttgtcaaaatccaaaggaagccgaattggatttgatagcacacagtggcgtgcagttaaaaaatttattatgttaacatccaaccaaaatgtaccagtgtttcttattgatcctttgatactggaattgattaataagaactttgaacaagtcaaaaatacttctcatggctctacttcacaatgcaagtttttctgtgttccaagagactttactgcatttgcactgcagtatcacctatggaagaatgaggaaggctggtttcggatagctgagaatatgggatttcagtgcctaaagattgagagtaaagatccccggctagacgggatagactcactctctggaactgaaatccccctgcactatatctgcaaactggccactcatgcgatccacttggtagtctttcatgagaggagtggcaactacctctggcacggccacttgagacttaaagaacacattgacaggaaatttgttcccttccgaaagttacagtttggtcgttatccaggagcttttgacaggccagagttacagcaagttactgttgatggactggaagttctcattccaaaggatccaatgcactttgtagaagaagtaccacactctaggtttattgagtgtaggtataaagaagctcgagcattctttcagcagtaccttgatgataacactgtggaagctgtggcctttcggaagagtgcaaaggaattactgcaactagcagcgaaaacattaaacaaattgggagtaccattctggctgagcagtggaacttgtctaggatggtatcgacaatgcaacattattccttatagcaaagatgttgacctaggaatttttatacaagattacaaatctgatattattttagcatttcaggatgcaggacttccgctcaaacacaaatttgggaaggtagaagacagcttggaactatccttccagggaaaagatgatgtaaaacttgatgtttttttcttctatgaagaaactgatcacatgtggaatggaggcactcaggccaaaacaggaaaaaaattcaaatacctgtttccgaagtttacactgtgctggactgagtttgtagacatgaaggtccatgtaccctgtgaaaccctcgaatacattgaagccaactatggtaagacctggaagattcctgtaaagacgtgggactggaagcgctctcctcccaatgtgcaacccaatggaatctggcctatttctgagtgggatgaggttatccagttatattgagatagtaggttgaaatgggagaatttctcttttggaaaaaaaggtagataactgtttaaaaaatacatgtctatttgtcaaacataagtgggaaccaaagaaaaaatgtgacaagtttgaagacacagaaagagtcatctgatgtaattctctcacttagtactgaggaattttcatgtgccacatacaatgctaggttacagtggagaagcctagatgaatgagacaaatacctacttcttttattcctccttttggtaaacaactcaattttcctttgagggaaccctcccccaccctttgaagagttcaagttctgtacaggtttttaaaacgtgaagtaatgtttgaactggaagatgagctcaccaggcaaagctaaggaaggatatactagttgaaaagaataacccactcctcttctgggcatttaagctggtatgttagtgctacttttaagattgtggagtctgagttaatattcaagtgatcagactttgagtgacatcaagaaaagatgatatcaggttcatttttcaactaatcttatgtggaattgaattagagaacaaggcattattcttttagggaaggtgagagcttatttgtatcagagcttattacttgtcaggataagtaaatttctgtacatgtactgttttcatatgtgaagtgagaagaaactttatgcttgtttaatgcttaaatttccatccattgtgagaatattttcactgacctctgatggcacttgttgacaaatcattcaagtgagaccatgttactagacatgatcttgaaagaggccatgatttcacaaaactcatttttattttattctcagacagtctgttaggtaaaaatatgagaaattcatgtacattttatattttctgaatttataatctgtgcactcccaattttaatgacactaaaatattaatagaattttttaaatatactctaatttttaaaacatactctttattatcttcatttatcaattacagcttcgtatctctaatttatggtctatataccaatttaaatggcatgtaaacctgcctgtttcttctcctcttctaatatatcagatctccaaaatggaagctaaatggtggacttgacaactattcaccctacctcagatcatagagtttgtaaagtttgtgtccctccccagtttttcagtctgttgaatgtcgatggggcaagaactcagacttctactttaccaagtaccacacactctggaatgctttagtttccttttcccctcaagatgtctgagtcagctaggatgctgtttaccccatctctctcttatatcacttgaatgatatattgtaagtgagaggtaaaggaaaatgtaggcacaataagcactgctatttttctctttgtctaggaaaggaagctgaatcttatatcttatctatgctatttaggactactttctggagcttggcagattttcctctgacaccagagaacaatagtagtctcaagaatggaaacctgaatgtctgagggaatgggctggtagactttttcgaaaacaaattagagaaagtaacttacaaccacccattccggatttgtaaagcaacatgaaaacctttgataaatgataaccaacagtcttctgtcctaatttgcattctcaatgcagaattattgggtctttcataaataacatgagtggtttctggagacatttaagattgtcagcaaacttgtcccaaaatggcacatcatcataatccattttctctttgctagaaaatcagcccatagagtgcattcccaaattctaaatagctgaccctaaattcatttttcatgcttaaaaataatagaacaaataataatactatttttgggcaaaatccaccctacttgatgaggaccatttgcttgtgctcagtatttagaaatgcatacactccacatttctccccatttccaattgggactcccattctttgccaggagatcttacccatcccttttcagattaatcttttatcctttcctgaagtacaaagtcttaagagtgtctgaaatccaagacatcttggcccaattgacacaggttctatattcttccctacatagaccactggctgctgaaatacttttcttgtcttctggtttcacaggcttcagctcatgggttccaccctaacttggggaaacaaaagccttctctagaatctgaaggccaggcttacctctgattctgattcatccatacttcatcttatgtattttaacagttgggttctgtggagtgtccagagaccttgggttaggtatatccatcttcagtacctcattggatcacttttctttcatcacttgagtattctagcagtcattctcctaatctgaccactttcaggtttagtttacctggcttacctggggaagttgacaacttgttggtagttaggcacccatgaatgtctccagagacatcctgagaggcaagattcctcttaattgataaccaggacaaccaggtagtcacccagtcctctctaagcagggagcacttgtccttctctcctctgctgcagctactgatatctggcccctggaataaaaccatagttcctaaaattgagcatccctaagagtagctgcttggtgggacagctgatttctttgattccctagctgcaaaacctgaaattgaccactaggtgacagaatgtttgccagtatccccacaaaacaagttaaaacttaagtgaaaatcattctgcttttgaatcttaaaagctagaaaaaccataatgtaatattctttttaaaccctcttattttataactaaataaataatcacagaaaagaatgatctgaacaagaacagctgaggctaaaacccaagactgccgtgactcctagtccaatgtctgtttcgcatcacaacacagtatctttaacagtgcttgagatgcttaacagagaaggcatccagtgcttcattgaggctaagtctcagggtgtttctgccgcttagtatctttttgttcagattgagaacctaaggcgacagagaggtcaaggggaagtattttctagttcagaattcagaattcttaggcaaccttcatacctttatctggaaaatgccttctctccagacaataagacagttcacatctggagacatcagcctttggtacctaattctctaagctcaagatgcatcccattgccactttaccattctatttcccaagggaaccatcagcaccaacctgctaaatgcctgtatttgaagtctctccccttcctgaagtgaccttttatgaggctctttccttcctaagggacctttccctggtagtagtggtctcattcacaaaaaagaataatagatgtaactggagtcactttgcagttttcaagattttttttttatctgcttggctggaaaggagactagagtatctagtttttagtatttaaactacttttaattatttatattgatactctctgataaatgcaggtagttaagaatagattgtactcattcctttttgagtttgtgacctcaaaccattgtttttattcttacacgactacagtacttcaaatggcacatagataggcaggatattacataggtaagcaggaatttatacattgggtaccagagctaaatctggaaaacacatttggaatgagcttccacacttcagtctaaaatctcacccaaacttatggctacatatttttctaagtttcccccctagtttcactttctggaaagtgaacagttttttaaatcctaaatgttataaatccttaggagaaatattccctcaaaacctagtcaagaaagtgccacattcccaccttctaacaggtaattattagttgtaatagctttaatgcatggaaaaacttcagttactgaccagtcaagagaatttctcaagaaaaatcccagcaacgttccctctttcctccttgtcttccactatcattaagacctgggctagatcacctctaacatctcactcagggaaggcaatgtgttgccataaaaagaccacaagcttttgagttaggcctgaatttgaatttcagcttaatcatgtgggatttatggtgggggccctttcagtctcaatttccacattagtgaactggggaaatgatacatacttctaagggtttttagggggattaaatgaagtatacagttcttagcctcaggcctaggattaagtaagtactcaagaaatgtgcaattttctagttccatgtttcttttctaatcttcaaatggaattatagaaaccatgggtcagaacatattcctttactcaaaagattgcatgactgaatttgcttaagaaaaaaaaaattgtatcaagtcattaatacaattatacattaattatattacattaatacaatatatggtttgtgaattcagagacattaccagtttgcctccttctctcaatagaacttgtattttcattttcttggttaagcagttgtctcctaatattatcccatatgctacctagtttgctggtcccaagcagtttactgtacttcactagatttggtacctgctctcccctggacttctttttcaatattctagcctttcctagatgtaaatctttacctccttgttagtgaaattagatataagccatgatttggagagggaagaaatctggaatacttaatttcatttaattatctatgctgatgaatgcctgtatcattgttaataaaggagaattgaaaatactcatttctactttctgccctcaaatttctgtttctatctcaactaggcaagaatcagcagggtgcatgatgccattttaagctgcttcacatcagactgaaatcctaattacagttcataagtgaaacagactaattcaatggcaataccttttgtataggtcctgtgcttaaaggaggcaagtataaattttctaataagaaatccctgcttcttttgggtgcagtggctcacacctgtaataccagcagtttgagaagctaaggcaggtggatcacttgaggccaggagttcgagaccagcctggccaacatagtgaaaccccgtctcttctaaaaatacaaaaaaattagctgggcatggtggtgcacgcctatagtcccagctacacaggaggctgaggcaggagaatcacttgaacccgggaagcagagtctgcagtgagccaagatcgcggcattgcacttcagcctgggcgatagagcaagactctgtctcagaaaaaaaaaaaaaggaaagaaagaaatctctgcttccgtactatcaaaacttctaccctagaataccccctggcaccttctaacccaacctaatacagagattttgtagggacccattaacaagctcctatataattataagcagctctcacagtagggttgaaagagaatataaggaaaattagaagtactgtatttttgctattggaaatgaaatattgtttcatgcacctttgaaaaaaataacaggattttacagccttctgatgattcattcaaagcatggggaatagttcatatgtttgttaaatgaaaatcttatgtagctatttgtgtgtccctcccacttcataactacaaaaacatatatatgaatttctaaacaaagtgatattttaaagatgaattgattcaatgtgtacttaccagtttactgtgtggttttatcttcaggtacagatagtttgtggtactacttgaaaatacctttaatattattttcatcagaatttgtaatatataatccagtttgggatgatgaataaaatttttctaatctcttga

SEQ ID NO: 35668 - DNA, 1383 bp, Artificial Sequence
  derived and/or modified sequence
atgagccgcatcaacaagaacgtggtgctggccctgctgaccctgaccagcagcgccttcctgctgttccagctgtactactacaagcactacctgagcaccaagaacggcgccggcctgagcaagagcaagggcagccgcatcggcttcgacagcacccagtggcgcgccgtgaagaagttcatcatgctgaccagcaaccagaacgtgcccgtgttcctgatcgaccccctgatcctggagctgatcaacaagaacttcgagcaggtgaagaacaccagccacggcagcaccagccagtgcaagttcttctgcgtgccccgcgacttcaccgccttcgccctgcagtaccacctgtggaagaacgaggagggctggttccgcatcgccgagaacatgggcttccagtgcctgaagatcgagagcaaggacccccgcctggacggcatcgacagcctgagcggcaccgagatccccctgcactacatctgcaagctggccacccacgccatccacctggtggtgttccacgagcgcagcggcaactacctgtggcacggccacctgcgcctgaaggagcacatcgaccgcaagttcgtgcccttccgcaagctgcagttcggccgctaccccggcgccttcgaccgccccgagctgcagcaggtgaccgtggacggcctggaggtgctgatccccaaggaccccatgcacttcgtggaggaggtgccccacagccgcttcatcgagtgccgctacaaggaggcccgcgccttcttccagcagtacctggacgacaacaccgtggaggccgtggccttccgcaagagcgccaaggagctgctgcagctggccgccaagaccctgaacaagctgggcgtgcccttctggctgagcagcggcacctgcctgggctggtaccgccagtgcaacatcatcccctacagcaaggacgtggacctgggcatcttcatccaggactacaagagcgacatcatcctggccttccaggacgccggcctgcccctgaagcacaagttcggcaaggtggaggacagcctggagctgagcttccagggcaaggacgacgtgaagctggacgtgttcttcttctacgaggagaccgaccacatgtggaacggcggcacccaggccaagaccggcaagaagttcaagtacctgttccccaagttcaccctgtgctggaccgagttcgtggacatgaaggtgcacgtgccctgcgagaccctggagtacatcgaggccaactacggcaagacctggaagatccccgtgaagacctgggactggaagcgcagcccccccaacgtgcagcccaacggcatctggcccatcagcgagtgggacgaggtgatccagctgtac

SEQ ID NO: 35669 - protein, 388 aa, Artificial Sequence
  derived and/or modified sequence
MKWLLLLGLVALSECIMYKVPLIRKKSLRRTLSERGLLKDFLKKHNLNPARKYFPQWKAPTLVDEQPLENYLDMEYFGTIGIGTPAQDFTVVFDTGSSNLWVPSVYCSSLACTNHNRFNPEDSSTYQSTSETVSITYGTGSMTGILGYDTVQVGGISDTNQIFGLSETEPGSFLYYAPFDGILGLAYPSISSSGATPVFDNIWNQGLVSQDLFSVYLSADDQSGSVVIFGGIDSSYYTGSLNWVPVTVEGYWQITVDSITMNGEAIACAEGCQAIVDTGTSLLTGPTSPIANIQSDIGASENSDGDMVVSCSAISSLPDIVFTINGVQYPVPPSAYILQSEGSCISGFQGMNLPTESGELWILGDVFIRQYFTVFDRANNQVGLAPVA

SEQ ID NO: 35670 - protein, 282 aa, Artificial Sequence
  derived and/or modified sequence
MKWLLLLGLVALSECIMYKVPLIRKKSLRRTLSERGLLKDFLKKHNLNPARKYFPQWKAPTLVDEQPLENYLDMEYFGTIGIGTPAQDFTVVFDTGSSNLWVPSVYCSSLACTNHNRFNPEDSSTYQSTSETVSITYGTGSMTGILGYDTVQTVAIWRSAAMGLVSQDLFSVYLSADDQSGSVVIFGGIDSSYYTGSLNWVPVTVEGYWQITVDSITMNGEAIACAEGCQAIVDTGTSLLTGPTSPIANIQSDIGASENSDGDMVVSCSAISSLPDIVFTIN

SEQ ID NO: 35671 - protein, 249 aa, Artificial Sequence
  derived and/or modified sequence
MTGILGYDTVQVGGISDTNQIFGLSETEPGSFLYYAPFDGILGLAYPSISSSGATPVFDNIWNQGLVSQDLFSVYLSADDQSGSVVIFGGIDSSYYTGSLNWVPVTVEGYWQITVDSITMNGEAIACAEGCQAIVDTGTSLLTGPTSPIANIQSDIGASENSDGDMVVSCSAISSLPDIVFTINGVQYPVPPSAYILQLPSEGSCISGFQGMNLPTESGELWILGDVFIRQYFTVFDRANNQVGLAPVA

SEQ ID NO: 35672 - DNA, 1167 bp, Artificial Sequence
  derived and/or modified sequence
atgaaatggctactgctgcttgggctcgtcgcgctgtcagaatgtataatgtacaaagttccactgattcgaaagaagtccttacgcagaacactatctgaacgcgggcttcttaaagactttctcaagaagcacaacctaaatccagcccggaagtatttcccacagtggaaagcgcccactctcgtcgacgagcagcccttagaaaattatctcgacatggagtactttggaaccataggaattgggacaccagcgcaggatttcaccgtggtctttgacacaggcagctccaatttatgggtgccttcggtctactgctccagcctggcgtgtactaatcataaccgattcaacccagaagattctagcacataccagtcgactagtgagaccgtgagtatcacttacggcaccggttcaatgacaggaattctgggctatgataccgtgcaggtgggcggtattagtgacacgaatcagatcttcggtctgagtgagacagagccaggttcctttctgtactatgcccccttcgacggaatcctaggcttggcctacccctcaataagttctagtggtgccaccccggtgttcgataatatctggaaccagggcttagtaagtcaggacctgttcagcgtttacttgagtgcagatgaccaaagcgggtcagtggtgatcttcgggggtatagatagttcctactacactgggagccttaattgggtgcccgtgactgtagagggctattggcagattaccgtcgattccatcaccatgaatggggaagctatagcctgcgctgaggggtgccaggcaatcgtcgacaccgggacctccctattaacaggccccacgagcccaatcgccaatatccaaagcgatattggagccagcgagaatagcgacggcgatatggtggtgagctgcagcgccatctctagcctgcccgacatcgtcttcactatcaacggagtgcaataccctgtgcccccctccgcgtatattctacaatctgagggatcctgcatctctgggtttcaggggatgaacctcccaactgagtccggcgaactgtggatactcggggatgtgttcatcagacagtactttacagtgtttgacagggcaaacaaccaggtcggccttgcacccgttgcctag

SEQ ID NO: 35673 - DNA, 849 bp, Artificial Sequence
  derived and/or modified sequence
atgaagtggctgttgctgctgggcctggtggccttgtcagaatgtataatgtacaaagtccctttgatcaggaagaagagtctccgtaggacgttaagtgaaaggggattgcttaaagatttcttaaagaagcacaatctgaatcctgcccgtaagtattttccccagtggaaagctcccaccctcgtggatgagcagcctttggaaaattatctcgacatggaatatttcggaaccatcggcatcggtacacctgcccaagacttcactgtagtcttcgatacaggctcaagtaacctgtgggtgcccagtgtctactgttccagtctggcctgcacaaatcataacagatttaaccctgaagactcatccacttaccagagcacttccgaaaccgtgtcaatcacttacgggactgggagtatgactggaattcttggttatgatacagttcaaactgtcgcaatttggagatccgccgctatggggttggtaagtcaggacctgttctcggtttatctcagcgccgatgaccagtcgggttcagtcgttattttcggaggcatcgattctagctactacacaggttctttgaactgggtgcctgtaacagttgaggggtactggcaaattaccgtggattctataactatgaacggcgaggcaatagcttgcgcagagggttgtcaggctattgttgatactggaacaagcctcctgacagggccaaccagccctattgcgaatattcagagcgacatcggtgcgtcggagaacagcgacggggatatggtcgtgagttgctccgccatctccagtctcccagacatcgtcttcacgataaactag

SEQ ID NO: 35674 - DNA, 750 bp, Artificial Sequence
  derived and/or modified sequence
atgacgggtattttaggatatgacacggtgcaggtgggtggcatctctgataccaaccagatctttgggctgtcggaaaccgaaccaggcagtttcttgtactacgctccatttgatggcatcttgggacttgcctaccccagtatttcttcgtcgggggcaactcctgtgttcgataatatctggaaccagggtctcgtgtcccaggatctgttctccgtgtatttgtctgccgatgatcagagcggttccgtagtcatattcgggggaattgatagctcctattacaccggttctcttaactgggtgcccgttaccgtggagggctattggcagatcacagtggactccattaccatgaatggcgaggcgattgcgtgtgctgagggctgtcaggctatagtcgacacaggcacttctctgctaaccggtcctacgtcaccaatcgccaatattcagtctgacatcggggccagcgaaaatagtgatggtgatatggtcgtatcctgctctgcaatatccagcctgccggatattgtgtttacaattaatggtgtacagtatccggtgccaccatccgcttacatattgcaactgcccagtgaggggagctgtatcagtggctttcagggcatgaatttgcccactgaatcgggcgagctttggattttgggggatgtatttatacggcagtattttaccgtgttcgatagagccaataaccaggtagggctcgcacccgtggcttag

SEQ ID NO: 35675 - DNA, 750 bp, Artificial Sequence
  derived and/or modified sequence
atgacaggcatattgggctacgatactgttcaggttgggggcatcagcgatactaaccagattttcggattgtcggaaactgaaccagggagctttctttattatgcgccgttcgacggtatcctaggccttgcctacccctcgatttccagttccggcgcgacgcccgtgttcgacaacatttggaaccagggcctggtgtctcaagatttgtttagtgtctatttgagcgcggacgaccaaagtgggtccgtggtgatcttcggcgggattgattcatcgtattacaccggaagcttgaattgggtgcccgttaccgttgagggatattggcaaatcacagtcgattctatcaccatgaatggggaggcaattgcctgcgccgagggttgtcaggcaattgtcgatactgggacaagcctgttgactggtcctacaagtccaatcgcgaatatccagtccgatattggcgcctccgagaacagtgatggagatatggtggttagttgttccgctatttcaagtctgccagatattgtgtttaccatcaacggagtccagtatcctgtccccccttccgcctacattctccagctgccctctgaggggagttgtattagcgggttccagggaatgaatctgccgacagagagtggcgaactgtggatcctgggagatgtcttcattcgacaatacttcaccgtattcgatcgggccaataatcaagtgggcctagctcccgtggcttag

SEQ ID NO: 35676 - DNA, 1167 bp, Artificial Sequence
  derived and/or modified sequence
atgaagtggctgctgctgctgggcctggtggccctgtctgagtgcatcatgtacaaggtgcccctcatcaggaagaagagcctgcggaggaccctgtctgagcggggcctgctgaaggacttcctgaagaagcacaacctgaacccagccaggaagtacttcccccagtggaaggcccccaccctggtggatgagcagcccctggagaactacctggacatggagtacttcggcaccatcggcatcggcaccccagcccaggacttcaccgtggtgtttgacaccggcagcagcaacctgtgggtgcccagcgtgtactgcagcagcctggcctgcaccaaccacaaccgcttcaaccctgaggacagcagcacctaccagagcaccagcgagaccgtgtccatcacctatggaacaggctccatgacaggcatcctgggctatgacacagtgcaggtgggcggcatcagtgacaccaaccagatcttcggcctgtctgaaacagagcccggcagcttcctgtactatgccccctttgatggcatcctgggcctggcctaccccagcatcagcagcagcggggccacccctgtgtttgacaacatctggaaccagggcctggtgtcccaggacctcttctctgtgtacctgtctgcagatgaccagagcggctctgtggtgatctttggaggcatcgacagcagctactacacaggcagcctgaactgggtgcctgtgacagtggagggctactggcagatcaccgtggacagcatcaccatgaatggagaggccatcgcctgtgccgagggctgccaggccatcgtggacaccggcaccagcctgctgaccggccccaccagccccatcgccaacatccagagcgacattggagcctctgaaaattctgatggagacatggtggtgtcctgcagcgccatcagcagcctgcctgacatcgtgttcaccatcaatggagtgcagtaccctgtgccccccagcgcctacatcctgcagagcgagggcagctgcatcagcggcttccagggcatgaacctgcccacagaaagtggagagctgtggatcctgggagatgtgttcatccggcagtacttcaccgtgtttgaccgggccaacaaccaggtgggcctggcccctgtggcctag

SEQ ID NO: 35677 - DNA, 849 bp, Artificial Sequence
  derived and/or modified sequence
atgaagtggctgctgctgctgggcctggtggccctgtctgagtgcatcatgtacaaggtgcccctcatcaggaagaagagcctgcggaggaccctgtctgagcggggcctgctgaaggacttcctgaagaagcacaacctgaacccagccaggaagtacttcccccagtggaaggcccccaccctggtggatgagcagcccctggagaactacctggacatggagtacttcggcaccatcggcatcggcaccccagcccaggacttcaccgtggtgtttgacaccggcagcagcaacctgtgggtgcccagcgtgtactgcagcagcctggcctgcaccaaccacaaccgcttcaaccctgaggacagcagcacctaccagagcaccagcgagaccgtgtccatcacctatggaacaggctccatgacaggcatcctgggctatgacacagtgcagacagtggccatctggaggtctgctgccatgggcctggtgtcccaggacctcttctctgtgtacctgtctgcagatgaccagagcggctctgtggtgatctttggaggcatcgacagcagctactacacaggcagcctgaactgggtgcctgtgacagtggagggctactggcagatcaccgtggacagcatcaccatgaatggagaggccatcgcctgtgccgagggctgccaggccatcgtggacaccggcaccagcctgctgaccggccccaccagccccatcgccaacatccagagcgacatcggggccagcgagaacagtgatggagacatggtggtgtcctgcagcgccatcagcagcctgcctgacatcgtgttcaccatcaactag

SEQ ID NO: 35678 - DNA, 750 bp, Artificial Sequence
  derived and/or modified sequence
atgacaggcatcctgggctatgacacagtgcaggtgggcggcatcagtgacaccaaccagatcttcggcctgtctgaaacagagcccggcagcttcctgtactatgccccctttgatggcatcctgggcctggcctaccccagcatcagcagcagcggggccacccctgtgtttgacaacatctggaaccagggcctggtgtcccaggacctcttctctgtgtacctgtctgcagatgaccagagcggctctgtggtgatctttggaggcatcgacagcagctactacacaggcagcctgaactgggtgcctgtgacagtggagggctactggcagatcaccgtggacagcatcaccatgaatggagaggccatcgcctgtgccgagggctgccaggccatcgtggacaccggcaccagcctgctgaccggccccaccagccccatcgccaacatccagagcgacatcggggccagcgagaacagtgatggagacatggtggtgtcctgcagcgccatcagcagcctgcctgacatcgtgttcaccatcaacggggtgcagtaccctgtgcccccatctgcctacatcctgcagctgcccagcgagggcagctgcatcagcggcttccagggcatgaacctgcccacagagagcggggagctgtggatcctgggagatgtgttcatccggcagtacttcaccgtgtttgaccgggccaacaaccaggtgggcctggcccctgtggcctag

SEQ ID NO: 35679 - DNA, 1167 bp, Artificial Sequence
  derived and/or modified sequence
atgaagtggctgctgctgctgggcctggtggccctgagcgagtgcattatgtataaagtgcccctaatcagaaagaagtccctgaggagaactttaagtgaacgggggctgctgaaagacttccttaagaaacacaatcttaaccccgccagaaagtattttcctcaatggaaagctcctacactggtggatgagcagcctttggaaaattacttagacatggagtacttcggcactatcggcattgggacacccgcacaggatttcacagtggtatttgatacaggctccagtaacctttgggtccctagcgtttactgctcatccctggcctgcacaaaccacaacaggttcaatccagaggattcgagcacttaccaatccacatccgagacggtcagcattacctacggaacgggtagcatgacaggcattcttggctacgacactgtccaggtgggaggcattagcgacacaaaccagatttttggactctcggaaaccgagcctggatctttcctgtactatgccccattcgacggcatcttgggcttggcctatcccagtattagtagctcaggggcaacgcctgtgttcgacaacatatggaatcaggggctcgtgagccaggatcttttctccgtttatttgagcgctgacgatcagtcgggaagcgtagtgattttcggcgggatcgacagctcttattacacggggtcattgaattgggtaccagtgacggtcgagggctactggcagatcacggtcgactccattacgatgaacggtgaagcgatcgcttgtgcagagggatgtcaggccatcgtcgatactggaacttctttgttaaccgggcccaccagccctatcgccaacatccagagcgacatcggagctagcgagaatagtgacggcgatatggttgtctcttgtagcgccatttcatcactgcctgatatcgtatttacaataaatggggttcagtaccccgtgccccctagtgcctacatcctgcaaagtgagggctcttgtatctcagggtttcagggcatgaatctcccaacagaatccggcgagttatggattctcggcgacgtcttcatacggcagtattttaccgttttcgaccgcgcgaacaatcaggtgggcctggcacccgtcgcttag

SEQ ID NO: 35680 - DNA, 849 bp, Artificial Sequence
  derived and/or modified sequence
atgaagtggctgctgctgctgggcctggtggccctgagcgagtgcatcatgtataaggtaccactcattcgcaagaaaagtttaagacggaccctgagcgagcggggactcctgaaggattttctaaagaaacataacctgaaccctgcaaggaagtatttccctcagtggaaggctccaaccttagtcgacgagcagcctcttgaaaattatttagacatggaatacttcggaactatagggatcggcacccccgctcaggatttcaccgtggttttcgataccggcagtagcaacctctgggtgccatcagtctattgctcttccttggcgtgtaccaatcataatcggtttaatccagaagactcaagcacctaccagagcacatccgagaccgtcagcatcacctatgggactggttcgatgaccgggattctcgggtatgataccgtacagacagttgcgatctggaggtccgctgcaatggggctagtgtctcaggacctgttctccgtttatctcagtgcggatgaccagtccggtagcgtggtgatctttggagggattgactcatcctattacaccggatcacttaattgggtcccggtgacagtggaaggatattggcagattacagttgatagcattaccatgaatggagaagccatcgcatgtgctgagggatgtcaggccattgtggacacaggcacatcactgttaacggggcctacaagcccgatcgccaacatacagtctgatatcggagcgagcgaaaactcagacggggatatggtggtgtcatgttcagccatctcgtcccttccggacatcgtgtttaccatcaactag

SEQ ID NO: 35681 - DNA, 750 bp, Artificial Sequence
  derived and/or modified sequence
atgaccggcatcctgggctacgacaccgtgcaggtgggcggcatcagcgataccaaccaaatctttggcctcagcgagacagagcccggtagttttctgtactatgccccctttgatggaattctcgggctggcatatcctagtattagcagctccggcgcaaccccagtctttgacaatatctggaaccagggactggtgtctcaagatctgttcagtgtctacctctccgccgacgatcagtctggtagtgtggtgatttttggcgggatcgattccagctactacacagggagtctgaattgggtccccgtgactgtagaaggatattggcagatcaccgtggattcgatcaccatgaatggcgaggctatcgcctgtgccgagggctgtcaggccatagtggacaccggaaccagtttattgaccggcccaacctcgcctatagccaacattcagagcgatattggggcaagcgagaacagtgacggcgacatggtcgtctcatgctcagcgatttcttcccttcccgacatagtgttcacaattaacggagtgcaataccctgtgccaccctccgcctatatcctgcagctgccctctgagggctcttgtatttccgggttccagggaatgaacctgcctactgaatctggtgagctgtggatcttaggggacgtgttcataaggcagtactttactgtgtttgaccgtgctaataaccaggtgggcctggcgcccgtcgcttag

SEQ ID NO: 35682 - DNA, 750 bp, Artificial Sequence
  derived and/or modified sequence
atgaccggcatcctgggctacgacaccgtgcaggtgggcggcatcagtgataccaaccagatcttcggtctctccgagaccgagcccggcagcttcctttattatgccccctttgacggcatcctaggcctggcctaccctagtatttcctcttctggtgcgacccctgtgttcgacaacatctggaaccagggacttgtgagccaagacttgttctccgtgtatcttagcgccgatgatcagtcgggaagtgttgtgattttcggcgggatcgacagcagttactacactgggagcctcaactgggtgcccgttacagttgagggatactggcagattacagttgatagcattacaatgaatggtgaagcgatagcttgtgctgagggctgtcaggctattgttgacactgggacttcactactgactggcccaacatctcccattgccaacatccagtcagatatcggcgctagcgaaaattcagatggggatatggtggtatcttgttctgccattagcagcctgccagatatcgtgttcacgatcaacggggtgcagtatcccgtgccccccagcgcttatatactgcagctaccctcagaagggagctgcatctcagggtttcaagggatgaatttgcctacggagagtggagagctctggatcctcggagacgtctttatacggcaatactttaccgtcttcgatcgagcaaacaaccaggttggtctggctcctgtggcatag

SEQ ID NO: 35683 - DNA, 1748 bp, Artificial Sequence
  derived and/or modified sequence
tcagaatgtggcttagggcagccacaatcttatcaggagcttctctgtttgggatcaggggaaccggtgactttcagaggccgataaggcgggacccaacttgtatataaggggcagctcatgctgctgctctgcaccttcctcccgtcttgccttctccctcgagttgggacccgggaagaaccatgaagtggctgctgctgctgggtctggtggcactctctgagtgcatcatgtacaaggtccccctcatcagaaagaagtccttgaggcgcaccctgtccgagcgtggcctgctgaaggacttcctgaagaagcacaacctcaacccagccagaaagtacttcccccagtggaaggctcccaccctggtagatgaacagcccctggagaactacctggatatggagtacttcggcactatcggcatcggaactcctgcccaggatttcaccgtcgtctttgacaccggctcctccaacctgtgggtgccctcagtctactgctccagtcttgcctgcaccaaccacaaccgcttcaaccctgaggattcttccacctaccagtccaccagcgagacagtctccatcacctacggcaccggcagcatgacaggcatcctcggatacgacactgtccaggttggaggcatctctgacaccaatcagatcttcggcctgagcgagacggaacctggctccttcctgtattatgctcccttcgatggcatcctggggctggcctaccccagcatttcctcctccggggccacacccgtctttgacaacatctggaaccagggcctggtttctcaggacctcttctctgtctacctcagcgccgatgaccagagtggcagcgtggtgatctttggtggcattgactcttcttactacactggaagtctgaactgggtgcctgttaccgtcgagggttactggcagatcaccgtggacagcatcaccatgaacggagaggccatcgcctgcgctgagggctgccaggccattgttgacaccggcacctctctgctgaccggcccaaccagccccattgccaacatccagagcgacatcggagccagcgagaactcagatggcgacatggtggtcagctgctcagccatcagcagcctgcccgacatcgtcttcaccatcaatggagtccagtaccccgtgccacccagtgcctacatcctgcagagcgaggggagctgcatcagtggcttccagggcatgaacctccccaccgaatctggagagctttggatcctgggtgatgtcttcatccgccagtactttaccgtcttcgacagggcaaacaaccaggtcggcctggcccccgtggcttaagcctaagtctcttcagccacctcccaggaagatctggcctctgtcctgtgcccactttagatgtatctaattctcctgactgttcttcccaggggagtgtggaggtcttggccctgttccctgtcctaccaataacgtagaataaaaacataacccactgaaacaggttttgtggagctgcttctctttgctggtctttttccttcacattactggggttagaacaccagggcagggatgaaaatgaccacatccatttggatggcacccaacatagtgaccccagcagctgacacttcatgatggagccaagaagacagagaggcttcgggggttgtgctggaagcatcataaaaagacctgggggtcaaaatactgggctaattgtcttctcat

SEQ ID NO: 35684 - DNA, 1269 bp, Artificial Sequence
  derived and/or modified sequence
tctgcaccttcctcccgtcttgccttctccctcgagttgggacccgggaagaaccatgaagtggctgctgctgctgggtctggtggcactctctgagtgcatcatgtacaaggtccccctcatcagaaagaagtccttgaggcgcaccctgtccgagcgtggcctgctgaaggacttcctgaagaagcacaacctcaacccagccagaaagtacttcccccagtggaaggctcccaccctggtagatgaacagcccctggagaactacctggatatggagtacttcggcactatcggcatcggaactcctgcccaggatttcaccgtcgtctttgacaccggctcctccaacctgtgggtgccctcagtctactgctccagtcttgcctgcaccaaccacaaccgcttcaaccctgaggattcttccacctaccagtccaccagcgagacagtctccatcacctacggcaccggcagcatgacaggcatcctcggatacgacactgtccagactgtagccatctggagatcagctgccatgggcctggtttctcaggacctcttctctgtctacctcagcgccgatgaccagagtggcagcgtggtgatctttggtggcattgactcttcttactacactggaagtctgaactgggtgcctgttaccgtcgagggttactggcagatcaccgtggacagcatcaccatgaacggagaggccatcgcctgcgctgagggctgccaggccattgttgacaccggcacctctctgctgaccggcccaaccagccccattgccaacatccagagcgacatcggagccagcgagaactcagatggcgacatggtggtcagctgctcagccatcagcagcctgcccgacatcgtcttcaccatcaatggagtccagtaccccgtgccacccagtgcctacatcctgcagagcgaggggagctgcatcagtggcttccagggcatgaacctccccaccgaatctggagagctttggatcctgggtgatgtcttcatccgccagtactttaccgtcttcgacagggcaaacaaccaggtcggcctggcccccgtggcttaagcctaagtctcttcagccacctcccaggaagatctggcctctgtcctgtgcccactttagatgtatctaattctcctgactgttcttcccaggggagtgtggaggtcttggccctgttccctgtcctaccaataacgtagaataaaaacataacccactgaaacaggttttgtgga

SEQ ID NO: 35685 - DNA, 1228 bp, Artificial Sequence
  derived and/or modified sequence
tctgcaccttcctcccgtcttgccttctccctcgagttgggacccgggaagaaccatgaagtggctgctgctgctgggtctggtggcactctctgagtgcatcatgtacaaggtccccctcatcagaaagaagtccttgaggcgcaccctgtccgagcgtggcctgctgaaggacttcctgaagaagcacaacctcaacccagccagaaagtacttcccccagtggaaggctcccaccctggtagatgaacagcccctggagaactacctggatatggagtacttcggcactatcggcatcggaactcctgcccaggatttcaccgtcgtctttgacaccggctcctccaacctgtgggtgccctcagtctactgctccagtcttgcctgcaccaaccacaaccgcttcaaccctgaggattcttccacctaccagtccaccagcgagacagtctccatcacctacggcaccggcagcatgacaggcatcctcggatacgacactgtccaggttggaggcatctctgacaccaatcagatcttcggcctgagcgagacggaacctggctccttcctgtattatgctcccttcgatggcatcctggggctggcctaccccagcatttcctcctccggggccacacccgtctttgacaacatctggaaccagggcctggtttctcaggacctcttctctgtctacctcagcgccgatgaccagagtggcagcgtggtgatctttggtggcattgactcttcttactacactggaagtctgaactgggtgcctgttaccgtcgagggttactggcagatcaccgtggacagcatcaccatgaacggagaggccatcgcctgcgctgagggctgccaggccattgttgacaccggcacctctctgctgaccggcccaaccagccccattgccaacatccagagcgacatcggagccagcgagaactcagatggcgacatggtggtcagctgctcagccatcagcagcctgcccgacatcgtcttcaccatcaatggagtccagtaccccgtgccacccagtgcctacatcctgcagctccccagcgaggggagctgcatcagtggcttccagggcatgaacctccccaccgaatctggagagctttggatcctgggtgatgtcttcatccgccagtactttaccgtcttcgacagggcaaacaaccaggtcggcctggcccccgtggcttaa

SEQ ID NO: 35686 - DNA, 1167 bp, Artificial Sequence
  derived and/or modified sequence
atgaaatggctacttctcctgggtctcgtggccttgagcgaatgtataatgtataaggtgcctctgatacgcaagaaatctctaagacgcaccctgagtgaacgcggtttgcttaaagactttctgaaaaaacacaacctcaatccagccagaaaatatttcccccaatggaaggctccaacactagtggatgagcaaccactagagaattaccttgatatggaatactttggcaccatcgggattggtaccccagcccaagacttcaccgtcgtttttgacaccggctctagcaatttatgggtcccgtctgtttactgttcgtccttagcttgcaccaaccacaatcggttcaatcctgaagattcctctacctatcagagcacaagcgagacagtaagcataacctacggcacagggtccatgacaggaatcctcgggtatgatacagtgcaggtaggaggtataagtgatacaaatcagatcttcgggttatccgagaccgagcccggttcctttctgtactatgcaccatttgatgggatattgggcctggcgtatccctctatctcatcctcgggggcaacacccgtgttcgataatatatggaaccaagggctggtgagccaggatctgttttccgtctacctctctgcagatgaccagtctggatccgtcgtgatattcgggggaatcgacagctcctattacacaggatctctcaattgggtcccggtgactgtggagggttattggcaaattaccgtggatagcattacaatgaacggtgaagccatcgcttgtgcggaaggttgccaagcgattgtcgacacagggacaagtctgctgaccgggccaacatcccctatagccaatattcaatccgacattggggcaagcgagaattctgacggcgatatggttgtgtcatgcagtgccataagctccctgccagatattgtgtttaccatcaacggtgtgcagtacccagtaccaccctctgcctacattctgcaaagcgagggcagctgcatctcggggttccaaggaatgaaccttccgactgaatccggcgaactgtggattctgggagatgtgttcatcagacagtattttaccgtgttcgatagagctaataatcaggtgggactcgcgcctgttgcctag

SEQ ID NO: 35687 - DNA, 849 bp, Artificial Sequence
  derived and/or modified sequence
atgaagtggctacttctgttgggtctggtggcgctgtctgaatgtataatgtacaaagtccctctgataagaaaaaagagcctgagaaggactctctctgaaagagggctgctgaaagacttcttaaagaagcataacctgaatcctgcccgtaaatattttcctcaatggaaagctcccactctcgtggacgagcagcctttggaaaattacttggacatggagtatttcggcactatcggaatcggcacaccagcacaagatttcactgtggtgttcgatacaggaagttccaatttatgggtgccctccgtttactgctccagcctggcatgcacaaatcataaccgctttaaccctgaagactcaagcacttatcagtcaacgtccgagacagtgtctataacctacggcacgggatccatgacaggcatcctcgggtacgatacagtccagacagtggccatctggcgctctgctgctatgggactggtgagccaagacctgttctctgtgtatctgtcagcagatgatcagagtggaagtgtcgttatcttcggaggtatagatagctcttactacacgggatcactcaactgggtgcccgtaacagtggagggctactggcagataaccgtcgattcgataacaatgaacggagaagccattgcgtgtgccgaaggctgccaggcaattgtggatacgggcactagcctgctgactggacctactagtcctatagcaaacattcagtctgacataggcgcaagcgaaaactccgatggcgatatggtcgtgtcctgttctgctatttctagtctgcccgatatcgtgttcactatcaattag

SEQ ID NO: 35688 - DNA, 750 bp, Artificial Sequence
  derived and/or modified sequence
atgaccggcatcctgggatacgatacagttcaggtcggtggtatcagcgacacgaaccagattttcggactctccgaaactgagcctggcagttttctgtattacgcaccattcgacggcattctcggcttagcgtaccccagtatcagctcttctggagcaacaccggtatttgacaatatttggaaccagggactggtgagccaggatctcttctctgtttatctgtccgccgacgatcaatcaggcagtgtggtgatattcggcggtatagattcatcatattacacaggctccctgaactgggtgccagttactgtggagggctactggcagattaccgttgactccataaccatgaatggcgaagcgatagcttgtgccgagggctgccaggccatcgtcgacacggggactagcttgctcactggacccacttcacccatagccaatatccaatctgatattggcgcttctgagaactctgacggcgacatggtcgtgtcttgcagtgccatctcctccctaccggacatcgtctttaccatcaatggggtgcagtatcctgttcctccgtctgcctacatcctgcaattgccttctgagggctcctgcatttcaggctttcagggaatgaacttacccacagaatctggcgagctatggatactcggtgacgtgtttattaggcagtactttacggtcttcgatcgcgcaaacaaccaggttggactcgctcctgtggcctag

SEQ ID NO: 35689 - DNA, 750 bp, Artificial Sequence
  derived and/or modified sequence
atgaccggaatccttggttatgacacagtgcaggtgggcggaatttctgatacaaaccagatttttgggctgtcagagacagagcccggatcctttctgtattatgctccattcgatggcatcctcggcctggcttaccctagcataagctcgtccggagcaactccagtgttcgacaacatctggaatcagggcctggtttcccaggatcttttcagtgtatacttaagcgccgacgatcagtctggtagcgtggtgatcttcgggggtatagattcatcctattatacagggtccctaaattgggtgccggtgacagtggagggctactggcaaattacggtcgacagtatcacaatgaacggcgaagccatcgcttgcgctgaaggctgccaagcgatcgtcgacacaggtacctctttgcttaccggcccaacatcgcccatcgctaacattcagtctgacattggtgccagcgagaattcagatggggacatggtcgtgagttgctcagccatttcatcacttccggatattgttttcacaattaacggcgtacagtatccagtccccccttctgcttacattttgcagttgccctccgaagggagctgtatctcaggtttccaaggtatgaatttaccaaccgagtcgggcgagctgtggatcctgggagacgtgttcatcaggcagtacttcaccgtgttcgatcgcgctaacaaccaggtgggcttggcccctgttgcatag

SEQ ID NO: 35690 - DNA, 1167 bp, Artificial Sequence
  derived and/or modified sequence
atgaagtggctgctgctgctgggcctggtggccctgagcgagtgcatcatgtacaaggtgcccctgatcagaaagaagagcctgagaagaaccctgagcgagagaggcctgctgaaggacttcctgaagaagcacaacctgaaccccgccagaaagtacttcccccagtggaaggcccccaccctggtggacgagcagcccctggagaactacctggacatggagtacttcggcaccatcggcatcggcacccccgcccaggacttcaccgtggtgttcgacaccggcagcagcaacctgtgggtgcccagcgtgtactgcagcagcctggcctgcaccaaccacaacagattcaaccccgaggacagcagcacctaccagagcaccagcgagaccgtgagcatcacctacggcaccggcagcatgaccggcatcctgggctacgacaccgtgcaggtgggcggcatcagcgacaccaaccagatcttcggcctgagcgagaccgagcccggcagcttcctgtactacgcccccttcgacggcatcctgggcctggcctaccccagcatcagcagcagcggcgccacccccgtgttcgacaacatctggaaccagggcctggtgagccaggacctgttcagcgtgtacctgagcgccgacgaccagagcggcagcgtggtgatcttcggcggcatcgacagcagctactacaccggcagcctgaactgggtgcccgtgaccgtggagggctactggcagatcaccgtggacagcatcaccatgaacggcgaggccatcgcctgcgccgagggctgccaggccatcgtggacaccggcaccagcctgctgaccggccccaccagccccatcgccaacatccagagcgacatcggcgccagcgagaacagcgacggcgacatggtggtgagctgcagcgccatcagcagcctgcccgacatcgtgttcaccatcaacggcgtgcagtaccccgtgccccccagcgcctacatcctgcagagcgagggcagctgcatcagcggcttccagggcatgaacctgcccaccgagagcggcgagctgtggatcctgggcgacgtgttcatcagacagtacttcaccgtgttcgacagagccaacaaccaggtgggcctggcccccgtggcctag

SEQ ID NO: 35691 - DNA, 849 bp, Artificial Sequence
  derived and/or modified sequence
atgaagtggctgctgctgctgggcctggtggccctgagcgagtgcatcatgtacaaggtgcccctgatcagaaagaagagcctgagaagaaccctgagcgagagaggcctgctgaaggacttcctgaagaagcacaacctgaaccccgccagaaagtacttcccccagtggaaggcccccaccctggtggacgagcagcccctggagaactacctggacatggagtacttcggcaccatcggcatcggcacccccgcccaggacttcaccgtggtgttcgacaccggcagcagcaacctgtgggtgcccagcgtgtactgcagcagcctggcctgcaccaaccacaacagattcaaccccgaggacagcagcacctaccagagcaccagcgagaccgtgagcatcacctacggcaccggcagcatgaccggcatcctgggctacgacaccgtgcagaccgtggccatctggagaagcgccgccatgggcctggtgagccaggacctgttcagcgtgtacctgagcgccgacgaccagagcggcagcgtggtgatcttcggcggcatcgacagcagctactacaccggcagcctgaactgggtgcccgtgaccgtggagggctactggcagatcaccgtggacagcatcaccatgaacggcgaggccatcgcctgcgccgagggctgccaggccatcgtggacaccggcaccagcctgctgaccggccccaccagccccatcgccaacatccagagcgacatcggcgccagcgagaacagcgacggcgacatggtggtgagctgcagcgccatcagcagcctgcccgacatcgtgttcaccatcaactag

SEQ ID NO: 35692 - DNA, 750 bp, Artificial Sequence
  derived and/or modified sequence
atgaccggcatcctgggctacgacaccgtgcaggtgggcggcatcagcgacaccaaccagatcttcggcctgagcgagaccgagcccggcagcttcctgtactacgcccccttcgacggcatcctgggcctggcctaccccagcatcagcagcagcggcgccacccccgtgttcgacaacatctggaaccagggcctggtgagccaggacctgttcagcgtgtacctgagcgccgacgaccagagcggcagcgtggtgatcttcggcggcatcgacagcagctactacaccggcagcctgaactgggtgcccgtgaccgtggagggctactggcagatcaccgtggacagcatcaccatgaacggcgaggccatcgcctgcgccgagggctgccaggccatcgtggacaccggcaccagcctgctgaccggccccaccagccccatcgccaacatccagagcgacatcggcgccagcgagaacagcgacggcgacatggtggtgagctgcagcgccatcagcagcctgcccgacatcgtgttcaccatcaacggcgtgcagtaccccgtgccccccagcgcctacatcctgcagctgcccagcgagggcagctgcatcagcggcttccagggcatgaacctgcccaccgagagcggcgagctgtggatcctgggcgacgtgttcatcagacagtacttcaccgtgttcgacagagccaacaaccaggtgggcctggcccccgtggcctag

SEQ ID NO: 35693 - protein, 388 aa, Artificial Sequence
  derived and/or modified sequence
MKWLLLLGLVALSECIMYKVPLIRKKSLRRTLSERGLLKDFLKKHNLNPARKYFPQWEAPTLVDEQPLENYLDMEYFGTIGIGTPAQDFTVVFDTGSSNLWVPSVYCSSLACTNHNRFNPEDSSTYQSTSETVSITYGTGSMTGILGYDTVQVGGISDTNQIFGLSETEPGSFLYYAPFDGILGLAYPSISSSGATPVFDNIWNQGLVSQDLFSVYLSADDQSGSVVIFGGIDSSYYTGSLNWVPVTVEGYWQITVDSITMNGEAIACAEGCQAIVDTGTSLLTGPTSPIANIQSDIGASENSDGDMVVSCSAISSLPDIVFTINGVQYPVPPSAYILQSEGSCISGFQGMNLPTESGELWILGDVFIRQYFTVFDRANNQVGLAPVA

SEQ ID NO: 35694 - protein, 282 aa, Artificial Sequence
  derived and/or modified sequence
MKWLLLLGLVALSECIMYKVPLIRKKSLRRTLSERGLLKDFLKKHNLNPARKYFPQWEAPTLVDEQPLENYLDMEYFGTIGIGTPAQDFTVVFDTGSSNLWVPSVYCSSLACTNHNRFNPEDSSTYQSTSETVSITYGTGSMTGILGYDTVQTVAIWRSAAMGLVSQDLFSVYLSADDQSGSVVIFGGIDSSYYTGSLNWVPVTVEGYWQITVDSITMNGEAIACAEGCQAIVDTGTSLLTGPTSPIANIQSDIGASENSDGDMVVSCSAISSLPDIVFTIN

SEQ ID NO: 35695 - DNA, 1167 bp, Artificial Sequence
  derived and/or modified sequence
atgaagtggttgctgctgttgggtctcgtggctctttcagaatgcatcatgtacaaggtcccactgatccgcaagaagtccctcagaaggaccctctctgagagaggccttctgaaagattttctgaagaagcacaatctcaaccctgcccgtaagtatttcccacagtgggaggccccaaccctggtggacgagcagccactggaaaactatctggacatggagtattttgggacaatcgggatcggtacccccgcgcaagacttcacagtggtctttgacacgggctctagcaatctatgggtgccttctgtgtattgcagttccctggcctgtaccaatcacaatcgattcaaccctgaggattcttctacgtaccagtctacgtccgagaccgtgagtatcacttatgggacaggatccatgactggcatccttggttacgataccgtgcaggttggaggcattagcgacaccaaccaaattttcgggctctccgagacagaaccaggttcgttcctgtattatgcccccttcgatggtatcctcggattagcatatccatctatttcctcctctggggcaaccccggtgttcgacaacatctggaaccagggactcgtcagtcaggatttgttcagtgtatacttgtcagccgacgaccagagtggatcggtggtcatttttggaggtattgattcatcatattacacaggctcgttaaactgggtacccgtaactgtggaaggctattggcagattacagtcgactctatcaccatgaacggcgaggccattgcttgcgcagaggggtgtcaggccatagtcgataccggaacatccctgctgaccggaccgacaagtcctatcgctaatatacaatctgatattggggcttcagagaacagcgacggggacatggtcgtgtcatgctccgcaatcagcagtcttcccgacattgtgttcactattaacggcgtgcaataccctgtgcctccctcggcttacatcttacagtccgagggttcctgcatttccggattccaggggatgaaccttccaaccgagagtggcgaactatggattctgggggatgttttcatacggcagtactttacagtgttcgaccgcgctaacaaccaggtgggactggccccagtcgcatag

SEQ ID NO: 35696 - DNA, 849 bp, Artificial Sequence
  derived and/or modified sequence
atgaaatggctgctgttgcttggattagtggctttgtccgagtgcataatgtataaagtgcctctcataaggaagaagtccctgagacggaccttgtctgagcggggattgctaaaggattttcttaaaaagcataatctaaatccggccaggaagtactttccccagtgggaggcccctacacttgtggatgaacagcctctggagaactacctcgatatggaatacttcggaaccattggaatcggaacccctgctcaggatttcactgtggtgtttgatacaggatcctccaacctgtgggtaccgtctgtgtactgcagctctctggcatgtacgaatcacaaccgttttaacccggaggactcaagtacatatcagtctacctcggagacagtgtcgatcacatacggaacaggcagcatgacaggaattctaggctacgacaccgtgcagacagtggccatctggaggagtgctgcaatgggtctggtctctcaagatcttttctcagtctacctcagtgcagacgatcagtctggtagcgtggtaatcttcggcgggattgacagcagctactacactggctcacttaactgggtgcccgtgaccgtggagggttattggcaaatcactgtcgactccatcactatgaacggggaggctatcgcttgtgcagaagggtgccaggcaattgttgacactgggacgagcctccttacaggaccgactagccccatcgcgaatatacaatccgacattggcgcttcggaaaattccgacggagacatggtggtgtcttgtagcgcaatcagtagcctgcctgacattgtatttactattaactag

SEQ ID NO: 35697 - DNA, 1167 bp, Artificial Sequence
  derived and/or modified sequence
atgaagtggctgctgctgctgggcctggtggccctgtctgagtgcatcatgtacaaggtgcccctcatcaggaagaagagcctgcggaggaccctgtctgagcggggcctgctgaaggacttcctgaagaagcacaacctgaacccagccaggaagtacttcccccagtgggaggcccccaccctggtggatgagcagcccctggagaactacctggacatggagtacttcggcaccatcggcatcggcaccccagcccaggacttcaccgtggtgtttgacaccggcagcagcaacctgtgggtgcccagcgtgtactgcagcagcctggcctgcaccaaccacaaccgcttcaaccctgaggacagcagcacctaccagagcaccagcgagaccgtgtccatcacctatggaacaggctccatgacaggcatcctgggctatgacacagtgcaggtgggcggcatcagtgacaccaaccagatcttcggcctgtctgaaacagagcccggcagcttcctgtactatgccccctttgatggcatcctgggcctggcctaccccagcatcagcagcagcggggccacccctgtgtttgacaacatctggaaccagggcctggtgtcccaggacctcttctctgtgtacctgtctgcagatgaccagagcggctctgtggtgatctttggaggcatcgacagcagctactacacaggcagcctgaactgggtgcctgtgacagtggagggctactggcagatcaccgtggacagcatcaccatgaatggagaggccatcgcctgtgccgagggctgccaggccatcgtggacaccggcaccagcctgctgaccggccccaccagccccatcgccaacatccagagcgacattggagcctctgaaaattctgatggagacatggtggtgtcctgcagcgccatcagcagcctgcctgacatcgtgttcaccatcaatggagtgcagtaccctgtgccccccagcgcctacatcctgcagagcgagggcagctgcatcagcggcttccagggcatgaacctgcccacagaaagtggagagctgtggatcctgggagatgtgttcatccggcagtacttcaccgtgtttgaccgggccaacaaccaggtgggcctggcccctgtggcctag

SEQ ID NO: 35698 - DNA, 849 bp, Artificial Sequence
  derived and/or modified sequence
atgaagtggctgctgctgctgggcctggtggccctgtctgagtgcatcatgtacaaggtgcccctcatcaggaagaagagcctgcggaggaccctgtctgagcggggcctgctgaaggacttcctgaagaagcacaacctgaacccagccaggaagtacttcccccagtgggaggcccccaccctggtggatgagcagcccctggagaactacctggacatggagtacttcggcaccatcggcatcggcaccccagcccaggacttcaccgtggtgtttgacaccggcagcagcaacctgtgggtgcccagcgtgtactgcagcagcctggcctgcaccaaccacaaccgcttcaaccctgaggacagcagcacctaccagagcaccagcgagaccgtgtccatcacctatggaacaggctccatgacaggcatcctgggctatgacacagtgcagacagtggccatctggaggtctgctgccatgggcctggtgtcccaggacctcttctctgtgtacctgtctgcagatgaccagagcggctctgtggtgatctttggaggcatcgacagcagctactacacaggcagcctgaactgggtgcctgtgacagtggagggctactggcagatcaccgtggacagcatcaccatgaatggagaggccatcgcctgtgccgagggctgccaggccatcgtggacaccggcaccagcctgctgaccggccccaccagccccatcgccaacatccagagcgacatcggggccagcgagaacagtgatggagacatggtggtgtcctgcagcgccatcagcagcctgcctgacatcgtgttcaccatcaactag

SEQ ID NO: 35699 - DNA, 1167 bp, Artificial Sequence
  derived and/or modified sequence
atgaagtggctgctgctgctgggcctggtggccctgagcgagtgcataatgtataaagtgcctctcatccgcaagaagagcctgaggaggacactgagcgaaagagggcttctcaaggacttcctcaagaagcataatctcaatcctgcaagaaagtacttcccgcagtgggaggctccgactcttgttgatgaacagcctttggagaattaccttgacatggaatacttcggcactatcggcattggtacacctgcacaggatttcaccgttgtgtttgataccggctcatcaaacctttgggtccccagcgtctattgctctagcctggcttgcaccaatcataatcgtttcaaccccgaggacagctccacatatcagagcaccagcgagaccgtcagtattacatacggcacgggaagtatgacgggcattctgggatatgacaccgtgcaagttggaggcataagtgacaccaatcagatctttggactttcagagaccgaaccgggatccttcctttactacgcccctttcgatggtatcctcggcttagcctatcccagtatttcttcttccggagccaccccagtgtttgacaatatctggaatcagggattggtgagccaagacttatttagcgtgtacctctcagccgacgatcaatcagggagcgtggtgatattcggggggattgactccagctattatacaggttctctgaactgggttcccgtgactgttgagggctactggcagattacagtggatagtattacaatgaacggagaggccatagcctgtgcagagggctgccaagccatagttgatacaggtacctcccttctcaccggcccaacttctccgatagccaatatccaaagcgacataggcgcaagtgaaaactctgacggcgatatggtggtcagctgctccgcaatttcaagcctccccgacattgttttcactatcaatggcgtgcagtacccggtgcccccctccgcatacattttgcaatcagaagggtcttgcatcagcggctttcaggggatgaacctacctaccgaatcaggcgaactttggatactcggggacgtgttcattcggcaatacttcacagtcttcgaccgggccaataatcaggtaggactcgctcctgtggcatag

SEQ ID NO: 35700 - DNA, 849 bp, Artificial Sequence
  derived and/or modified sequence
atgaagtggctgctgctgctgggcctggtggccctgagcgagtgcatcatgtataaggtgcctctgattcgcaaaaagtcgctcaggcgcactctgagcgagcgcggcctactaaaggacttcctaaagaagcacaatctgaacccagccaggaagtattttcctcagtgggaagcgcccacattggttgatgaacagccactcgaaaattacctggacatggagtatttcggtacgataggcataggaaccccggcccaagatttcaccgtggtcttcgataccgggagctcgaacctgtgggtcccgtctgtgtattgcagtagtctcgcctgtacaaaccacaaccgctttaatcctgaggatagcagtacctaccaaagcacaagtgaaacagtctcaattacttatggcactggctccatgacagggatactaggctatgacacagtgcaaaccgtggccatatggaggtctgccgccatgggcctcgtctctcaagacctgttctctgtgtatttgagcgccgacgatcagtccggaagcgtcgtgatcttcgggggaattgacagtagctactacacaggttccctgaactgggtccccgtgactgttgaaggatactggcagattacagtggacagcatcaccatgaatggagaagctattgcctgtgcagaggggtgtcaagcaatcgtggataccggcacatctttattgacgggccccacctcccctatcgcaaatatccagtccgatattggagcaagcgaaaatagtgacggcgatatggtcgtgtcatgcagtgccattagctctctcccagatattgtgttcactatcaattag

SEQ ID NO: 35701 - DNA, 1748 bp, Artificial Sequence
  derived and/or modified sequence
tcagaatgtggctcagggcagccacaatcttatcaggagcttctctgtttgggatcaggggaaccggtgactttcagaggccgataaggcgggacccaacttgtatataaggggcagctcatgctgctgctctgcaccttcctcccatcttgccttctccctcgagttgggacccgggaagaaccatgaagtggctgctgctgctgggtctggtggcgctctctgagtgcatcatgtacaaggtccccctcatcagaaagaagtccttgaggcgcaccctgtccgagcgtggcctgctgaaggacttcctgaagaagcacaacctcaacccagccagaaagtacttcccccagtgggaggctcccaccctggtagatgaacagcccctggagaactacctggatatggagtacttcggcactatcggcatcggaactcctgcccaggatttcaccgtcgtctttgacaccggctcctccaacctgtgggtgccctcagtctactgctccagtcttgcctgcaccaaccacaaccgcttcaaccctgaggattcttccacctaccagtccaccagcgagacagtctccatcacctacggcaccggcagcatgacaggcatcctcggatacgacactgtccaggttggaggcatctctgacaccaatcagatcttcggcctgagcgagacggaacctggctccttcctgtattatgctcccttcgatggcatcctggggctggcctaccccagcatttcctcctccggggccacacccgtctttgacaacatctggaaccagggcctggtttctcaggacctcttctctgtctacctcagcgccgatgaccagagtggcagcgtggtgatctttggtggcattgactcttcttactacactggaagtctgaactgggtgcctgttaccgtcgagggttactggcagatcaccgtggacagcatcaccatgaacggagaggccatcgcctgcgctgagggctgccaggccattgttgacaccggcacctctctgctgaccggcccaaccagccccattgccaacatccagagcgacatcggagccagcgagaactcagatggcgacatggtggtcagctgctcagccatcagcagcctgcccgacatcgtcttcaccatcaatggagtccagtaccccgtgccacccagtgcctacatcctgcagagcgaggggagctgcatcagtggcttccagggcatgaacctccccaccgaatctggagagctttggatcctgggtgatgtcttcatccgccagtactttaccgtcttcgacagggcaaacaaccaggtcggcctggcccccgtggcttaagcctaagtctcttcagccacctcccaggaagatctggcctctgtcctgtgcccactttagatgtatctaattctcctgactgttcttcccaggggagtgtggaggtcttggccctgttccctgtcctaccaataacgtagaataaaaacataacccactgaaacaggttttgtggagctgcttctctttgctggtctttttccttcacattactggggttagaacgccagggcagggatgaaaatgaccacatccatttggatggcacccaacatagtgaccccagcagctgacacttcatgatggagccaagaagacagagaggcttcgggggttgtgctggaagcatcataaaaagacctgggggtcaaaatactgggctaattgtcttctcat

SEQ ID NO: 35702 - DNA, 1269 bp, Artificial Sequence
  derived and/or modified sequence
tctgcaccttcctcccatcttgccttctccctcgagttgggacccgggaagaaccatgaagtggctgctgctgctgggtctggtggcgctctctgagtgcatcatgtacaaggtccccctcatcagaaagaagtccttgaggcgcaccctgtccgagcgtggcctgctgaaggacttcctgaagaagcacaacctcaacccagccagaaagtacttcccccagtgggaggctcccaccctggtagatgaacagcccctggagaactacctggatatggagtacttcggcactatcggcatcggaactcctgcccaggatttcaccgtcgtctttgacaccggctcctccaacctgtgggtgccctcagtctactgctccagtcttgcctgcaccaaccacaaccgcttcaaccctgaggattcttccacctaccagtccaccagcgagacagtctccatcacctacggcaccggcagcatgacaggcatcctcggatacgacactgtccagactgtagccatctggagatcagctgccatgggcctggtttctcaggacctcttctctgtctacctcagcgccgatgaccagagtggcagcgtggtgatctttggtggcattgactcttcttactacactggaagtctgaactgggtgcctgttaccgtcgagggttactggcagatcaccgtggacagcatcaccatgaacggagaggccatcgcctgcgctgagggctgccaggccattgttgacaccggcacctctctgctgaccggcccaaccagccccattgccaacatccagagcgacatcggagccagcgagaactcagatggcgacatggtggtcagctgctcagccatcagcagcctgcccgacatcgtcttcaccatcaatggagtccagtaccccgtgccacccagtgcctacatcctgcagagcgaggggagctgcatcagtggcttccagggcatgaacctccccaccgaatctggagagctttggatcctgggtgatgtcttcatccgccagtactttaccgtcttcgacagggcaaacaaccaggtcggcctggcccccgtggcttaagcctaagtctcttcagccacctcccaggaagatctggcctctgtcctgtgcccactttagatgtatctaattctcctgactgttcttcccaggggagtgtggaggtcttggccctgttccctgtcctaccaataacgtagaataaaaacataacccactgaaacaggttttgtgga

SEQ ID NO: 35703 - DNA, 1228 bp, Artificial Sequence
  derived and/or modified sequence
tctgcaccttcctcccatcttgccttctccctcgagttgggacccgggaagaaccatgaagtggctgctgctgctgggtctggtggcgctctctgagtgcatcatgtacaaggtccccctcatcagaaagaagtccttgaggcgcaccctgtccgagcgtggcctgctgaaggacttcctgaagaagcacaacctcaacccagccagaaagtacttcccccagtgggaggctcccaccctggtagatgaacagcccctggagaactacctggatatggagtacttcggcactatcggcatcggaactcctgcccaggatttcaccgtcgtctttgacaccggctcctccaacctgtgggtgccctcagtctactgctccagtcttgcctgcaccaaccacaaccgcttcaaccctgaggattcttccacctaccagtccaccagcgagacagtctccatcacctacggcaccggcagcatgacaggcatcctcggatacgacactgtccaggttggaggcatctctgacaccaatcagatcttcggcctgagcgagacggaacctggctccttcctgtattatgctcccttcgatggcatcctggggctggcctaccccagcatttcctcctccggggccacacccgtctttgacaacatctggaaccagggcctggtttctcaggacctcttctctgtctacctcagcgccgatgaccagagtggcagcgtggtgatctttggtggcattgactcttcttactacactggaagtctgaactgggtgcctgttaccgtcgagggttactggcagatcaccgtggacagcatcaccatgaacggagaggccatcgcctgcgctgagggctgccaggccattgttgacaccggcacctctctgctgaccggcccaaccagccccattgccaacatccagagcgacatcggagccagcgagaactcagatggcgacatggtggtcagctgctcagccatcagcagcctgcccgacatcgtcttcaccatcaatggagtccagtaccccgtgccacccagtgcctacatcctgcagctccccagcgaggggagctgcatcagtggcttccagggcatgaacctccccaccgaatctggagagctttggatcctgggtgatgtcttcatccgccagtactttaccgtcttcgacagggcaaacaaccaggtcggcctggcccccgtggcttaa

SEQ ID NO: 35704 - DNA, 1167 bp, Artificial Sequence
  derived and/or modified sequence
atgaagtggctgctgctattgggcctcgtggccctatcagagtgcatcatgtacaaggtgccgctgattagaaagaaatcactgcgtcgcacacttagtgaacggggacttctgaaggacttcctgaagaaacataatttaaatccagctcgcaagtactttcctcagtgggaggccccaacactggtagatgaacaacctttagaaaattacctcgacatggagtatttcgggacaatcggtattggcacacctgcacaggatttcaccgtcgtgttcgacaccggctcttcgaatctatgggtcccctctgtgtattgctcctccctggcctgtactaaccacaatcgctttaatcccgaggactcttctacttaccagagcacctctgagacagtaagcattacctatggaaccggcagcatgaccggcattctcggatacgataccgtgcaggttggcggaatttcagatactaatcaaatttttgggctgtcagaaacagaacctggctcattcctgtattacgcgccttttgatggcatactgggcttggcttatccgagcatttcgtcctctggtgctactccagtctttgataacatctggaaccagggtctggtgtctcaagatctgttcagtgtttatttgtctgctgacgaccagagcgggtctgtggttattttcggcggaatcgactcttcgtactatacaggtagcttaaactgggtacccgtgacagttgaaggatattggcagattaccgtcgattccataacgatgaacggcgaagcaatagcctgcgcagagggttgtcaggccatcgttgacacagggacaagtcttttgacagggcctacctcacctattgctaatatacagtctgatattggcgcttcagaaaatagcgatggggacatggtagtgtcctgctccgccatatcctcactgcccgatatagtgtttactatcaacggggtgcagtaccctgtgcccccttccgcctacatcctgcagagcgagggcagctgcatctccggatttcagggcatgaacttacccaccgagtcgggtgagctgtggattctcggagatgtgtttattaggcaatacttcaccgtgtttgaccgggctaataaccaggtcggactggcgcctgtggcgtag

SEQ ID NO: 35705 - DNA, 849 bp, Artificial Sequence
  derived and/or modified sequence
atgaagtggctgctccttttaggccttgtcgccctgagtgaatgtattatgtataaggtgcctctgatccggaaaaagagtctaaggagaaccttgtctgaacggggactgctcaaagatttcctgaaaaagcataacctgaatcctgctcgcaagtactttccacagtgggaagctccaaccttggtagacgagcaaccactggagaattatctggatatggaatattttgggaccataggtattggtactcccgcacaggattttactgtagtctttgacaccggtagcagcaatttgtgggtgccatctgtttactgttcaagccttgcttgtacaaaccacaacagatttaacccagaagactcatccacctaccagagcacctccgagacggtatccatcacctatggaaccggatcaatgacggggatcctcggatacgacaccgtgcagacagtggccatttggcgctctgccgcaatgggccttgtgtcccaggacctgttctccgtttatctaagtgcagatgatcaatctggatctgtggtgatttttgggggaatcgacagcagctactatacaggaagcctcaattgggtgcccgttacagtggagggatattggcagatcacggtcgatagtatcaccatgaatggagaagccattgcctgtgccgaggggtgtcaggctatcgtggatactgggacaagtctgcttacaggcccaacctccccaatagccaacattcagtcagacataggagcatctgagaactccgacggcgacatggtggtttcctgttccgcgattagcagtctgcctgatattgtcttcacaatcaattag

SEQ ID NO: 35706 - DNA, 1167 bp, Artificial Sequence
  derived and/or modified sequence
atgaagtggctgctgctgctgggcctggtggccctgagcgagtgcatcatgtacaaggtgcccctgatcagaaagaagagcctgagaagaaccctgagcgagagaggcctgctgaaggacttcctgaagaagcacaacctgaaccccgccagaaagtacttcccccagtgggaggcccccaccctggtggacgagcagcccctggagaactacctggacatggagtacttcggcaccatcggcatcggcacccccgcccaggacttcaccgtggtgttcgacaccggcagcagcaacctgtgggtgcccagcgtgtactgcagcagcctggcctgcaccaaccacaacagattcaaccccgaggacagcagcacctaccagagcaccagcgagaccgtgagcatcacctacggcaccggcagcatgaccggcatcctgggctacgacaccgtgcaggtgggcggcatcagcgacaccaaccagatcttcggcctgagcgagaccgagcccggcagcttcctgtactacgcccccttcgacggcatcctgggcctggcctaccccagcatcagcagcagcggcgccacccccgtgttcgacaacatctggaaccagggcctggtgagccaggacctgttcagcgtgtacctgagcgccgacgaccagagcggcagcgtggtgatcttcggcggcatcgacagcagctactacaccggcagcctgaactgggtgcccgtgaccgtggagggctactggcagatcaccgtggacagcatcaccatgaacggcgaggccatcgcctgcgccgagggctgccaggccatcgtggacaccggcaccagcctgctgaccggccccaccagccccatcgccaacatccagagcgacatcggcgccagcgagaacagcgacggcgacatggtggtgagctgcagcgccatcagcagcctgcccgacatcgtgttcaccatcaacggcgtgcagtaccccgtgccccccagcgcctacatcctgcagagcgagggcagctgcatcagcggcttccagggcatgaacctgcccaccgagagcggcgagctgtggatcctgggcgacgtgttcatcagacagtacttcaccgtgttcgacagagccaacaaccaggtgggcctggcccccgtggcctag

SEQ ID NO: 35707 - DNA, 849 bp, Artificial Sequence
  derived and/or modified sequence
atgaagtggctgctgctgctgggcctggtggccctgagcgagtgcatcatgtacaaggtgcccctgatcagaaagaagagcctgagaagaaccctgagcgagagaggcctgctgaaggacttcctgaagaagcacaacctgaaccccgccagaaagtacttcccccagtgggaggcccccaccctggtggacgagcagcccctggagaactacctggacatggagtacttcggcaccatcggcatcggcacccccgcccaggacttcaccgtggtgttcgacaccggcagcagcaacctgtgggtgcccagcgtgtactgcagcagcctggcctgcaccaaccacaacagattcaaccccgaggacagcagcacctaccagagcaccagcgagaccgtgagcatcacctacggcaccggcagcatgaccggcatcctgggctacgacaccgtgcagaccgtggccatctggagaagcgccgccatgggcctggtgagccaggacctgttcagcgtgtacctgagcgccgacgaccagagcggcagcgtggtgatcttcggcggcatcgacagcagctactacaccggcagcctgaactgggtgcccgtgaccgtggagggctactggcagatcaccgtggacagcatcaccatgaacggcgaggccatcgcctgcgccgagggctgccaggccatcgtggacaccggcaccagcctgctgaccggccccaccagccccatcgccaacatccagagcgacatcggcgccagcgagaacagcgacggcgacatggtggtgagctgcagcgccatcagcagcctgcccgacatcgtgttcaccatcaactag

SEQ ID NO: 35708 - protein, 938 aa, Artificial Sequence
  derived and/or modified sequence
MFPMQKGSLNLLRQKWESCDYQRSECHPRDSHCTIFQPQESKLLAPEGEVVSAPQSLDPTSLPYSTGEEMWSSKPEEKDSVDKSNNTREYGRPEVLKEDSLSSRRRIERFSIALDELRSVFEAPKSGNKPAEYGGKEVEIERSLCSPAFKSHPGSQLEDSVKDSDKKGKETSFDKMSPESGHSRIFEATAGPNKPESGFAEDSAARGEGVSDLHEVVSLKERMARYQAAVSRGDCRSFSANMMEESEMCAVPGGLAKVKKQFEDEITSSRNTFAQYQYQHQNRSEQEAIHSSQVGTSRSSQEMARNEQEGSKVQKIDVHGTEMVSHLEKHTEEVNQASQFHQYVQETVIDTPEDEEIPKVSTKLLKEQFEKSAQEKILYSDKEMTTPAKQIKKLLLQDKEICILCQKTVYPMECLVADKQNFHKSCFRCHHCNSKLSLGNYASLHGQIYCKPHFKQLFKSKGNYDEGFGHKQHKDRWNCKNQSRSVDFIPNEEPNMCKNIAENTLVPGDRNEHLDAGNSEGQRNDLRKLGERGKLKVIWPPSKEIPKKTLPFEEELKMSKPKWPPEMTTLLSPEFKSESLLEDVRTPENKGQRQDHFPFLQPYLQSTHVCQKEDVIGIKEMKMPEGRKDEKKEGRKNVQDRPSEAEDTKSNRKSAMDLNDNNNVIVQSAEKEKNEKTNQTNGAEVLQVTNTDDEMMPENHKENLNKNNNNNYVAVSYLNNCRQKTSILEFLDLLPLSSEANDTANEYEIEKLENTSRISELLGIFESEKTYSRNVLAMALKKQTDRAAAGSPVQPAPKPSLSRGLMVKGGSSIISPDTNLLNIKGSHSKSKNLHFFFSNTVKITAFSKKNENIFNCDLIDSVDQIKNMPCLDLREFGKDVKPWHVETTEAARNNENTGFDALSHECTAKPLFPRVEVQSEQLTVEEQIKRNRCYSDTE

SEQ ID NO: 35709 - DNA, 2817 bp, Artificial Sequence
  derived and/or modified sequence
atgttccccatgcagaagggcagcctgaacctgctgagacagaagtgggagagctgcgactaccagagaagcgagtgccaccccagagacagccactgcaccatcttccagccccaggagagcaagctgctggcccccgagggcgaggtggtgagcgccccccagagcctggaccccaccagcctgccctacagcaccggcgaggagatgtggagcagcaagcccgaggagaaggacagcgtggacaagagcaacaacaccagagagtacggcagacccgaggtgctgaaggaggacagcctgagcagcagaagaagaatcgagagattcagcatcgccctggacgagctgagaagcgtgttcgaggcccccaagagcggcaacaagcccgccgagtacggcggcaaggaggtggagatcgagagaagcctgtgcagccccgccttcaagagccaccccggcagccagctggaggacagcgtgaaggacagcgacaagaagggcaaggagaccagcttcgacaagatgagccccgagagcggccacagcagaatcttcgaggccaccgccggccccaacaagcccgagagcggcttcgccgaggacagcgccgccagaggcgagggcgtgagcgacctgcacgaggtggtgagcctgaaggagagaatggccagataccaggccgccgtgagcagaggcgactgcagaagcttcagcgccaacatgatggaggagagcgagatgtgcgccgtgcccggcggcctggccaaggtgaagaagcagttcgaggacgagatcaccagcagcagaaacaccttcgcccagtaccagtaccagcaccagaacagaagcgagcaggaggccatccacagcagccaggtgggcaccagcagaagcagccaggagatggccagaaacgagcaggagggcagcaaggtgcagaagatcgacgtgcacggcaccgagatggtgagccacctggagaagcacaccgaggaggtgaaccaggccagccagttccaccagtacgtgcaggagaccgtgatcgacacccccgaggacgaggagatccccaaggtgagcaccaagctgctgaaggagcagttcgagaagagcgcccaggagaagatcctgtacagcgacaaggagatgaccacccccgccaagcagatcaagaagctgctgctgcaggacaaggagatctgcatcctgtgccagaagaccgtgtaccccatggagtgcctggtggccgacaagcagaacttccacaagagctgcttcagatgccaccactgcaacagcaagctgagcctgggcaactacgccagcctgcacggccagatctactgcaagccccacttcaagcagctgttcaagagcaagggcaactacgacgagggcttcggccacaagcagcacaaggacagatggaactgcaagaaccagagcagaagcgtggacttcatccccaacgaggagcccaacatgtgcaagaacatcgccgagaacaccctggtgcccggcgacagaaacgagcacctggacgccggcaacagcgagggccagagaaacgacctgagaaagctgggcgagagaggcaagctgaaggtgatctggccccccagcaaggagatccccaagaagaccctgcccttcgaggaggagctgaagatgagcaagcccaagtggccccccgagatgaccaccctgctgagccccgagttcaagagcgagagcctgctggaggacgtgagaacccccgagaacaagggccagagacaggaccacttccccttcctgcagccctacctgcagagcacccacgtgtgccagaaggaggacgtgatcggcatcaaggagatgaagatgcccgagggcagaaaggacgagaagaaggagggcagaaagaacgtgcaggacagacccagcgaggccgaggacaccaagagcaacagaaagagcgccatggacctgaacgacaacaacaacgtgatcgtgcagagcgccgagaaggagaagaacgagaagaccaaccagaccaacggcgccgaggtgctgcaggtgaccaacaccgacgacgagatgatgcccgagaaccacaaggagaacctgaacaagaacaacaacaacaactacgtggccgtgagctacctgaacaactgcagacagaagaccagcatcctggagttcctggacctgctgcccctgagcagcgaggccaacgacaccgccaacgagtacgagatcgagaagctggagaacaccagcagaatcagcgagctgctgggcatcttcgagagcgagaagacctacagcagaaacgtgctggccatggccctgaagaagcagaccgacagagccgccgccggcagccccgtgcagcccgcccccaagcccagcctgagcagaggcctgatggtgaagggcggcagcagcatcatcagccccgacaccaacctgctgaacatcaagggcagccacagcaagagcaagaacctgcacttcttcttcagcaacaccgtgaagatcaccgccttcagcaagaagaacgagaacatcttcaactgcgacctgatcgacagcgtggaccagatcaagaacatgccctgcctggacctgagagagttcggcaaggacgtgaagccctggcacgtggagaccaccgaggccgccagaaacaacgagaacaccggcttcgacgccctgagccacgagtgcaccgccaagcccctgttccccagagtggaggtgcagagcgagcagctgaccgtggaggagcagatcaagagaaacagatgctacagcgacaccgagtag

SEQ ID NO: 35710 - DNA, 2817 bp, Artificial Sequence
  derived and/or modified sequence
atgtttccaatgcagaaaggctcgctgaacttgctccggcaaaagtgggagagctgtgactaccagcgatccgaatgtcaccctcgcgattcccactgtacgatttttcagccacaggagtccaagctactggctcctgagggtgaagtggtgtctgcacctcagtccttagatcctacgtccctgccttacagcacaggggaggagatgtggtcttctaagcccgaggaaaaggattccgttgataagagcaataacacaagggagtacggcaggcccgaagttcttaaggaggattccctgtcaagccggagacgtatcgagagattctccattgctctggatgagctgagatctgtcttcgaggcacccaagtccggaaacaagcctgctgagtatggaggtaaagaggtggaaatcgaacggagtctttgttctcccgcattcaagagccacccggggagccagctcgaggactctgtgaaggactccgacaaaaagggtaaggaaactagctttgacaagatgtctcccgaaagtggacacagccgaatcttcgaagccaccgcaggtcccaacaaaccagagagtggattcgcggaggattctgcagcccggggcgaaggcgtcagtgatctgcatgaagtcgttagcctgaaagagaggatggcacggtaccaggctgcagtttcccggggcgattgcagatccttctccgccaacatgatggaggaatcggagatgtgtgcggttcccggcggcctggcaaaggtcaaaaaacagtttgaggatgagatcacctcttctagaaatacctttgcccagtaccagtaccagcaccaaaataggtctgagcaggaggctattcacagctcacaggtgggaacatcaagatcgtcacaggagatggctaggaatgagcaggaaggcagcaaggttcagaagattgacgtccacggaactgagatggtgagtcacctggaaaagcataccgaggaagtcaatcaggcttctcagtttcaccaatacgttcaggaaacagtaatcgacactcctgaggacgaggagatccccaaggtgagtaccaagttgctgaaggagcaattcgaaaagtccgcacaggaaaagatcctgtatagcgacaaggagatgacaacccccgcaaaacagattaagaagctgttgctgcaggacaaggagatctgcattctgtgccagaagaccgtttatcccatggagtgcttagtggccgataagcaaaatttccacaagtcatgttttcggtgtcatcactgtaacagcaaactgagcctggggaattatgcatctctgcacggccagatctattgtaagccccacttcaaacagctttttaagtctaagggcaactacgacgagggattcggacacaagcaacacaaagaccgttggaattgtaagaaccagtccagatctgtggacttcatccctaacgaggagccaaacatgtgtaagaacattgcagaaaacaccctcgttcctggggatcgcaatgaacacttagacgccggaaactccgaaggacagcggaacgacctgcggaagctcggagaaagaggcaagttaaaggtgatttggcctcccagcaaagaaatcccaaagaaaactctccccttcgaagaggagctcaagatgagtaaaccaaagtggccacccgagatgacgactctcctttcacctgaatttaagagtgaatcacttctggaggatgtgcgcacaccagagaacaagggacagcggcaggatcactttccctttcttcagccctacctgcagtcaactcatgtttgtcaaaaagaagatgtgatcggaataaaagaaatgaaaatgcctgagggtaggaaggacgagaagaaggagggcagaaaaaatgttcaagaccgcccatctgaagccgaagataccaaatcgaaccgtaaatccgctatggacttaaatgacaacaataacgtcatagtgcagtcagccgaaaaggagaagaacgagaaaaccaaccagacgaatggcgccgaagtgctccaagtgactaacactgatgatgagatgatgcctgaaaaccataaagagaacctgaataagaacaacaataataattatgttgccgttagttacctgaacaactgtagacagaagacgtccattctcgaatttctcgacctcttgcccctgtcttccgaagccaacgataccgcaaacgagtatgagatcgagaagctggaaaatacatcgcgcatctctgagttgctcggtatctttgaatctgagaagacatactctagaaatgtgttggccatggctctgaagaagcaaactgaccgggccgcggccgggtcccccgtgcagcctgctccaaagccctctttatcccgtgggttaatggtgaaaggggggtcctccattatctcccccgacactaatttactgaacataaagggaagccattccaagtctaaaaatctgcacttcttcttctctaataccgtcaaaattacagctttttcaaaaaagaacgaaaatatcttcaattgcgatttaatagatagcgtcgaccaaattaaaaacatgccttgccttgacttacgggaatttgggaaagatgtgaaaccttggcacgttgaaacaactgaggcggcacggaacaacgagaatacgggatttgatgcactctcccatgaatgtacggcgaaaccgttattcccgcgggtggaagtccagagcgaacagttaaccgttgaggagcagataaaacgaaacagatgttattcagacaccgaatag

SEQ ID NO: 35711 - DNA, 2817 bp, Artificial Sequence
  derived and/or modified sequence
atgttccccatgcagaaagggtccctcaatctgcttaggcagaagtgggagtcttgcgactatcagagatctgagtgtcacccccgagatagccactgtaccatcttccagccccaggaaagtaaactgctcgcaccggagggagaagtggtgagcgccccacaaagcctcgatcctacaagtctcccctactctacgggagaggaaatgtggagctccaagccagaggaaaaggatagtgtcgacaagtctaataatactcgggagtatggtcggcctgaagtgcttaaggaggacagcctgtctagccgcagacggatcgagaggttcagcattgcgttagatgagttgagaagcgtttttgaagcgcccaaaagcgggaacaagcctgctgaatacggcggcaaagaagtagagatcgagcgctccctctgttctcctgctttcaagtctcaccccggcagccagctggaagatagcgtcaaggattcagataagaagggtaaagagacatcttttgacaaaatgtcacctgaaagtggccattcacgcattttcgaagcgactgcaggtccgaacaagccagaaagcgggttcgccgaagactctgctgcacgaggggagggagtcagcgacctacacgaggtggtgtctctcaaggagaggatggcccgctaccaggccgcagtgtcacggggcgattgtaggtccttctctgcgaacatgatggaggagtctgaaatgtgtgcggtgccggggggcctggctaaggtgaagaaacagttcgaagatgaaatcaccagtagtcgaaacacgttcgctcaataccagtaccagcatcagaacaggtctgagcaggaagcaatacactcatcccaagttggaacatcacgctccagtcaggagatggcccgaaacgagcaggagggatccaaagtgcaaaaaattgatgtccacgggacggagatggtcagtcacctggaaaagcacacagaagaggtgaatcaggccagccagttccaccaatacgtgcaggagacagtcatagacactccagaggatgaggagattccgaaagtctcaaccaagctgctgaaggagcagtttgaaaaatccgcccaggagaagatcctgtatagtgacaaggaaatgacaacccccgcaaagcagattaaaaagctgctattgcaggataaggaaatatgcattctttgtcagaagacagtgtaccccatggagtgtcttgtggcggataaacagaattttcataagtcttgctttaggtgtcaccattgcaacagcaaactgagcctcgggaattacgcctctcttcacggtcaaatctattgcaagccacattttaagcagctgttcaaaagcaaaggtaactacgacgaaggattcggccataaacaacataaggacaggtggaactgcaagaaccaatcgcgttccgtcgactttatcccgaacgaagaaccgaacatgtgcaaaaacatagctgagaataccctggtgccaggcgacaggaacgaacacctggatgcaggtaatagcgagggccaacggaatgacctgaggaagctgggggagcgaggcaagctgaaggtgatttggccacctagcaaggagatccctaagaaaaccttacctttcgaggaggaactgaagatgtctaaacccaaatggccaccagagatgaccactctgcttagccccgagtttaaaagcgaatcactgctcgaggacgtcagaacgccagagaacaagggacaaaggcaagaccattttccttttctccagccatatctccaatccacacatgtctgccaaaaggaagacgtgatcggtattaaggagatgaagatgccagagggacgcaaggacgagaaaaaggaaggaaggaagaacgtgcaagaccgacctagcgaggctgaggataccaagtccaacagaaaaagtgcaatggacctgaatgacaataacaatgtaatcgtccaatccgcagaaaaagagaagaacgagaagacgaatcaaacaaacggagcagaagtgttacaggtcactaatacagacgatgaaatgatgccagagaatcacaaggaaaatctaaataaaaacaacaataacaattatgtggctgtatcatatcttaataactgccggcagaagacctccatccttgagtttttagacctcttacctctctcctctgaggctaacgataccgccaatgaatatgaaattgagaagttggagaacacgtcccggataagtgaactcctcggaattttcgagtccgaaaagacatactctcgaaacgtcctggctatggctcttaagaaacagactgatcgtgcggccgcagggagcccagtccagcctgcaccgaagccctccttgtctagaggcctcatggtgaagggcggtagttccatcatttctcctgacacaaacctgctgaatataaaaggcagtcacagcaagtccaagaacctgcacttttttttctcgaatacagttaaaatcaccgccttttccaaaaaaaacgaaaacattttcaactgcgatcttattgactccgttgatcagattaagaacatgccgtgcttggatctacgggaatttgggaaagacgtgaaaccctggcatgtcgagacgaccgaagccgcacggaataacgagaataccggattcgatgctttgagccatgagtgcacagccaaacccctatttccacgcgttgaggtccagtcagaacagctgacagtggaggagcagataaagagaaacaggtgttattctgataccgagtag

SEQ ID NO: 35712 - DNA, 2817 bp, Artificial Sequence
  derived and/or modified sequence
atgttccccatgcagaagggcagcctgaacctgctgcggcagaagtgggagagctgtgactaccagaggtctgagtgccacccccgggacagccactgcaccatcttccagccccaggagagcaagctgctggcccctgagggggaggtggtgtctgccccccagagcctggaccccaccagcctgccctacagcactggagaggagatgtggagcagcaagccagaggagaaggacagcgtggacaagagcaacaacacccgggagtatggccggcctgaggtgctgaaggaggacagcctgagcagcagaagaagaattgagcgcttcagcatcgccctggatgagctgcggtctgtgtttgaggcccccaagagcggcaacaagccagcagaatatggaggcaaggaggtggagattgaaagaagcctgtgcagccctgccttcaagagccaccctggcagccagctggaggacagcgtgaaggacagcgacaagaagggcaaggagaccagctttgacaagatgagccctgagagcggccacagccgcatctttgaggccacagctggccccaacaagccagagagcggctttgctgaagattctgctgcccggggggagggcgtgtctgacctgcacgaggtggtgtccctgaaggagaggatggcccgctaccaggccgctgtgtccagaggagactgccgctccttcagcgccaacatgatggaggagagcgagatgtgtgctgtgcctgggggcctggccaaggtgaagaagcagtttgaagatgagatcaccagcagcaggaacacctttgcccagtaccagtaccagcaccagaacagaagtgagcaggaggccatccacagcagccaggtgggcaccagccgcagcagccaggagatggccagaaatgagcaggagggcagcaaggtgcagaagattgatgtgcatggaacagagatggtgagccacctggagaagcacacagaggaggtgaaccaggccagccagttccaccagtatgtgcaggagaccgtgattgacaccccagaagatgaggagatccccaaggtgtccaccaagctgctgaaggagcagtttgagaagagcgcccaggagaagatcctgtacagcgacaaggagatgaccaccccagccaagcagatcaagaagctgctgctgcaggacaaggagatctgcatcctgtgccagaagacagtgtaccccatggagtgcctggtggccgacaagcagaacttccacaagagctgcttccgctgccaccactgcaacagcaagctgagcctgggcaactatgccagcctgcacggccagatctactgcaagccccacttcaagcagctgttcaagagcaaaggaaattatgatgagggcttcggccacaagcagcacaaggaccgctggaactgcaagaaccagagccgctctgtggacttcatccccaatgaggagcccaacatgtgcaagaacattgctgagaacaccctggtgcctggggacagaaatgagcacctggatgctggcaacagcgagggccagagaaatgacctgaggaagctgggggagcggggcaagctgaaggtgatctggccacccagcaaggagatccccaagaagaccctgccctttgaggaggagctgaagatgagcaagcccaagtggcccccagagatgaccaccctgctgagccctgagttcaagtctgagagcctgctggaggatgtgaggaccccagagaacaagggccagaggcaggaccacttccccttcctgcagccctacctgcagagcacccacgtgtgccagaaggaggatgtgattggcatcaaggagatgaagatgcctgagggcaggaaggatgagaagaaggagggcaggaagaatgtgcaggaccggcccagcgaggccgaggacaccaagagcaacaggaagagcgccatggacctgaatgacaacaacaacgtgattgtgcagagcgctgagaaggagaagaatgagaagaccaaccagaccaatggagctgaggtgctgcaggtgaccaacacagatgatgagatgatgcctgagaaccacaaggagaacctgaacaagaacaacaacaacaactacgtggccgtgtcctacctgaacaactgccggcagaagaccagcatcctggagttcctggacctgctgcccctgagcagcgaggccaatgacacagccaatgaatatgaaattgagaagctggagaacaccagccgcatcagcgagctgctgggcatctttgaaagtgagaagacctacagcagaaatgtgctggccatggccctgaagaagcagacagacagagctgctgctggcagccctgtgcagcctgcccccaagcccagcctgagccggggcctgatggtgaagggcggcagcagcatcatcagcccagacaccaacctgctgaacatcaagggcagccacagcaagagcaagaacctgcacttcttcttcagcaacacagtgaagatcacagccttcagcaagaagaatgaaaacatcttcaactgtgacctgattgattctgtggaccagatcaagaacatgccctgcctggacctgcgggagtttgggaaggatgtgaagccctggcacgtggagaccacagaggccgccaggaacaatgaaaatactggatttgatgccctgagccatgaatgtacagccaagcccctcttcccccgggtggaggtgcagagcgagcagctgactgtggaggagcagatcaagaggaaccgctgctacagcgacacagaatag

SEQ ID NO: 35713 - DNA, 2817 bp, Artificial Sequence
  derived and/or modified sequence
atgttccccatgcagaagggcagcctgaacctgctgcggcagaagtgggagtcgtgcgattaccagagaagcgaatgtcaccctagagacagccactgcactatctttcagcctcaggaatccaagctgctggcccctgagggagaggtggtttctgctccgcaatccctcgatccgaccagtttgccttatagcactggcgaagaaatgtggtcaagtaaacctgaggagaaggacagcgtcgacaaatcaaataacacccgagagtatggtaggccagaagtgctcaaagaggattcactgtcctccagacgccgaatagaaaggtttagcatagcattggacgaactacgatctgtatttgaagctccaaagagtggtaacaagcctgccgaatacggcgggaaggaagtagagatcgagagaagtttatgtagtccggccttcaaatcccatcccggctcgcagctggaggattccgtaaaagactcagataagaaagggaaagaaacctcctttgacaagatgagcccggagagtggtcattcgcgtatcttcgaagctaccgccggccccaataagccagagagcggcttcgccgaggacagtgccgcccgcggagagggagtaagcgatctgcacgaagtggtgtccctaaaagaaaggatggcaaggtaccaggctgccgttagtagaggcgattgtcgatccttctccgcgaatatgatggaagagtctgagatgtgcgccgttcctggaggcctggccaaagtgaagaaacagtttgaagacgagatcacctcatcacgcaacaccttcgcccagtaccagtatcagcaccagaatagatccgaacaggaagccatccactccagtcaagtcggaaccagcagaagttctcaggaaatggcccggaacgaacaggaagggagtaaggtgcaaaaaatcgacgtgcacggcactgagatggtgagtcatctggaaaaacataccgaggaggtcaatcaggccagccagttccaccagtatgtgcaggagaccgttatagacacacccgaggatgaggagattcccaaagttagtacaaagttgctgaaggaacagtttgagaagtccgcccaagagaaaatcttgtactccgataaggagatgacgacgcctgcaaagcagataaaaaagcttcttctccaagataaagagatctgtatcctttgccaaaaaaccgtatacccaatggagtgtcttgtggccgataaacaaaactttcacaaaagctgcttccggtgtcatcactgtaactcaaagttatctcttggcaattatgcctcacttcatggtcagatttattgcaagcctcattttaagcagcttttcaaatccaagggaaattatgacgaaggcttcggacacaaacaacacaaagacagatggaattgtaagaatcagtcaaggtcagtggatttcattccaaacgaggaacctaacatgtgtaagaacatcgcagagaatactctggtgcccggcgatcgtaacgagcacctggacgccgggaatagtgaaggccaacgaaacgaccttagaaaactgggcgagagaggcaagctaaaagtgatatggccccctagcaaagagattcctaagaaaactctgccattcgaggaggaacttaaaatgtcaaaacctaagtggccgcctgagatgaccacactcctgtctccggaattcaaaagcgaatcccttcttgaagacgtaagaacgccagaaaacaagggtcagagacaggatcactttcccttcctacaaccctatctccagagtacacacgtgtgtcaaaaagaggacgtgattgggattaaagagatgaagatgcctgagggccggaaagatgaaaagaaagaagggagaaaaaatgttcaggaccgacccagcgaagccgaggacaccaagagcaatagaaaaagcgcaatggaccttaacgataacaataatgtaattgtccagtctgctgaaaaggagaaaaatgaaaagaccaatcaaacaaacggggccgaggtgttgcaggtcacaaataccgacgacgaaatgatgccagaaaatcacaaggagaacttgaacaaaaacaacaataacaactatgtcgccgtctcttacctcaataattgtcgacagaaaacctcaatactggaatttctggaccttctgcctttatcgagcgaagcaaatgatactgccaatgagtacgagatcgaaaaactggagaacacttccaggataagtgaacttctgggcatcttcgaaagcgaaaagacatactcccgcaatgtgctggcaatggctctgaaaaaacagacagaccgagccgcagccgggtcacccgtgcagcccgctcctaagccaagtctcagcagaggcctcatggttaaaggaggctccagcatcataagcccagatacaaacctcctgaatatcaaaggaagccacagtaagagcaagaatctccacttttttttctcaaacaccgtcaagatcacagccttttcgaagaaaaatgagaacatcttcaattgcgatttaatcgactcagtagatcagatcaagaacatgccttgtctggacttgagagagttcggaaaggacgtcaaaccttggcatgtggagactacggaagccgcaaggaataatgaaaacaccgggtttgatgcactcagccatgagtgtaccgccaagccgctcttcccgagggttgaagttcagagtgaacaattaacagtcgaggagcaaatcaaacggaaccgatgttattccgatacagaatag

SEQ ID NO: 35714 - DNA, 2817 bp, Artificial Sequence
  derived and/or modified sequence
atgttccccatgcagaagggcagcctgaacctgctgcggcagaagtgggagtcttgcgactaccagcgaagcgaatgccacccccgggacagccactgtacgattttccaaccacaggagtctaaactgctggcccccgagggtgaggtggtgtccgcaccacagagtttagacccaacatccctgccgtactcaacaggcgaggaaatgtggagttccaaacctgaagagaaagactccgttgacaagagcaacaacacccgtgagtatgggagacccgaagtgcttaaggaggactcccttagtagcaggaggcggattgaacggttttctattgctctggacgagttgcgttccgtcttcgaagcccccaaatctggaaacaagcccgccgagtacggaggcaaggaagtggaaatcgagcgcagcctatgttcccctgccttcaagtctcaccccggatcccaactcgaggattccgtcaaggactcagataaaaaaggaaaggaaacaagcttcgataagatgtcacctgagagcggccacagccggatcttcgaagccactgcagggcccaacaagccagagtcagggttcgcagaggactctgccgctcggggggaaggcgtgtctgatttacacgaggtcgtatccctgaaagaacgtatggctagatatcaggctgcggtctcacggggcgattgtcgtagtttttccgccaatatgatggaagaaagtgaaatgtgtgctgtgccgggggggttggctaaagtgaaaaagcaattcgaggatgagatcacgtcttcccgcaacacatttgcccagtaccaatatcaacaccaaaaccgctctgaacaagaagctatccacagctcccaagtgggcacaagtcgctcttcccaagaaatggcgcggaacgagcaggaaggatcaaaagttcaaaagattgatgtccatggaacagagatggtatctcatctggagaagcacactgaggaggtgaaccaggccagtcagtttcatcagtacgtacaagagacagttatagatactcctgaggatgaagagatacccaaggtgtcaacaaagctcctgaaggagcagttcgaaaaatctgcgcaggagaagattctgtattccgacaaggagatgacaacccctgccaaacaaatcaaaaagctattactccaagataaagagatttgtatattgtgccagaagactgtttaccctatggagtgcttagtggctgataagcagaactttcacaagtcttgctttagatgtcatcattgtaatagtaaactctcactcggcaattatgccagcttgcatggacaaatctactgtaaaccacactttaagcaattgtttaaaagcaaggggaactacgatgagggatttggccataagcagcataaagatcgatggaattgcaaaaaccaaagccgtagtgtcgacttcattccgaatgaggagccaaatatgtgcaagaatattgccgaaaacactctggtacctggggataggaatgaacaccttgacgccgggaattccgagggacagcgcaacgatctccggaagttaggagaacgtggcaagctgaaagttatttggccccccagcaaggagatacctaaaaagaccctcccattcgaggaagagctcaaaatgagcaagccaaaatggcccccggaaatgaccaccctccttagccctgaatttaagtctgagtccctgcttgaggatgtcaggacacccgagaacaaaggccagaggcaggaccacttcccattcctgcagccgtacttgcagagtacacacgtatgtcagaaggaggacgttattggaatcaaggagatgaaaatgcctgaaggtcgaaaagacgagaagaaggaaggtcgaaaaaatgtgcaagatcgtcccagtgaggctgaagacaccaagtctaatcggaagagcgctatggatttaaatgacaacaataatgtcatcgttcagtccgctgagaaagagaaaaatgaaaagactaaccaaacaaacggggctgaggttctccaggtgacgaacaccgacgacgagatgatgcccgagaaccacaaagaaaacttgaataaaaacaataacaacaattatgtggcggtctcctatttgaataactgtcggcagaaaacgtcgatcctggaattccttgacctcctgccgcttagcagcgaggctaacgatacagctaacgagtacgaaattgaaaaactcgaaaacacctctcgcattagcgagctactggggatcttcgaaagtgagaagacatatagccgcaacgtgctggcaatggcactgaagaaacagacggaccgcgctgctgcaggctctcctgtgcagccagcacccaagccctcgctgagtcgaggcctgatggtgaaaggtggaagcagtattatttccccagacacgaacctgctcaatataaaaggctcccattccaagtctaagaatctgcacttttttttcagcaacaccgtcaagatcaccgccttcagtaagaagaacgaaaatatcttcaattgcgatctgatagactccgttgaccagattaaaaacatgccgtgcctggacctccgcgagtttgggaaagacgtgaagccctggcatgtagagactactgaggctgccaggaacaatgaaaatacagggtttgacgccttgtcacacgagtgtacggcgaagccactcttccctcgagtagaggttcaatcagaacagctcaccgtggaggagcagatcaagcggaatcggtgctattcagatactgaatag

SEQ ID NO: 35715 - DNA, 2817 bp, Artificial Sequence
  derived and/or modified sequence
atgttccctatgcagaagggatctctgaacttgctgagacagaagtgggagtcttgcgactatcagcgctctgagtgtcaccctagggactctcattgcactattttccagccccaggagtcaaagctcttagcaccagagggggaagtggtcagcgcaccacagtctctggaccccacatcactaccatacagtaccggagaagagatgtggtcctctaaaccagaagaaaaggatagcgtggataagagcaacaacacccgcgaatatgggagacccgaggtgctaaaagaggactcactgtcatctagacggcgaatcgagaggtttagtatagctctcgatgaacttcgaagcgtatttgaggcccctaaatcagggaataaacctgcagaatacgggggtaaggaagtcgagatagagcgtagcctttgctcccccgcttttaagtcgcaccctggctctcagctagaagattctgtgaaggactcagataaaaaaggtaaagagacatccttcgacaagatgagtccggagagcggtcattcccgcatcttcgaagcaaccgctggccctaataagccagagtctggattcgctgaggactccgcagcgaggggcgaaggtgtgtccgatttgcatgaagtggtgtccctcaaggagcggatggccagatatcaagcggcagtgtccaggggcgattgccgcagcttctccgccaacatgatggaagaatccgagatgtgtgccgtgccagggggtttggccaaggttaagaaacaatttgaggacgaaattacaagctcaagaaatacatttgcgcagtaccagtaccaacaccaaaatcgaagtgaacaagaggctattcactccagccaggttgggacatcaagatcatctcaggagatggctagaaatgagcaagaaggatcaaaagtccagaagatagacgtccatggcacagagatggtgtcccatctcgagaagcatacagaagaagttaaccaggcatcgcagtttcaccaatacgtccaggaaacagtcatcgacacccccgaagatgaggaaattcctaaggtgagcactaagctgctgaaagaacagtttgagaaaagtgcacaggaaaaaattttgtattcagataaagaaatgactacaccggcaaaacagatcaagaaattgctcttacaggacaaagaaatttgtatcctctgtcaaaagactgtttatccaatggaatgtctggtggcagataaacagaacttccataagtcatgctttcgctgccaccactgtaactcaaagttgtctctcggaaattatgccagccttcacggtcagatttactgcaaaccgcactttaagcaactcttcaagtccaagggcaattacgacgagggatttgggcataaacaacataaagatcgctggaactgtaaaaatcagtcccggtcagtagacttcatcccgaatgaagagccaaacatgtgcaaaaatatcgccgagaatactctggtcccaggagaccgaaatgaacatctggatgctggcaatagcgaggggcagcgtaatgacctgaggaagttgggggagagaggtaagctcaaagtgatctggccgcctagtaaggagatccccaaaaaaaccctcccgtttgaagaagagctgaagatgtcaaagcccaaatggcccccagagatgaccacattattatcccccgagttcaaaagtgagtctctgctggaagatgtccgcacccccgagaacaagggccagagacaggaccactttccctttctgcagccatatctccagtcgacccatgtgtgccagaaggaagacgtgatcggtattaaggaaatgaaaatgcctgaaggaagaaaagacgaaaagaaggagggcagaaagaatgtccaggaccggccttctgaagctgaggatacgaaatcgaacaggaaatccgctatggatttgaacgacaacaacaacgttatcgtgcagtctgccgaaaaggagaagaacgaaaaaaccaaccagacaaatggggcagaggtccttcaggtgacaaacacagacgacgagatgatgcctgagaatcataaagaaaacctgaacaaaaataacaacaacaattacgtcgcagttagctatctgaataactgccggcagaaaacaagtatcctagagtttctggacctcctgccactctccagtgaggccaatgacaccgcaaatgagtacgaaattgagaagctggagaataccagccggattagtgagttgctggggatattcgagagcgaaaagacatacagtcgcaatgtcctggctatggcacttaagaaacaaacagatcgcgctgccgctggcagccccgtccaacccgctcccaaaccgtcactaagtagaggcctcatggtcaaaggaggatcatccattatctcccccgataccaaccttctcaacatcaaaggcagccattcaaagagtaaaaacctacacttttttttctcaaatactgttaagattactgcttttagcaagaagaatgagaatatcttcaactgtgatctcatcgactctgttgaccagattaaaaacatgccctgtcttgatctgagagaattcggcaaagatgtgaagccgtggcacgtagagaccacagaagctgccagaaacaatgaaaatacgggctttgacgccttaagtcatgagtgtaccgccaaacctctcttcccaagggtcgaagttcagtccgaacagctcacagttgaggaacagataaagagaaatcggtgttacagcgacactgagtag

SEQ ID NO: 35716 - DNA, 2817 bp, Artificial Sequence
  derived and/or modified sequence
atgtttcctatgcagaaggggagccttaatcttctgaggcagaaatgggagagctgcgactaccagagaagtgaatgtcaccctagggactcacactgcacaattttccagccgcaggagagtaaattgctggccccagagggtgaagtggtgtccgcgccacaatcactggatcccacctctctgccctacagtacaggagaagaaatgtggtccagtaagcccgaggagaaggattctgtcgataaatcaaacaatacaagagaatatgggaggccggaggtgttaaaagaagacagcttatccagcaggcgtaggatcgagcgattttcaattgccctggatgagttacgcagtgtgtttgaagcccctaaatcgggaaacaagcccgctgagtacggaggcaaagaggttgagattgagaggtccctgtgctctccagcttttaagtcccaccctggttcacagcttgaggactccgtgaaagacagcgataaaaaagggaaggagacctcattcgacaaaatgagtccagaatccggtcatagccggatcttcgaagctacagctggtcccaacaaacctgaatcaggtttcgcagaagacagtgcagccagaggtgaaggcgtctctgatctccacgaagttgtcagcctcaaagagagaatggccagataccaggctgcagtgtcccgcggtgactgtcggagctttagcgcgaacatgatggaggagagtgagatgtgcgcagtaccagggggactggccaaggttaagaagcaattcgaggatgaaattaccagctcacgaaacacatttgctcagtaccagtatcagcatcagaatagatcggagcaagaggctatccacagttcccaggtgggcactagtagatcctctcaagaaatggccaggaacgaacaggaaggatccaaagttcagaagattgacgtgcacggtacagagatggtgagccacttagagaaacacaccgaggaggttaaccaggcttcacagtttcatcagtacgtgcaagagactgtcatcgacacgccagaggacgaagagatccccaaggtttcaaccaagctcctcaaggagcaatttgagaagtctgcccaagagaaaatactatattccgacaaagagatgaccaccccggcaaagcagattaagaaactgctgctgcaggataaggagatttgtattctttgccagaaaaccgtttaccccatggagtgcttagtcgcggacaagcaaaattttcataaatcttgttttcggtgtcatcactgcaatagtaaactttcactagggaactacgcctccctgcacggccagatttactgtaaacctcactttaagcagctcttcaaaagcaagggcaattatgacgaaggttttggacataaacagcacaaagaccggtggaactgtaaaaatcagagccggagcgttgactttattcccaatgaggagcctaacatgtgtaagaacatcgctgagaatactctcgttccaggggaccgaaatgaacacctcgacgcagggaacagtgaggggcagcgcaacgacctgcggaaactgggcgagcggggtaaattaaaggttatatggcccccttctaaggagattccaaaaaagaccctcccttttgaggaagagttgaaaatgagcaagcctaagtggccccctgaaatgacaacactgctctctcccgaattcaagtccgaatctctccttgaagacgtgcggacgcctgaaaacaaagggcaaaggcaggaccatttccccttccttcaaccctaccttcagtctacacacgtgtgtcagaaagaggacgtcattggcattaaggagatgaagatgccggagggacgcaaagatgaaaagaaggaaggcaggaagaatgtgcaggacagaccttccgaggcagaggatacgaaaagcaatcgcaaatccgcaatggacctgaacgataacaacaacgtcattgttcagtccgctgagaaagagaaaaacgaaaaaactaaccagacgaatggcgcagaggtgctccaagttacgaacacagatgatgagatgatgcctgagaatcacaaggagaatctcaacaaaaacaacaataataattacgtggcagtttcttatctgaataactgcagacagaagacatccatactggagttcctggacttactgccattaagctcagaggccaatgacacagctaacgaatacgaaatcgagaagctggagaatacaagccgaatttctgaattactcggcatttttgagagcgagaaaacgtattcccgcaacgtgttagcaatggcactgaaaaagcagaccgatcgggcagcagccggatctcccgtgcagcccgcaccgaagccaagcctatctcggggtctgatggtcaagggcggttcctccatcattagccccgacactaacctgctcaacatcaaggggagccactctaagtccaaaaacctgcactttttcttcagtaacactgttaagatcaccgccttcagtaagaagaacgaaaatatcttcaactgcgaccttattgattctgtggaccagatcaagaacatgccgtgcttggatctccgtgaattcgggaaggatgtaaaaccatggcatgtcgagactacagaggccgctaggaataatgaaaacaccgggttcgacgcgctgagtcacgagtgcacagccaagcctctttttccaagggtggaggtgcagagcgagcagctgaccgtggaagagcaaattaaaaggaataggtgttactccgatacagagtag

SEQ ID NO: 35717 - DNA, 3292 bp, Artificial Sequence
  derived and/or modified sequence
ggagaaatctggcaggtctctaggcagacaaaagggaacatctggtagggactgggacatgtagaaaaaaggacaacctggacccatccatgttcccaatgcagaagggctccctcaacctcctgaggcagaaatgggaatcttgtgattatcagagaagtgagtgtcatcccagggacagccattgtacaattttccagcctcaggaaagcaaattgcttgcgcctgaaggagaggtagtatcagcacctcaatctttggatcccacaagtctgccctacagtacaggggaagagatgtggagttcgaagccggaagagaaggattctgtggacaagagtaacaacaccagggaatatggtcggccagaagtgctgaaggaggattccctgagcagtcggcgcaggattgaacgcttttccattgcccttgatgagctgaggagtgtgtttgaggctcctaagagtggaaacaaaccagctgagtacggtggaaaggaagtggaaattgagcgaagtttgtgctcgccagcttttaagagtcaccctgggagccagctggaggattctgtgaaagattcagacaagaaaggcaaggaaacatcttttgacaagatgtcacctgaaagtggtcacagccgcatctttgaagcgactgctggccctaataagcctgagagtggatttgcagaagacagtgctgctcggggcgagggtgtgtcagacctccacgaagtggtctccctgaaggagcggatggcgaggtaccaggcagctgtttccaggggtgactgccgcagcttctctgctaatatgatggaagaatcagaaatgtgcgcagtgcctggtggtttggccaaggtgaagaaacaatttgaggacgaaattacttcttcccgtaatacctttgctcaataccaatatcaacatcagaacagatctgagcaggaggcaattcatagcagccaggttggcacttcaagaagcagccaggaaatggcaagaaatgaacaagaagggtccaaagtacagaaaattgatgttcatggaacagaaatggtctctcatcttgaaaagcacaccgaggaagtaaaccaagcatctcagtttcatcaatatgttcaagaaactgtcattgatacacctgaggatgaagagattccaaaggtttcgactaagttgttaaaagagcagtttgaaaagtctgcccaggaaaagatcctttattctgacaaagagatgacaaccccagccaagcagattaagaagctgctgctccaagacaaggaaatatgtatactttgtcaaaagacagtttatccaatggagtgcctagtggcagacaagcagaattttcataagtcctgcttccgatgccaccattgcaacagtaaactaagtttgggaaattatgcatcacttcatggacaaatatactgtaaacctcactttaaacaacttttcaaatccaaaggaaattatgatgaaggttttggacataagcagcataaagatagatggaactgcaaaaaccaaagcagatcagtggactttattcctaatgaagaaccaaatatgtgtaaaaatattgcagaaaacacccttgtacctggagatcgtaatgaacatttagatgctggtaacagtgaagggcaaaggaatgatttgagaaaattaggggaaaggggaaaattaaaagtcatttggcctccttccaaggagatccctaagaaaaccttaccctttgaggaagagctcaaaatgagtaaacctaagtggccacctgaaatgacaaccctgctatcccctgaatttaaaagtgaatctctgctagaagatgttagaactccagaaaataaaggacaaagacaagatcactttccatttttgcagccttatctacagtccacccatgtttgtcagaaagaggatgttataggaatcaaagaaatgaaaatgcctgaaggaagaaaagatgaaaagaaggaaggaaggaagaatgtgcaagataggccgagtgaagctgaagacacaaagagtaacaggaaaagtgctatggatcttaatgacaacaataatgtgattgtgcagagtgctgaaaaggagaaaaatgaaaaaactaaccaaactaatggtgcagaagttttacaggttactaacactgatgatgagatgatgccagaaaatcataaagaaaatttgaataagaataataataacaattatgtagcagtctcatatctgaataattgcaggcagaagacatctattttagaatttcttgatctattacccttgtcgagtgaagcaaatgacactgcaaatgaatatgaaattgagaagttagaaaatacatctagaatctcagagttacttggtatatttgaatctgaaaagacttattcgaggaatgtactagcaatggctctgaagaaacagactgacagagcagctgctggcagtcctgtgcagcctgctccaaaaccaagcctcagcagaggccttatggtaaaggggggaagttcaatcatctctcctgatacaaatctcttaaacattaaaggaagccattcaaagagcaaaaatttacactttttcttttctaacaccgtgaaaatcactgcattttccaagaaaaatgagaacattttcaattgtgatttaatagattctgtagatcaaattaaaaatatgccatgcttggatttaagggaatttggaaaggatgttaaaccttggcatgttgaaacaacagaagctgcccgcaataatgaaaacacaggttttgatgctctgagccatgaatgtacagctaagcctttgtttcccagagtggaggtgcagtcagaacaactcacggtggaagagcagattaaaagaaacaggtgctacagtgacactgagtaaaatatctatggccactgacagtccacacttaggcactgagagatattgatgttctgaaataagattttatgaatttggatacccttttgaggaacttgatgtaaacatggtgttcagaaatctcgtgtctatctcaatgggatatttcttgtattacaccttgtcatttttttcacaatttatttacatctacttttgtttgaactggaatgaagagatgaaacactatggatatgttttccattcaaatggcactttagcatattgttctgttttcctgtaaaacatcatgggtgtgatttttatactgctgctgcttgtcacaattattataacttctctgtaatttcctctgaaataaaattgaatcacctgaggtgcaaacc

SEQ ID NO: 35718 - DNA, 2890 bp, Artificial Sequence
  derived and/or modified sequence
atacagagctcagttcctaaaaataggtgccaagttgcatcctttagacgctctgctaaaataaattcagccgtcccatctacttgcttgatagacccttcagtggagcgggcctccactgcacccattgctttcaggggactgggaaattggctgtacatgaaacaagggaggaagctagtctgtgaagaactataaagatatatgatatttccacaaacttggggttaaacctaaatatcataaaagcgactgctggccctaataagcctgagagtggatttgcagaagacagtgctgctcggggcgagggtgtgtcagacctccacgaagtggtctccctgaaggagcggatggcgaggtaccaggcagctgtttccaggggtgactgccgcagcttctctgctaatatgatggaagaatcagaaatgtgcgcagtgcctggtggtttggccaaggtgaagaaacaatttgaggacgaaattacttcttcccgtaatacctttgctcaataccaatatcaacatcagaacagatctgagcaggaggcaattcatagcagccaggttggcacttcaagaagcagccaggaaatggcaagaaatgaacaagaagggtccaaagtacagaaaattgatgttcatggaacagaaatggtctctcatcttgaaaagcacaccgaggaagtaaaccaagcatctcagtttcatcaatatgttcaagaaactgtcattgatacacctgaggatgaagagattccaaaggtttcgactaagttgttaaaagagcagtttgaaaagtctgcccaggaaaagatcctttattctgacaaagagatgacaaccccagccaagcagattaagaagctgctgctccaagacaaggaaatatgtatactttgtcaaaagacagtttatccaatggagtgcctagtggcagacaagcagaattttcataagtcctgcttccgatgccaccattgcaacagtaaactaagtttgggaaattatgcatcacttcatggacaaatatactgtaaacctcactttaaacaacttttcaaatccaaaggaaattatgatgaaggttttggacataagcagcataaagatagatggaactgcaaaaaccaaagcagatcagtggactttattcctaatgaagaaccaaatatgtgtaaaaatattgcagaaaacacccttgtacctggagatcgtaatgaacatttagatgctggtaacagtgaagggcaaaggaatgatttgagaaaattaggggaaaggggaaaattaaaagtcatttggcctccttccaaggagatccctaagaaaaccttaccctttgaggaagagctcaaaatgagtaaacctaagtggccacctgaaatgacaaccctgctatcccctgaatttaaaagtgaatctctgctagaagatgttagaactccagaaaataaaggacaaagacaagatcactttccatttttgcagccttatctacagtccacccatgtttgtcagaaagaggatgttataggaatcaaagaaatgaaaatgcctgaaggaagaaaagatgaaaagaaggaaggaaggaagaatgtgcaagataggccgagtgaagctgaagacacaaagagtaacaggaaaagtgctatggatcttaatgacaacaataatgtgattgtgcagagtgctgaaaaggagaaaaatgaaaaaactaaccaaactaatggtgcagaagttttacaggttactaacactgatgatgagatgatgccagaaaatcataaagaaaatttgaataagaataataataacaattatgtagcagtctcatatctgaataattgcaggcagaagacatctattttagaatttcttgatctattacccttgtcgagtgaagcaaatgacactgcaaatgaatatgaaattgagaagttagaaaatacatctagaatctcagagttacttggtatatttgaatctgaaaagacttattcgaggaatgtactagcaatggctctgaagaaacagactgacagagcagctgctggcagtcctgtgcagcctgctccaaaaccaagcctcagcagaggccttatggtaaaggggggaagttcaatcatctctcctgatacaaatctcttaaacattaaaggaagccattcaaagagcaaaaatttacactttttcttttctaacaccgtgaaaatcactgcattttccaagaaaaatgagaacattttcaattgtgatttaatagattctgtagatcaaattaaaaatatgccatgcttggatttaagggaatttggaaaggatgttaaaccttggcatgttgaaacaacagaagctgcccgcaataatgaaaacacaggttttgatgctctgagccatgaatgtacagctaagcctttgtttcccagagtggaggtgcagtcagaacaactcacggtggaagagcagattaaaagaaacaggtgctacagtgacactgagtaaaatatctatggccactgacagtccacacttaggcactgagagatattgatgttctgaaataagattttatgaatttggatacccttttgaggaacttgatgtaaacatggtgttcagaaatctcgtgtctatctcaatgggatatttcttgtattacaccttgtcatttttttcacaatttatttacatctacttttgtttgaactggaatgaagagatgaaacactatggatatgttttccattcaaatggcactttagcatattgttctgttttcctgtaaaacatcatgggtgtgatttttatactgctgctgcttgtcacaattattataacttctctgtaatttcctctgaaataaaattgaatcacctgaggtgcaaacc

SEQ ID NO: 35719 - DNA, 3221 bp, Artificial Sequence
  derived and/or modified sequence
gacaacctggacccatccatgttcccaatgcagaagggctccctcaacctcctgaggcagaaatgggaatcttgtgattatcagagaagtgagtgtcatcccagggacagccattgtacaattttccagcctcaggaaagcaaattgcttgcgcctgaaggagaggtagtatcagcacctcaatctttggatcccacaagtctgccctacagtacaggggaagagatgtggagttcgaagccggaagagaaggattctgtggacaagagtaacaacaccagggaatatggtcggccagaagtgctgaaggaggattccctgagcagtcggcgcaggattgaacgcttttccattgcccttgatgagctgaggagtgtgtttgaggctcctaagagtggaaacaaaccagctgagtacggtggaaaggaagtggaaattgagcgaagtttgtgctcgccagcttttaagagtcaccctgggagccagctggaggattctgtgaaagattcagacaagaaaggcaaggaaacatcttttgacaagatgtcacctgaaagtggtcacagccgcatctttgaagcgactgctggccctaataagcctgagagtggatttgcagaagacagtgctgctcggggcgagggtgtgtcagacctccacgaagtggtctccctgaaggagcggatggcgaggtaccaggcagctgtttccaggggtgactgccgcagcttctctgctaatatgatggaagaatcagaaatgtgcgcagtgcctggtggtttggccaaggtgaagaaacaatttgaggacgaaattacttcttcccgtaatacctttgctcaataccaatatcaacatcagaacagatctgagcaggaggcaattcatagcagccaggttggcacttcaagaagcagccaggaaatggcaagaaatgaacaagaagggtccaaagtacagaaaattgatgttcatggaacagaaatggtctctcatcttgaaaagcacaccgaggaagtaaaccaagcatctcagtttcatcaatatgttcaagaaactgtcattgatacacctgaggatgaagagattccaaaggtttcgactaagttgttaaaagagcagtttgaaaagtctgcccaggaaaagatcctttattctgacaaagagatgacaaccccagccaagcagattaagaagctgctgctccaagacaaggaaatatgtatactttgtcaaaagacagtttatccaatggagtgcctagtggcagacaagcagaattttcataagtcctgcttccgatgccaccattgcaacagtaaactaagtttgggaaattatgcatcacttcatggacaaatatactgtaaacctcactttaaacaacttttcaaatccaaaggaaattatgatgaaggttttggacataagcagcataaagatagatggaactgcaaaaaccaaagcagatcagtggactttattcctaatgaagaaccaaatatgtgtaaaaatattgcagaaaacacccttgtacctggagatcgtaatgaacatttagatgctggtaacagtgaagggcaaaggaatgatttgagaaaattaggggaaaggggaaaattaaaagtcatttggcctccttccaaggagatccctaagaaaaccttaccctttgaggaagagctcaaaatgagtaaacctaagtggccacctgaaatgacaaccctgctatcccctgaatttaaaagtgaatctctgctagaagatgttagaactccagaaaataaaggacaaagacaagatcactttccatttttgcagccttatctacagtccacccatgtttgtcagaaagaggatgttataggaatcaaagaaatgaaaatgcctgaaggaagaaaagatgaaaagaaggaaggaaggaagaatgtgcaagataggccgagtgaagctgaagacacaaagagtaacaggaaaagtgctatggatcttaatgacaacaataatgtgattgtgcagagtgctgaaaaggagaaaaatgaaaaaactaaccaaactaatggtgcagaagttttacaggttactaacactgatgatgagatgatgccagaaaatcataaagaaaatttgaataagaataataataacaattatgtagcagtctcatatctgaataattgcaggcagaagacatctattttagaatttcttgatctattacccttgtcgagtgaagcaaatgacactgcaaatgaatatgaaattgagaagttagaaaatacatctagaatctcagagttacttggtatatttgaatctgaaaagacttattcgaggaatgtactagcaatggctctgaagaaacagactgacagagcagctgctggcagtcctgtgcagcctgctccaaaaccaagcctcagcagaggccttatggtaaaggggggaagttcaatcatctctcctgatacaaatctcttaaacattaaaggaagccattcaaagagcaaaaatttacactttttcttttctaacaccgtgaaaatcactgcattttccaagaaaaatgagaacattttcaattgtgatttaatagattctgtagatcaaattaaaaatatgccatgcttggatttaagggaatttggaaaggatgttaaaccttggcatgttgaaacaacagaagctgcccgcaataatgaaaacacaggttttgatgctctgagccatgaatgtacagctaagcctttgtttcccagagtggaggtgcagtcagaacaactcacggtggaagagcagattaaaagaaacaggtgctacagtgacactgagtaaaatatctatggccactgacagtccacacttaggcactgagagatattgatgttctgaaataagattttatgaatttggatacccttttgaggaacttgatgtaaacatggtgttcagaaatctcgtgtctatctcaatgggatatttcttgtattacaccttgtcatttttttcacaatttatttacatctacttttgtttgaactggaatgaagagatgaaacactatggatatgttttccattcaaatggcactttagcatattgttctgttttcctgtaaaacatcatgggtgtgatttttatactgctgctgcttgtcacaattattataacttctctgtaatttcctctgaaataaaattgaatcacctgaggtgcaaacc

SEQ ID NO: 35720 - protein, 1263 aa, Artificial Sequence
  derived and/or modified sequence
MEPPGGSLGPGRGTRDKKKGRSPDELPSAGGDGGKSKKFLERFTSMRIKKEKEKPNSAHRNSSASYGDDPTAQSLQDVSDEQVLVLFEQMLLDMNLNEEKQQPLREKDIIIKREMVSQYLYTSKAGMSQKESSKSAMMYIQELRSGLRDMPLLSCLESLRVSLNNNPVSWVQTFGAEGLASLLDILKRLHDEKEETAGSYDSRNKHEIIRCLKAFMNNKFGIKTMLETEEGILLLVRAMDPAVPNMMIDAAKLLSALCILPQPEDMNERVLEAMTERAEMDEVERFQPLLDGLKSGTTIALKVGCLQLINALITPAEELDFRVHIRSELMRLGLHQVLQDLREIENEDMRVQLNVFDEQGEEDSYDLKGRLDDIRMEMDDFNEVFQILLNTVKDSKAEPHFLSILQHLLLVRNDYEARPQYYKLIEECISQIVLHKNGADPDFKCRHLQIEIEGLIDQMIDKTKVEKSEAKAAELEKKLDSELTARHELQVEMKKMESDFEQKLQDLQGEKDALHSEKQQIATEKQDLEAEVSQLTGEVAKLTKELEDAKKEMASLSAAAITVPPSVPSRAPVPPAPPLPGDSGTIIPPPPAPGDSTTPPPPPPPPPPPPPLPGGVCISSPPSLPGGTAISPPPPLSGDATIPPPPPLPEGVGIPSPSSLPGGTAIPPPPPLPGSARIPPPPPPLPGSAGIPPPPPPLPGEAGMPPPPPPLPGGPGIPPPPPFPGGPGIPPPPPGMGMPPPPPFGFGVPAAPVLPFGLTPKKLYKPEVQLRRPNWSKLVAEDLSQDCFWTKVKEDRFENNELFAKLTLTFSAQTKTSKAKKDQEGGEEKKSVQKKKVKELKVLDSKTAQNLSIFLGSFRMPYQEIKNVILEVNEAVLTESMIQNLIKQMPEPEQLKMLSELKDEYDDLAESEQFGVVMGTVPRLRPRLNAILFKLQFSEQVENIKPEIVSVTAACEELRKSESFSNLLEITLLVGNYMNAGSRNAGAFGFNISFLCKLRDTKSTDQKMTLLHFLAELCENDYPDVLKFPDELAHVEKASRVSAENLQKNLDQMKKQISDVERDVQNFPAATDEKDKFVEKMTSFVKDAQEQYNKLRMMHSNMETLYKELGEYFLFDPKKLSVEEFFMDLHNFRNMFLQAVKENQKRRETEEKMRRAKLAKEKAEKERLEKQQKREQLIDMNAEGDETGVMDSLLEALQSGAAFRRKRGPRQANRKAGCAVTSLLASELTKDDAMAAVPAKVSKNSETFPTILEEAKELVGRAS

SEQ ID NO: 35721 - protein, 1248 aa, Artificial Sequence [sequence omitted]

SEQ ID NO: 35722 - protein, 1264 aa, Artificial Sequence
  derived and/or modified sequence
MEPPGGSLGPGRGTRDKKKGRSPDELPSAGGDGGKSKKFLERFTSMRIKKEKEKPNSAHRNSSASYGDDPTAQSLQDVSDEQVLVLFEQMLLDMNLNEEKQQPLREKDIIIKREMVSQYLYTSKAGMSQKESSKSAMMYIQELRSGLRDMPLLSCLESLRVSLNNNPVSWVQTFGAEGLASLLDILKRLHDEKEETAGSYDSRNKHEIIRCLKAFMNNKFGIKTMLETEEGILLLVRAMDPAVPNMMIDAAKLLSALCILPQPEDMNERVLEAMTERAEMDEVERFQPLLDGLKSGTTIALKVGCLQLINALITPAEELDFRVHIRSELMRLGLHQVLQDLREIENEDMRVQLNVFDEQGEEDSYDLKGRLDDIRMEMDDFNEVFQILLNTVKDSKAEPHFLSILQHLLLVRNDYEARPQYYKLIEECISQIVLHKNGADPDFKCRHLQIEIEGLIDQMIDKTKVEKSEAKAAELEKKLDSELTARHELQVEMKKMESDFEQKLQDLQGEKDALHSEKQQIATEKQDLEAEVSQLTGEVAKLTKELEDAKKEMASLSAAAITVPPSVPSRAPVPPAPPLPGDSGTIIPPPPAPGDSTTPPPPPPPPPPPPPLPGGVCISSPPSLPGGTAISPPPPLSGDATIPPPPPLPEGVGIPSPSSLPGGTAIPPPPPLPGSARIPPPPPPLPGSAGIPPPPPPLPGEAGMPPPPPPLPGGPGIPPPPPFPGGPGIPPPPPGMGMPPPPPFGFGVPAAPVLPFGLTPKKLYKPEVQLRRPNWSKLVAEDLSQDCFWTKVKEDRFENNELFAKLTLTFSAQTKRTKKAKKDQEGGEEKKSVQKKKVKELKVLDSKTAQNLSIFLGSFRMPYQEIKNVILEVNEAVLTESMIQNLIKQMPEPEQLKMLSELKDEYDDLAESEQFGVVMGTVPRLRPRLNAILFKLQFSEQVENIKPEIVSVTAACEELRKSESFSNLLEITLLVGNYMNAGSRNAGAFGFNISFLCKLRDTKSTDQKMTLLHFLAELCENDYPDVLKFPDELAHVEKASRVSAENLQKNLDQMKKQISDVERDVQNFPAATDEKDKFVEKMTIFVKDAQEQYNKLRMMHSNMETLYKELGEYFLFDPKKLSVEEFFMDLHNFRNMFLQAVKENQKRRETEEKMRRAKLAKEKAEKERLEKQQKREQLIDMNAEGDETGVMDSLLEALQSGAAFRRKRGPRQANRKAGCAVTSLLASELTKDDAMAAVPAKVSKNSETFPTILEEAKELVGRAS

SEQ ID NO: 35723 - DNA, 3792 bp, Artificial Sequence
  derived and/or modified sequence
atggagccccccggcggcagcctgggccccggcagaggcaccagagacaagaagaagggcagaagccccgacgagctgcccagcgccggcggcgacggcggcaagagcaagaagttcctggagagattcaccagcatgagaatcaagaaggagaaggagaagcccaacagcgcccacagaaacagcagcgccagctacggcgacgaccccaccgcccagagcctgcaggacgtgagcgacgagcaggtgctggtgctgttcgagcagatgctgctggacatgaacctgaacgaggagaagcagcagcccctgagagagaaggacatcatcatcaagagagagatggtgagccagtacctgtacaccagcaaggccggcatgagccagaaggagagcagcaagagcgccatgatgtacatccaggagctgagaagcggcctgagagacatgcccctgctgagctgcctggagagcctgagagtgagcctgaacaacaaccccgtgagctgggtgcagaccttcggcgccgagggcctggccagcctgctggacatcctgaagagactgcacgacgagaaggaggagaccgccggcagctacgacagcagaaacaagcacgagatcatcagatgcctgaaggccttcatgaacaacaagttcggcatcaagaccatgctggagaccgaggagggcatcctgctgctggtgagagccatggaccccgccgtgcccaacatgatgatcgacgccgccaagctgctgagcgccctgtgcatcctgccccagcccgaggacatgaacgagagagtgctggaggccatgaccgagagagccgagatggacgaggtggagagattccagcccctgctggacggcctgaagagcggcaccaccatcgccctgaaggtgggctgcctgcagctgatcaacgccctgatcacccccgccgaggagctggacttcagagtgcacatcagaagcgagctgatgagactgggcctgcaccaggtgctgcaggacctgagagagatcgagaacgaggacatgagagtgcagctgaacgtgttcgacgagcagggcgaggaggacagctacgacctgaagggcagactggacgacatcagaatggagatggacgacttcaacgaggtgttccagatcctgctgaacaccgtgaaggacagcaaggccgagccccacttcctgagcatcctgcagcacctgctgctggtgagaaacgactacgaggccagaccccagtactacaagctgatcgaggagtgcatcagccagatcgtgctgcacaagaacggcgccgaccccgacttcaagtgcagacacctgcagatcgagatcgagggcctgatcgaccagatgatcgacaagaccaaggtggagaagagcgaggccaaggccgccgagctggagaagaagctggacagcgagctgaccgccagacacgagctgcaggtggagatgaagaagatggagagcgacttcgagcagaagctgcaggacctgcagggcgagaaggacgccctgcacagcgagaagcagcagatcgccaccgagaagcaggacctggaggccgaggtgagccagctgaccggcgaggtggccaagctgaccaaggagctggaggacgccaagaaggagatggccagcctgagcgccgccgccatcaccgtgccccccagcgtgcccagcagagcccccgtgccccccgccccccccctgcccggcgacagcggcaccatcatcccccccccccccgcccccggcgacagcaccacccccccccccccccccccccccccccccccccccccccccctgcccggcggcgtgtgcatcagcagcccccccagcctgcccggcggcaccgccatcagcccccccccccccctgagcggcgacgccaccatccccccccccccccccctgcccgagggcgtgggcatccccagccccagcagcctgcccggcggcaccgccatccccccccccccccccctgcccggcagcgccagaatcccccccccccccccccccctgcccggcagcgccggcatcccccccccccccccccccctgcccggcgaggccggcatgccccccccccccccccccctgcccggcggccccggcatccccccccccccccccttccccggcggccccggcatccccccccccccccccggcatgggcatgcccccccccccccccttcggcttcggcgtgcccgccgcccccgtgctgcccttcggcctgacccccaagaagctgtacaagcccgaggtgcagctgagaagacccaactggagcaagctggtggccgaggacctgagccaggactgcttctggaccaaggtgaaggaggacagattcgagaacaacgagctgttcgccaagctgaccctgaccttcagcgcccagaccaagaccagcaaggccaagaaggaccaggagggcggcgaggagaagaagagcgtgcagaagaagaaggtgaaggagctgaaggtgctggacagcaagaccgcccagaacctgagcatcttcctgggcagcttcagaatgccctaccaggagatcaagaacgtgatcctggaggtgaacgaggccgtgctgaccgagagcatgatccagaacctgatcaagcagatgcccgagcccgagcagctgaagatgctgagcgagctgaaggacgagtacgacgacctggccgagagcgagcagttcggcgtggtgatgggcaccgtgcccagactgagacccagactgaacgccatcctgttcaagctgcagttcagcgagcaggtggagaacatcaagcccgagatcgtgagcgtgaccgccgcctgcgaggagctgagaaagagcgagagcttcagcaacctgctggagatcaccctgctggtgggcaactacatgaacgccggcagcagaaacgccggcgccttcggcttcaacatcagcttcctgtgcaagctgagagacaccaagagcaccgaccagaagatgaccctgctgcacttcctggccgagctgtgcgagaacgactaccccgacgtgctgaagttccccgacgagctggcccacgtggagaaggccagcagagtgagcgccgagaacctgcagaagaacctggaccagatgaagaagcagatcagcgacgtggagagagacgtgcagaacttccccgccgccaccgacgagaaggacaagttcgtggagaagatgaccagcttcgtgaaggacgcccaggagcagtacaacaagctgagaatgatgcacagcaacatggagaccctgtacaaggagctgggcgagtacttcctgttcgaccccaagaagctgagcgtggaggagttcttcatggacctgcacaacttcagaaacatgttcctgcaggccgtgaaggagaaccagaagagaagagagaccgaggagaagatgagaagagccaagctggccaaggagaaggccgagaaggagagactggagaagcagcagaagagagagcagctgatcgacatgaacgccgagggcgacgagaccggcgtgatggacagcctgctggaggccctgcagagcggcgccgccttcagaagaaagagaggccccagacaggccaacagaaaggccggctgcgccgtgaccagcctgctggccagcgagctgaccaaggacgacgccatggccgccgtgcccgccaaggtgagcaagaacagcgagaccttccccaccatcctggaggaggccaaggagctggtgggcagagccagctag

SEQ ID NO: 35724 - DNA, 3747 bp, Artificial Sequence
  derived and/or modified sequence
atggagccccccggcggcagcctgggccccggcagaggcaccagagacaagaagaagggcagaagccccgacgagctgcccagcgccggcggcgacggcggcaagagcaagaagttcctggagagattcaccagcatgagaatcaagaaggagaaggagaagcccaacagcgcccacagaaacagcagcgccagctacggcgacgaccccaccgcccagagcctgcaggacgtgagcgacgagcaggtgctggtgctgttcgagcagatgctgctggacatgaacctgaacgaggagaagcagcagcccctgagagagaaggacatcatcatcaagagagagatggtgagccagtacctgtacaccagcaaggccggcatgagccagaaggagagcagcaagagcgccatgatgtacatccaggagctgagaagcggcctgagagacatgcccctgctgagctgcctggagagcctgagagtgagcctgaacaacaaccccgtgagctgggtgcagaccttcggcgccgagggcctggccagcctgctggacatcctgaagagactgcacgacgagaaggaggagaccgccggcagctacgacagcagaaacaagcacgagatcatcagatgcctgaaggccttcatgaacaacaagttcggcatcaagaccatgctggagaccgaggagggcatcctgctgctggtgagagccatggaccccgccgtgcccaacatgatgatcgacgccgccaagctgctgagcgccctgtgcatcctgccccagcccgaggacatgaacgagagagtgctggaggccatgaccgagagagccgagatggacgaggtggagagattccagcccctgctggacggcctgaagagcggcaccaccatcgccctgaaggtgggctgcctgcagctgatcaacgccctgatcacccccgccgaggagctggacttcagagtgcacatcagaagcgagctgatgagactgggcctgcaccaggtgctgcaggacctgagagagatcgagaacgaggacatgagagtgcagctgaacgtgttcgacgagcagggcgaggaggacagctacgacctgaagggcagactggacgacatcagaatggagatggacgacttcaacgaggtgttccagatcctgctgaacaccgtgaaggacagcaaggccgagccccacttcctgagcatcctgcagcacctgctgctggtgagaaacgactacgaggccagaccccagtactacaagctgatcgaggagtgcatcagccagatcgtgctgcacaagaacggcgccgaccccgacttcaagtgcagacacctgcagatcgagatcgagggcctgatcgaccagatgatcgacaagaccaaggtggagaagagcgaggccaaggccgccgagctggagaagaagctggacagcgagctgaccgccagacacgagctgcaggtggagatgaagaagatggagagcgacttcgagcagaagctgcaggacctgcagggcgagaaggacgccctgcacagcgagaagcagcagatcgccaccgagaagcaggacctggaggccgaggtgagccagctgaccggcgaggtggccaagctgaccaaggagctggaggacgccaagaaggagatggccagcctgagcgccgccgccatcaccgtgccccccagcgtgcccagcagagcccccgtgccccccgccccccccctgcccggcgacagcggcaccatcatcccccccccccccgcccccggcgacagcaccacccccccccccccccccccccccccccccccccccccccccctgcccggcggcaccgccatcagcccccccccccccctgagcggcgacgccaccatccccccccccccccccctgcccgagggcgtgggcatccccagccccagcagcctgcccggcggcaccgccatccccccccccccccccctgcccggcagcgccagaatcccccccccccccccccccctgcccggcagcgccggcatcccccccccccccccccccctgcccggcgaggccggcatgccccccccccccccccccctgcccggcggccccggcatccccccccccccccccttccccggcggccccggcatccccccccccccccccggcatgggcatgcccccccccccccccttcggcttcggcgtgcccgccgcccccgtgctgcccttcggcctgacccccaagaagctgtacaagcccgaggtgcagctgagaagacccaactggagcaagctggtggccgaggacctgagccaggactgcttctggaccaaggtgaaggaggacagattcgagaacaacgagctgttcgccaagctgaccctgaccttcagcgcccagaccaagaccaagaaggaccaggagggcggcgaggagaagaagagcgtgcagaagaagaaggtgaaggagctgaaggtgctggacagcaagaccgcccagaacctgagcatcttcctgggcagcttcagaatgccctaccaggagatcaagaacgtgatcctggaggtgaacgaggccgtgctgaccgagagcatgatccagaacctgatcaagcagatgcccgagcccgagcagctgaagatgctgagcgagctgaaggacgagtacgacgacctggccgagagcgagcagttcggcgtggtgatgggcaccgtgcccagactgagacccagactgaacgccatcctgttcaagctgcagttcagcgagcaggtggagaacatcaagcccgagatcgtgagcgtgaccgccgcctgcgaggagctgagaaagagcgagagcttcagcaacctgctggagatcaccctgctggtgggcaactacatgaacgccggcagcagaaacgccggcgccttcggcttcaacatcagcttcctgtgcaagctgagagacaccaagagcaccgaccagaagatgaccctgctgcacttcctggccgagctgtgcgagaacgactaccccgacgtgctgaagttccccgacgagctggcccacgtggagaaggccagcagagtgagcgccgagaacctgcagaagaacctggaccagatgaagaagcagatcagcgacgtggagagagacgtgcagaacttccccgccgccaccgacgagaaggacaagttcgtggagaagatgaccatcttcgtgaaggacgcccaggagcagtacaacaagctgagaatgatgcacagcaacatggagaccctgtacaaggagctgggcgagtacttcctgttcgaccccaagaagctgagcgtggaggagttcttcatggacctgcacaacttcagaaacatgttcctgcaggccgtgaaggagaaccagaagagaagagagaccgaggagaagatgagaagagccaagctggccaaggagaaggccgagaaggagagactggagaagcagcagaagagagagcagctgatcgacatgaacgccgagggcgacgagaccggcgtgatggacagcctgctggaggccctgcagagcggcgccgccttcagaagaaagagaggccccagacaggccaacagaaaggccggctgcgccgtgaccagcctgctggccagcgagctgaccaaggacgacgccatggccgccgtgcccgccaaggtgagcaagaacagcgagaccttccccaccatcctggaggaggccaaggagctggtgggcagagccagctag

SEQ ID NO: 35725 - DNA, 3795 bp, Artificial Sequence
  derived and/or modified sequence
atggagccccccggcggcagcctgggccccggcagaggcaccagagacaagaagaagggcagaagccccgacgagctgcccagcgccggcggcgacggcggcaagagcaagaagttcctggagagattcaccagcatgagaatcaagaaggagaaggagaagcccaacagcgcccacagaaacagcagcgccagctacggcgacgaccccaccgcccagagcctgcaggacgtgagcgacgagcaggtgctggtgctgttcgagcagatgctgctggacatgaacctgaacgaggagaagcagcagcccctgagagagaaggacatcatcatcaagagagagatggtgagccagtacctgtacaccagcaaggccggcatgagccagaaggagagcagcaagagcgccatgatgtacatccaggagctgagaagcggcctgagagacatgcccctgctgagctgcctggagagcctgagagtgagcctgaacaacaaccccgtgagctgggtgcagaccttcggcgccgagggcctggccagcctgctggacatcctgaagagactgcacgacgagaaggaggagaccgccggcagctacgacagcagaaacaagcacgagatcatcagatgcctgaaggccttcatgaacaacaagttcggcatcaagaccatgctggagaccgaggagggcatcctgctgctggtgagagccatggaccccgccgtgcccaacatgatgatcgacgccgccaagctgctgagcgccctgtgcatcctgccccagcccgaggacatgaacgagagagtgctggaggccatgaccgagagagccgagatggacgaggtggagagattccagcccctgctggacggcctgaagagcggcaccaccatcgccctgaaggtgggctgcctgcagctgatcaacgccctgatcacccccgccgaggagctggacttcagagtgcacatcagaagcgagctgatgagactgggcctgcaccaggtgctgcaggacctgagagagatcgagaacgaggacatgagagtgcagctgaacgtgttcgacgagcagggcgaggaggacagctacgacctgaagggcagactggacgacatcagaatggagatggacgacttcaacgaggtgttccagatcctgctgaacaccgtgaaggacagcaaggccgagccccacttcctgagcatcctgcagcacctgctgctggtgagaaacgactacgaggccagaccccagtactacaagctgatcgaggagtgcatcagccagatcgtgctgcacaagaacggcgccgaccccgacttcaagtgcagacacctgcagatcgagatcgagggcctgatcgaccagatgatcgacaagaccaaggtggagaagagcgaggccaaggccgccgagctggagaagaagctggacagcgagctgaccgccagacacgagctgcaggtggagatgaagaagatggagagcgacttcgagcagaagctgcaggacctgcagggcgagaaggacgccctgcacagcgagaagcagcagatcgccaccgagaagcaggacctggaggccgaggtgagccagctgaccggcgaggtggccaagctgaccaaggagctggaggacgccaagaaggagatggccagcctgagcgccgccgccatcaccgtgccccccagcgtgcccagcagagcccccgtgccccccgccccccccctgcccggcgacagcggcaccatcatcccccccccccccgcccccggcgacagcaccacccccccccccccccccccccccccccccccccccccccccctgcccggcggcgtgtgcatcagcagcccccccagcctgcccggcggcaccgccatcagcccccccccccccctgagcggcgacgccaccatccccccccccccccccctgcccgagggcgtgggcatccccagccccagcagcctgcccggcggcaccgccatccccccccccccccccctgcccggcagcgccagaatcccccccccccccccccccctgcccggcagcgccggcatcccccccccccccccccccctgcccggcgaggccggcatgccccccccccccccccccctgcccggcggccccggcatccccccccccccccccttccccggcggccccggcatccccccccccccccccggcatgggcatgcccccccccccccccttcggcttcggcgtgcccgccgcccccgtgctgcccttcggcctgacccccaagaagctgtacaagcccgaggtgcagctgagaagacccaactggagcaagctggtggccgaggacctgagccaggactgcttctggaccaaggtgaaggaggacagattcgagaacaacgagctgttcgccaagctgaccctgaccttcagcgcccagaccaagagaaccaagaaggccaagaaggaccaggagggcggcgaggagaagaagagcgtgcagaagaagaaggtgaaggagctgaaggtgctggacagcaagaccgcccagaacctgagcatcttcctgggcagcttcagaatgccctaccaggagatcaagaacgtgatcctggaggtgaacgaggccgtgctgaccgagagcatgatccagaacctgatcaagcagatgcccgagcccgagcagctgaagatgctgagcgagctgaaggacgagtacgacgacctggccgagagcgagcagttcggcgtggtgatgggcaccgtgcccagactgagacccagactgaacgccatcctgttcaagctgcagttcagcgagcaggtggagaacatcaagcccgagatcgtgagcgtgaccgccgcctgcgaggagctgagaaagagcgagagcttcagcaacctgctggagatcaccctgctggtgggcaactacatgaacgccggcagcagaaacgccggcgccttcggcttcaacatcagcttcctgtgcaagctgagagacaccaagagcaccgaccagaagatgaccctgctgcacttcctggccgagctgtgcgagaacgactaccccgacgtgctgaagttccccgacgagctggcccacgtggagaaggccagcagagtgagcgccgagaacctgcagaagaacctggaccagatgaagaagcagatcagcgacgtggagagagacgtgcagaacttccccgccgccaccgacgagaaggacaagttcgtggagaagatgaccatcttcgtgaaggacgcccaggagcagtacaacaagctgagaatgatgcacagcaacatggagaccctgtacaaggagctgggcgagtacttcctgttcgaccccaagaagctgagcgtggaggagttcttcatggacctgcacaacttcagaaacatgttcctgcaggccgtgaaggagaaccagaagagaagagagaccgaggagaagatgagaagagccaagctggccaaggagaaggccgagaaggagagactggagaagcagcagaagagagagcagctgatcgacatgaacgccgagggcgacgagaccggcgtgatggacagcctgctggaggccctgcagagcggcgccgccttcagaagaaagagaggccccagacaggccaacagaaaggccggctgcgccgtgaccagcctgctggccagcgagctgaccaaggacgacgccatggccgccgtgcccgccaaggtgagcaagaacagcgagaccttccccaccatcctggaggaggccaaggagctggtgggcagagccagctag

SEQ ID NO: 35726 - DNA, 5762 bp, Artificial Sequence
  derived and/or modified sequence
attcatgaggcgcgcgcagcccggcatgctaatgaggcggggcgcggcggctggctaaagagcgactgggcggcggcgggcgcggagctgccaggcgggagcggcgtaggcgcggggtcgccggccagcgtgaaccgggacatggagccgcccggcgggagcctggggcccggccgcgggacccgggacaagaagaagggccggagcccagatgagctgccctcggcgggcggcgacggcggcaaatctaagaaatttctggagagatttaccagcatgagaattaagaaggagaaggaaaagcccaattctgctcatagaaattcttctgcatcatatggggatgatcccacagcacagtcattgcaagatgtttcagatgaacaagtgctggttctctttgaacagatgctgctggatatgaacctgaatgaggagaaacagcaacctttgagggagaaggacatcatcatcaagagggagatggtgtcccaatacttgtacacctccaaggctggcatgagccagaaggagagctctaagtctgccatgatgtatattcaggagttgaggtcaggcttgcgggatatgcctctgctcagctgcctggagtcccttcgtgtgtctctcaacaacaaccctgtcagttgggtgcaaacatttggtgctgaaggcttggcctccttattggacattcttaaacgacttcatgatgagaaagaagagactgctgggagttacgatagccggaacaagcatgagatcattcgctgcttgaaagcttttatgaacaacaagtttggaatcaagaccatgttggagacagaagaaggaatcctactgctggtcagagccatggatcctgctgttcccaacatgatgattgatgcagctaagctgctttctgctctttgtattctaccgcagccagaggacatgaatgaaagggttttggaggcaatgacagaaagagctgagatggatgaagtggaacgtttccagccgctgctggatggattaaaaagtggaaccactattgcactgaaggttggatgcctacagctgatcaatgctctcatcacaccagcggaggaacttgacttccgagttcacatcagaagtgaactgatgcgtttggggctacatcaggtgttgcaggaccttcgagagattgaaaatgaagatatgagagtgcaactaaatgtgtttgatgaacaaggggaagaggattcctatgacctgaagggacggctggatgacattcgcatggagatggatgactttaatgaagtctttcagattctcttaaacacagtgaaggattcaaaggcagagccacacttcctttccatcctgcagcacttactcttggtccgaaatgactatgaggccagacctcagtactataagttgattgaagaatgtatttcccagatagttctgcacaagaacggggctgatcctgacttcaagtgccggcacctccagattgagattgagggattaattgatcaaatgattgataagacaaaggtggagaaatctgaagccaaagctgcagagctggaaaagaagttggactcagagttaacagcccgacatgagctacaggtggaaatgaaaaagatggaaagtgactttgagcagaagcttcaagatcttcagggagaaaaagatgcactgcattctgaaaagcagcaaattgccacagagaaacaggacctggaagcagaggtgtcccagctcacaggagaggttgccaagctgacaaaggaactggaagatgccaagaaagaaatggcttccctctctgcggcagctattactgtacctccttctgttcctagtcgtgctcctgttccccctgcccctcctttacctggtgactctggcactattattccaccaccacctgctcctggggatagtaccactcctcctcctcctcctcctcctcctcctcctccacctcctttgcctgggggtgtttgcatctcctcacccccttctttacctggaggtactgctatctctccaccccctcctttgtctggggatgctaccatccctccaccccctcctttgcctgagggtgttggcatcccttcaccctcttctttgcctggaggtactgccatccccccacctcctcctttgcctgggagtgctagaatccccccaccaccacctcctttgcctgggagtgctggaattccccccccacctcctcccttgcctggagaagcaggaatgccacctcctcctccccctcttcctggtggtcctggaatccctccacctcctccatttcccggaggccctggcattcctccacctccacccggaatgggtatgcctccacctcccccatttggatttggagttcctgcagccccagttctgccatttggattaacccccaaaaagctttataagccagaggtgcagctccggaggccaaactggtccaagcttgtggctgaggacctctcccaggactgcttctggacaaaggtgaaggaggaccgctttgagaacaatgaacttttcgccaaacttacccttaccttctctgcccagaccaagacttccaaagccaagaaggatcaagaaggtggagaagaaaagaaatctgtgcaaaagaaaaaagtaaaagagttaaaggtgttggattcaaagacagcccagaatctctcaatctttttgggttccttccgcatgccctatcaagagattaagaatgtcatcctggaggtgaatgaggctgttctgactgagtctatgatccagaacctcattaagcaaatgccagagccagagcagttaaaaatgctttctgaactgaaggatgaatatgatgacctggctgagtcagagcagtttggcgtggtgatgggcactgtgccccgactgcggcctcgcctcaatgccattctcttcaagctacaattcagcgagcaagtggagaatatcaagccagagattgtgtctgtcactgctgcatgtgaggagttacgtaagagtgagagcttttccaatctcctagagattaccttgcttgttggaaattacatgaatgctggctccagaaatgctggtgcttttggcttcaatatcagcttcctctgtaagcttcgagacaccaagtccacagatcagaagatgacgttgttacacttcttggctgagttgtgtgagaatgactatcccgatgtcctcaagtttccagacgagcttgcccatgtggagaaagccagccgagtttctgctgaaaacttgcaaaagaacctagatcagatgaagaaacaaatttctgatgtggaacgtgatgttcagaatttcccagctgccacagatgaaaaagacaagtttgttgaaaaaatgaccagctttgtgaaggatgcacaggaacagtataacaagctgcggatgatgcattctaacatggagaccctctataaggagctgggcgagtacttcctctttgaccccaagaagttgtctgttgaagaatttttcatggatcttcacaattttcggaatatgtttttgcaagcagtcaaggagaaccagaagcggcgggagacagaagaaaagatgaggcgagcaaaactagccaaggagaaggcagagaaggagcggctagagaagcagcagaagagagagcaactcatagacatgaatgcagagggcgatgagacaggtgtgatggacagtcttctagaagccctgcagtcaggggcagcattccgacggaagagagggccccgtcaagccaacaggaaggccgggtgtgcagtcacatctctgctagcttcggagctgaccaaggatgatgccatggctgctgttcctgccaaggtgtccaagaacagtgagacattccccacaatccttgaggaagccaaggagttggttggccgtgcaagctaatgtgggtcctgtgaccgcggcagctcctcagcggagccgcagactgtcctgccctgcagcatgtgcctaaaggctcaaggggatattcctctggggtggccactcccaccaccctgaccctgtctttctctctggcctgctgctctctcaacatcacatacagcttcagctgcctggaggccagaaggaaagggcagtgcaggggaggcctgagcccgacttagccagccctggctgttgtattaccaaagcagggtccatgtttgctgccttaaccctgtctcctctctgttactcagagggcctcatctcagacaaggcccagcctgctttttctcagccctgactttctaatgggctttcccccctaggtcagtcttgctggatttgtgcttttcttttgtggtttctctggccctgagaatagcatggggcttgtaaacctttgggctagatccctcctttcattgctgttgtctctgctcttccctctcctggctgtggttatttattattagtggtgtggcactgggagctgctcctaaggaagcagggagcaaatcccacctttaccccaccttcctgggaaaggcctccaaagcaaaggatctggaccagtttccctgctgtgctgtggcccaggccagagcctgtgggcaggcaggcagggcatagcgacagtgtgggacctgcccccagcttctgccacgctttatgcccttgcctctctggacgctctgcaccaaccccaggctactgagccaccttccctcctcatgccttccctgagctttggtgcatctcatctggactatgggttgtactgtgaccatcccaacacctcaccctctgtctacaaggaaatgggaggtggagcctcctggctgagaaattgttttgcaaatggatctatttttgtatgaaaaaaaaaatttttttaaagaaaactgttccttccccctttcccctccataatgtaagaagctttggtggcaggttacagagttctgggatttcttctcacaggcccaatcctgaatgtgcccctggaccttctggacccttgagtccaaggcagatcctctctcccagggaatccgacacaggaggaaccccttctctggttgagctgggccaggcctaagagtagcaggaactctaagaccacagagttttttataaatgtataaatgtatcaagccaaatgtgcagatgctaactggacattctggggaactgggcaccaggagtgccttcatacactgtaccccagctctcttctaaaagagaagtgggtgggcacactgaactgtttggtggccccaaccacaggaagctgcaattctctggcttagggtgatacttttgccctccttgtgcccctctcagctttccatccccagctaggaagaaagaatggcactcttgggcttggcccagaattagagttattagagcaagagagagcttaggaagcatgagggcaactatagtgaggccttattgccaggagggagggttttggttgctggcgcttgtgtataaaggggcaagagcagctcctttggactattcctgggaggactctgatgcagggcgtctgttgctcccctgggtcacctcctccctgctcgctgacatctggggctttgaccctttcttttttaatctacttttgctaagatgcatttaataaaaaaaaagagagagagagagaggtgtgagggacaaaatgcaaacctatttcccttgcctcataggcttctgggatgtcatcacctccagtttgttggttttgtttccaactgttaataaagcattgaaacagt

SEQ ID NO: 35727 - DNA, 5717 bp, Artificial Sequence
  derived and/or modified sequence
attcatgaggcgcgcgcagcccggcatgctaatgaggcggggcgcggcggctggctaaagagcgactgggcggcggcgggcgcggagctgccaggcgggagcggcgtaggcgcggggtcgccggccagcgtgaaccgggacatggagccgcccggcgggagcctggggcccggccgcgggacccgggacaagaagaagggccggagcccagatgagctgccctcggcgggcggcgacggcggcaaatctaagaaatttctggagagatttaccagcatgagaattaagaaggagaaggaaaagcccaattctgctcatagaaattcttctgcatcatatggggatgatcccacagcacagtcattgcaagatgtttcagatgaacaagtgctggttctctttgaacagatgctgctggatatgaacctgaatgaggagaaacagcaacctttgagggagaaggacatcatcatcaagagggagatggtgtcccaatacttgtacacctccaaggctggcatgagccagaaggagagctctaagtctgccatgatgtatattcaggagttgaggtcaggcttgcgggatatgcctctgctcagctgcctggagtcccttcgtgtgtctctcaacaacaaccctgtcagttgggtgcaaacatttggtgctgaaggcttggcctccttattggacattcttaaacgacttcatgatgagaaagaagagactgctgggagttacgatagccggaacaagcatgagatcattcgctgcttgaaagcttttatgaacaacaagtttggaatcaagaccatgttggagacagaagaaggaatcctactgctggtcagagccatggatcctgctgttcccaacatgatgattgatgcagctaagctgctttctgctctttgtattctaccgcagccagaggacatgaatgaaagggttttggaggcaatgacagaaagagctgagatggatgaagtggaacgtttccagccgctgctggatggattaaaaagtggaaccactattgcactgaaggttggatgcctacagctgatcaatgctctcatcacaccagcggaggaacttgacttccgagttcacatcagaagtgaactgatgcgtttggggctacatcaggtgttgcaggaccttcgagagattgaaaatgaagatatgagagtgcaactaaatgtgtttgatgaacaaggggaagaggattcctatgacctgaagggacggctggatgacattcgcatggagatggatgactttaatgaagtctttcagattctcttaaacacagtgaaggattcaaaggcagagccacacttcctttccatcctgcagcacttactcttggtccgaaatgactatgaggccagacctcagtactataagttgattgaagaatgtatttcccagatagttctgcacaagaacggggctgatcctgacttcaagtgccggcacctccagattgagattgagggattaattgatcaaatgattgataagacaaaggtggagaaatctgaagccaaagctgcagagctggaaaagaagttggactcagagttaacagcccgacatgagctacaggtggaaatgaaaaagatggaaagtgactttgagcagaagcttcaagatcttcagggagaaaaagatgcactgcattctgaaaagcagcaaattgccacagagaaacaggacctggaagcagaggtgtcccagctcacaggagaggttgccaagctgacaaaggaactggaagatgccaagaaagaaatggcttccctctctgcggcagctattactgtacctccttctgttcctagtcgtgctcctgttccccctgcccctcctttacctggtgactctggcactattattccaccaccacctgctcctggggatagtaccactcctcctcctcctcctcctcctcctcctcctccacctcctttgcctgggggtactgctatctctccaccccctcctttgtctggggatgctaccatccctccaccccctcctttgcctgagggtgttggcatcccttcaccctcttctttgcctggaggtactgccatccccccacctcctcctttgcctgggagtgctagaatccccccaccaccacctcctttgcctgggagtgctggaattccccccccacctcctcccttgcctggagaagcaggaatgccacctcctcctccccctcttcctggtggtcctggaatccctccacctcctccatttcccggaggccctggcattcctccacctccacccggaatgggtatgcctccacctcccccatttggatttggagttcctgcagccccagttctgccatttggattaacccccaaaaagctttataagccagaggtgcagctccggaggccaaactggtccaagcttgtggctgaggacctctcccaggactgcttctggacaaaggtgaaggaggaccgctttgagaacaatgaacttttcgccaaacttacccttaccttctctgcccagaccaagaccaagaaggatcaagaaggtggagaagaaaagaaatctgtgcaaaagaaaaaagtaaaagagttaaaggtgttggattcaaagacagcccagaatctctcaatctttttgggttccttccgcatgccctatcaagagattaagaatgtcatcctggaggtgaatgaggctgttctgactgagtctatgatccagaacctcattaagcaaatgccagagccagagcagttaaaaatgctttctgaactgaaggatgaatatgatgacctggctgagtcagagcagtttggcgtggtgatgggcactgtgccccgactgcggcctcgcctcaatgccattctcttcaagctacaattcagcgagcaagtggagaatatcaagccagagattgtgtctgtcactgctgcatgtgaggagttacgtaagagtgagagcttttccaatctcctagagattaccttgcttgttggaaattacatgaatgctggctccagaaatgctggtgcttttggcttcaatatcagcttcctctgtaagcttcgagacaccaagtccacagatcagaagatgacgttgttacacttcttggctgagttgtgtgagaatgactatcccgatgtcctcaagtttccagacgagcttgcccatgtggagaaagccagccgagtttctgctgaaaacttgcaaaagaacctagatcagatgaagaaacaaatttctgatgtggaacgtgatgttcagaatttcccagctgccacagatgaaaaagacaagtttgttgaaaaaatgaccatctttgtgaaggatgcacaggaacagtataacaagctgcggatgatgcattctaacatggagaccctctataaggagctgggcgagtacttcctctttgaccccaagaagttgtctgttgaagaatttttcatggatcttcacaattttcggaatatgtttttgcaagcagtcaaggagaaccagaagcggcgggagacagaagaaaagatgaggcgagcaaaactagccaaggagaaggcagagaaggagcggctagagaagcagcagaagagagagcaactcatagacatgaatgcagagggcgatgagacaggtgtgatggacagtcttctagaagccctgcagtcaggggcagcattccgacggaagagagggccccgtcaagccaacaggaaggccgggtgtgcagtcacatctctgctagcttcggagctgaccaaggatgatgccatggctgctgttcctgccaaggtgtccaagaacagtgagacattccccacaatccttgaggaagccaaggagttggttggccgtgcaagctaatgtgggtcctgtgaccgcggcagctcctcagcggagccgcagactgtcctgccctgcagcatgtgcctaaaggctcaaggggatattcctctggggtggccactcccaccaccctgaccctgtctttctctctggcctgctgctctctcaacatcacatacagcttcagctgcctggaggccagaaggaaagggcagtgcaggggaggcctgagcccgacttagccagccctggctgttgtattaccaaagcagggtccatgtttgctgccttaaccctgtctcctctctgttactcagagggcctcatctcagacaaggcccagcctgctttttctcagccctgactttctaatgggctttcccccctaggtcagtcttgctggatttgtgcttttcttttgtggtttctctggccctgagaatagcatggggcttgtaaacctttgggctagatccctcctttcattgctgttgtctctgctcttccctctcctggctgtggttatttattattagtggtgtggcactgggagctgctcctaaggaagcagggagcaaatcccacctttaccccaccttcctgggaaaggcctccaaagcaaaggatctggaccagtttccctgctgtgctgtggcccaggccagagcctgtgggcaggcaggcagggcatagcgacagtgtgggacctgcccccagcttctgccacgctttatgcccttgcctctctggacgctctgcaccaaccccaggctactgagccaccttccctcctcatgccttccctgagctttggtgcatctcatctggactatgggttgtactgtgaccatcccaacacctcaccctctgtctacaaggaaatgggaggtggagcctcctggctgagaaattgttttgcaaatggatctatttttgtatgaaaaaaaaaatttttttaaagaaaactgttccttccccctttcccctccataatgtaagaagctttggtggcaggttacagagttctgggatttcttctcacaggcccaatcctgaatgtgcccctggaccttctggacccttgagtccaaggcagatcctctctcccagggaatccgacacaggaggaaccccttctctggttgagctgggccaggcctaagagtagcaggaactctaagaccacagagttttttataaatgtataaatgtatcaagccaaatgtgcagatgctaactggacattctggggaactgggcaccaggagtgccttcatacactgtaccccagctctcttctaaaagagaagtgggtgggcacactgaactgtttggtggccccaaccacaggaagctgcaattctctggcttagggtgatacttttgccctccttgtgcccctctcagctttccatccccagctaggaagaaagaatggcactcttgggcttggcccagaattagagttattagagcaagagagagcttaggaagcatgagggcaactatagtgaggccttattgccaggagggagggttttggttgctggcgcttgtgtataaaggggcaagagcagctcctttggactattcctgggaggactctgatgcagggcgtctgttgctcccctgggtcacctcctccctgctcgctgacatctggggctttgaccctttcttttttaatctacttttgctaagatgcatttaataaaaaaaaagagagagagagagaggtgtgagggacaaaatgcaaacctatttcccttgcctcataggcttctgggatgtcatcacctccagtttgttggttttgtttccaactgttaataaagcattgaaacagt

SEQ ID NO: 35728 - DNA, 5765 bp, Artificial Sequence
  derived and/or modified sequence
attcatgaggcgcgcgcagcccggcatgctaatgaggcggggcgcggcggctggctaaagagcgactgggcggcggcgggcgcggagctgccaggcgggagcggcgtaggcgcggggtcgccggccagcgtgaaccgggacatggagccgcccggcgggagcctggggcccggccgcgggacccgggacaagaagaagggccggagcccagatgagctgccctcggcgggcggcgacggcggcaaatctaagaaatttctggagagatttaccagcatgagaattaagaaggagaaggaaaagcccaattctgctcatagaaattcttctgcatcatatggggatgatcccacagcacagtcattgcaagatgtttcagatgaacaagtgctggttctctttgaacagatgctgctggatatgaacctgaatgaggagaaacagcaacctttgagggagaaggacatcatcatcaagagggagatggtgtcccaatacttgtacacctccaaggctggcatgagccagaaggagagctctaagtctgccatgatgtatattcaggagttgaggtcaggcttgcgggatatgcctctgctcagctgcctggagtcccttcgtgtgtctctcaacaacaaccctgtcagttgggtgcaaacatttggtgctgaaggcttggcctccttattggacattcttaaacgacttcatgatgagaaagaagagactgctgggagttacgatagccggaacaagcatgagatcattcgctgcttgaaagcttttatgaacaacaagtttggaatcaagaccatgttggagacagaagaaggaatcctactgctggtcagagccatggatcctgctgttcccaacatgatgattgatgcagctaagctgctttctgctctttgtattctaccgcagccagaggacatgaatgaaagggttttggaggcaatgacagaaagagctgagatggatgaagtggaacgtttccagccgctgctggatggattaaaaagtggaaccactattgcactgaaggttggatgcctacagctgatcaatgctctcatcacaccagcggaggaacttgacttccgagttcacatcagaagtgaactgatgcgtttggggctacatcaggtgttgcaggaccttcgagagattgaaaatgaagatatgagagtgcaactaaatgtgtttgatgaacaaggggaagaggattcctatgacctgaagggacggctggatgacattcgcatggagatggatgactttaatgaagtctttcagattctcttaaacacagtgaaggattcaaaggcagagccacacttcctttccatcctgcagcacttactcttggtccgaaatgactatgaggccagacctcagtactataagttgattgaagaatgtatttcccagatagttctgcacaagaacggggctgatcctgacttcaagtgccggcacctccagattgagattgagggattaattgatcaaatgattgataagacaaaggtggagaaatctgaagccaaagctgcagagctggaaaagaagttggactcagagttaacagcccgacatgagctacaggtggaaatgaaaaagatggaaagtgactttgagcagaagcttcaagatcttcagggagaaaaagatgcactgcattctgaaaagcagcaaattgccacagagaaacaggacctggaagcagaggtgtcccagctcacaggagaggttgccaagctgacaaaggaactggaagatgccaagaaagaaatggcttccctctctgcggcagctattactgtacctccttctgttcctagtcgtgctcctgttccccctgcccctcctttacctggtgactctggcactattattccaccaccacctgctcctggggatagtaccactcctcctcctcctcctcctcctcctcctcctccacctcctttgcctgggggtgtttgcatctcctcacccccttctttacctggaggtactgctatctctccaccccctcctttgtctggggatgctaccatccctccaccccctcctttgcctgagggtgttggcatcccttcaccctcttctttgcctggaggtactgccatccccccacctcctcctttgcctgggagtgctagaatccccccaccaccacctcctttgcctgggagtgctggaattccccccccacctcctcccttgcctggagaagcaggaatgccacctcctcctccccctcttcctggtggtcctggaatccctccacctcctccatttcccggaggccctggcattcctccacctccacccggaatgggtatgcctccacctcccccatttggatttggagttcctgcagccccagttctgccatttggattaacccccaaaaagctttataagccagaggtgcagctccggaggccaaactggtccaagcttgtggctgaggacctctcccaggactgcttctggacaaaggtgaaggaggaccgctttgagaacaatgaacttttcgccaaacttacccttaccttctctgcccagaccaagagaacaaagaaggccaagaaggatcaagaaggtggagaagaaaagaaatctgtgcaaaagaaaaaagtaaaagagttaaaggtgttggattcaaagacagcccagaatctctcaatctttttgggttccttccgcatgccctatcaagagattaagaatgtcatcctggaggtgaatgaggctgttctgactgagtctatgatccagaacctcattaagcaaatgccagagccagagcagttaaaaatgctttctgaactgaaggatgaatatgatgacctggctgagtcagagcagtttggcgtggtgatgggcactgtgccccgactgcggcctcgcctcaatgccattctcttcaagctacaattcagcgagcaagtggagaatatcaagccagagattgtgtctgtcactgctgcatgtgaggagttacgtaagagtgagagcttttccaatctcctagagattaccttgcttgttggaaattacatgaatgctggctccagaaatgctggtgcttttggcttcaatatcagcttcctctgtaagcttcgagacaccaagtccacagatcagaagatgacgttgttacacttcttggctgagttgtgtgagaatgactatcccgatgtcctcaagtttccagacgagcttgcccatgtggagaaagccagccgagtttctgctgaaaacttgcaaaagaacctagatcagatgaagaaacaaatttctgatgtggaacgtgatgttcagaatttcccagctgccacagatgaaaaagacaagtttgttgaaaaaatgaccatctttgtgaaggatgcacaggaacagtataacaagctgcggatgatgcattctaacatggagaccctctataaggagctgggcgagtacttcctctttgaccccaagaagttgtctgttgaagaatttttcatggatcttcacaattttcggaatatgtttttgcaagcagtcaaggagaaccagaagcggcgggagacagaagaaaagatgaggcgagcaaaactagccaaggagaaggcagagaaggagcggctagagaagcagcagaagagagagcaactcatagacatgaatgcagagggcgatgagacaggtgtgatggacagtcttctagaagccctgcagtcaggggcagcattccgacggaagagagggccccgtcaagccaacaggaaggccgggtgtgcagtcacatctctgctagcttcggagctgaccaaggatgatgccatggctgctgttcctgccaaggtgtccaagaacagtgagacattccccacaatccttgaggaagccaaggagttggttggccgtgcaagctaatgtgggtcctgtgaccgcggcagctcctcagcggagccgcagactgtcctgccctgcagcatgtgcctaaaggctcaaggggatattcctctggggtggccactcccaccaccctgaccctgtctttctctctggcctgctgctctctcaacatcacatacagcttcagctgcctggaggccagaaggaaagggcagtgcaggggaggcctgagcccgacttagccagccctggctgttgtattaccaaagcagggtccatgtttgctgccttaaccctgtctcctctctgttactcagagggcctcatctcagacaaggcccagcctgctttttctcagccctgactttctaatgggctttcccccctaggtcagtcttgctggatttgtgcttttcttttgtggtttctctggccctgagaatagcatggggcttgtaaacctttgggctagatccctcctttcattgctgttgtctctgctcttccctctcctggctgtggttatttattattagtggtgtggcactgggagctgctcctaaggaagcagggagcaaatcccacctttaccccaccttcctgggaaaggcctccaaagcaaaggatctggaccagtttccctgctgtgctgtggcccaggccagagcctgtgggcaggcaggcagggcatagcgacagtgtgggacctgcccccagcttctgccacgctttatgcccttgcctctctggacgctctgcaccaaccccaggctactgagccaccttccctcctcatgccttccctgagctttggtgcatctcatctggactatgggttgtactgtgaccatcccaacacctcaccctctgtctacaaggaaatgggaggtggagcctcctggctgagaaattgttttgcaaatggatctatttttgtatgaaaaaaaaaatttttttaaagaaaactgttccttccccctttcccctccataatgtaagaagctttggtggcaggttacagagttctgggatttcttctcacaggcccaatcctgaatgtgcccctggaccttctggacccttgagtccaaggcagatcctctctcccagggaatccgacacaggaggaaccccttctctggttgagctgggccaggcctaagagtagcaggaactctaagaccacagagttttttataaatgtataaatgtatcaagccaaatgtgcagatgctaactggacattctggggaactgggcaccaggagtgccttcatacactgtaccccagctctcttctaaaagagaagtgggtgggcacactgaactgtttggtggccccaaccacaggaagctgcaattctctggcttagggtgatacttttgccctccttgtgcccctctcagctttccatccccagctaggaagaaagaatggcactcttgggcttggcccagaattagagttattagagcaagagagagcttaggaagcatgagggcaactatagtgaggccttattgccaggagggagggttttggttgctggcgcttgtgtataaaggggcaagagcagctcctttggactattcctgggaggactctgatgcagggcgtctgttgctcccctgggtcacctcctccctgctcgctgacatctggggctttgaccctttcttttttaatctacttttgctaagatgcatttaataaaaaaaaagagagagagagagaggtgtgagggacaaaatgcaaacctatttcccttgcctcataggcttctgggatgtcatcacctccagtttgttggttttgtttccaactgttaataaagcattgaaacagt

SEQ ID NO: 35729 - DNA, 3792 bp, Artificial Sequence
  derived and/or modified sequence
atggagcccccaggaggcagcctagggcccggtaggggcactcgggataagaagaaagggcgctcccccgacgagctgccttctgcagggggtgacggcggcaaatctaagaaatttctggaacgttttacctctatgcgcattaagaaggagaaagaaaagccaaactccgcgcacaggaacagctctgcttcttacggagatgaccccactgcgcagagcttgcaagatgtgtctgatgagcaggttctcgtcctcttcgagcaaatgcttctagacatgaacttaaacgaggaaaagcaacagcccctgagagagaaggatataataattaaaagagaaatggtttcacagtatctgtacacaagtaaagctggaatgagccagaaggaatcttccaaaagcgcgatgatgtatatccaggagctccgatcaggccttcgagacatgcctctgttgagctgccttgaatcgcttagagtgagcctcaacaataatccagtaagctgggtgcagacattcggcgccgaggggctagccagcttgctggacatactgaaacggctccatgatgaaaaggaggagaccgccgggagttacgactctagaaataagcatgagatcattagatgcctgaaagcattcatgaacaacaaatttgggattaaaactatgctcgaaactgaggaaggaatcctgctcctagttagagctatggacccagcagtgcctaacatgatgatagatgccgccaaacttctttccgcactgtgtattctgcctcaacctgaggatatgaacgaaagggtgctggaggctatgaccgagagggccgagatggacgaggtggaacgttttcagccacttctcgacggccttaaatccggaacaactatcgccctcaaggtaggatgtctgcagcttatcaatgccctcatcacacccgctgaggagctcgacttcagagttcatatccgtagcgagctgatgaggctaggactccaccaggtgttgcaagatctccgcgagattgaaaacgaggacatgcgggttcagttgaacgtgttcgatgaacaaggcgaggaggactcttatgatttaaagggaaggctggacgatatccggatggaaatggatgattttaatgaagtatttcagatcctattaaataccgttaaagatagcaaagccgagccacactttctttcaattctgcaacatctgctgctggtacggaacgattacgaagcccgcccgcagtactacaaacttatcgaggagtgcatcagtcagatcgtgctgcataagaacggagctgatccggacttcaagtgtcgacacctgcagatcgagattgaggggctgattgaccagatgattgataaaacaaaggtggagaagagtgaggcaaaggccgcggagctggaaaaaaagctggactccgaattgactgcccgccacgagttgcaggtggaaatgaagaagatggagtccgactttgagcagaaacttcaggacctgcaaggcgagaaggatgcactgcacagtgaaaaacagcaaattgccaccgaaaaacaggacctggaagccgaagtgtcccaactcaccggtgaggttgcaaagctgaccaaagagttagaagatgcaaagaaagaaatggcttccctgagcgcagctgcgatcacggtgccaccctccgtgccatcccgggcccctgtgccgccggctcctccactccccggagattcagggacaatcatcccccccccaccagcccctggcgactcaaccacgcccccaccacctccaccccccccgccaccacctcctccactcccaggcggagtctgtatcagctcgcctccttcccttcctggtggaaccgccataagtcctccacctccactgagcggtgacgccaccattcccccccctccccctcttcctgagggggtgggcataccatcaccatcgtctcttccgggaggcacagcaatacctccgccacccccccttcctggtagcgctcggatccctccccctcctcctccactgcccgggagcgccgggatcccacctcccccaccccccttgcccggggaggccggcatgccgccccctcccccgcccctacccggagggcccggcattcccccgccaccgcctttccccggcggccccgggatcccgccaccaccacccggcatgggaatgcctcccccacctcccttcggtttcggtgtgcctgcagctccagtgctcccctttggacttacccctaagaaactgtacaagccagaagttcagcttagacggccaaactggtccaagctggtggccgaggatctgtcacaggactgcttttggacaaaggtcaaagaggacagattcgagaataacgagctgttcgcgaagctgaccctgaccttttcggcgcagaccaagacaagtaaggctaagaaggatcaggaaggaggagaggagaagaaatccgttcagaaaaagaaagtgaaggagctgaaggtactggattctaagactgcccagaacctgtctatcttcctggggagttttagaatgccgtaccaagagataaagaatgtgatactcgaggtgaacgaagccgtgctaactgagtccatgatccagaacctcattaagcaaatgccagagcccgagcagcttaaaatgctgtcagaactcaaggatgaatatgatgacctggccgaatccgaacaattcggcgtagtcatggggactgttcctaggctgaggcccaggcttaacgctattctgtttaagttgcagttttcagagcaggtcgagaacatcaagcctgagatcgtttcagtaactgcagcctgcgaagagctgaggaagagtgaatcgttcagcaacctgctcgagataacattacttgtgggcaactatatgaacgctgggtctcgcaatgctggagcatttggatttaatattagttttttgtgcaagcttcgggacacaaaatctacagatcagaaaatgacattgttgcattttctggctgagctgtgtgaaaacgactatcctgacgtccttaaattccccgacgaattagcccatgtcgagaaggccagtcgggtttccgcagaaaacttacagaaaaacttggatcagatgaagaaacagatcagcgacgttgagcgcgatgtgcagaatttccctgctgcaacggatgagaaggacaaatttgtcgagaaaatgacctccttcgtgaaggatgcacaagagcaatacaataaacttcggatgatgcactctaatatggaaacgctctacaaagagctcggcgagtatttcctgttcgacccaaaaaagctgtcagtggaagagttctttatggacctgcataacttccgtaatatgttcctgcaggccgtgaaggagaatcaaaaaagaagggaaactgaagaaaagatgagaagagccaagctggctaaagaaaaagcagagaaagaacggttagaaaaacagcagaagcgggagcagctgatcgacatgaatgctgagggagacgagacaggtgtgatggacagccttctcgaggcactccagtcaggcgcagccttccgccgcaagaggggccctaggcaggccaatagaaaagctgggtgtgccgtcaccagcctattggcaagtgaactcactaaggacgatgccatggcagccgtgcccgctaaggtatcaaagaatagtgagaccttccctacaattctcgaggaggctaaagagctggtggggagggcctcttag

SEQ ID NO: 35730 - DNA, 3747 bp, Artificial Sequence
  derived and/or modified sequence
atggagcctcctgggggctcccttggaccagggcgcgggacacgcgataaaaagaaggggaggagtccagacgaactccccagcgccggcggcgatgggggaaagtccaaaaagtttctggagaggttcacttccatgcggataaagaaagagaaggagaaacccaattccgcacaccgcaatagctcagcaagctatggtgacgatcccacagcgcagagcctgcaggatgtgagtgatgagcaagtgttggtgctgttcgaacaaatgttgttggacatgaatctgaacgaagagaagcagcagcctctcagagagaaggacatcattataaaacgtgagatggtctcacagtatttatatacttcaaaggcgggtatgtcccagaaggaatcatccaaaagcgctatgatgtacattcaggagctgcgttccggcttgcgcgacatgcccttactctcctgcctggagagcctccgggtcagtctgaataataacccggtaagttgggtgcagacatttggagcagagggattggcatcgctgctcgacattttgaaaagactgcatgacgaaaaagaagagactgctggaagctacgacagcagaaacaagcatgaaattattagatgcctcaaggcattcatgaacaataagtttggtatcaagaccatgctggagacagaagaagggattctgctattggtgagggctatggaccccgctgttcctaacatgatgattgacgccgcaaagctcctgagtgctctatgcatactcccacagcccgaggacatgaacgagagggttctggaggcaatgacagaacgggcagaaatggacgaagtggagcggtttcagccactgctggacggcctgaaatctggcaccacgattgctttaaaggtgggatgtcttcagctaatcaatgccttaataactccggctgaagaactggactttagggtgcacattcgctcagagcttatgcgactcggcctacatcaggtactgcaggacctgagggaaatcgaaaacgaggacatgcgggtccagttgaacgtgtttgatgagcaaggagaagaggacagttacgacctgaaggggcggctggacgacatccggatggaaatggatgacttcaacgaggtgttccagatcctgttgaatacagtgaaagactccaaagccgagccacactttcttagcattttgcaacatctgctgctcgtgagaaacgactacgaggcccgaccacagtattataaactgatcgaggagtgcatttctcagatcgtgttgcataagaacggagctgatcccgattttaagtgccgccatctgcaaatcgaaatcgaggggcttatagatcagatgattgacaaaacaaaagtcgaaaagtccgaagctaaagctgcagagctcgagaagaagctggacagtgagcttacagcacgacacgagcttcaggtcgagatgaagaaaatggaaagcgattttgaacaaaagctgcaggatctgcaaggagagaaggatgctctccactccgaaaaacagcagatcgctactgaaaaacaggatcttgaggccgaggtgtcccagctgaccggggaggtggcaaagctcacaaaggagctagaggatgccaagaaggagatggcctctttgtccgcggcggccatcaccgtcccaccttctgtaccttcccgggcccccgtgccacctgccccgcccctccccggtgacagtggaaccattatcccgcccccaccggcccccggagactctactacacctccaccccctcccccccctccaccccccccaccaccccttcccggaggaaccgctatttctcccccacccccactgtctggagacgcgaccatccccccaccccctccgcttcctgagggagtcggaatcccatctccatcgtctcttcctggcggcacagcaatccctccccctccacccctgcccggctcggctcggatccccccaccacccccccctctgccagggagcgcgggtatccctccaccccccccccccttacctggcgaggccggaatgccaccacctccacccccattaccgggagggcccggtatcccacccccccctcctttcccgggcggcccgggaattcccccaccacctccaggcatgggcatgcctccgcctccaccctttggatttggtgtccctgctgcacccgtgcttccattcggactgacccctaagaaactctacaagcccgaggtgcagctgcggcgacccaattggagcaaactggtagctgaagacctcagtcaggattgcttctggaccaaagttaaagaggatcgctttgagaacaacgaacttttcgctaagctcactttaacgttcagtgcgcagacaaagactaagaaggatcaagaaggaggcgaggagaaaaagtcagtccaaaaaaagaaagtaaaagagcttaaggtgctagacagcaagacagcccaaaatttgtcaatctttcttggcagtttccgtatgccctatcaggaaataaaaaacgtcatcctcgaagtcaacgaggccgtcctgactgaatcaatgatccagaacctgatcaaacagatgccagaacccgaacagctgaagatgctgagcgagctgaaggatgaatatgatgacctggcggaaagcgagcagttcggggtcgtaatgggaactgttccccgcctgcgcccacggttgaacgcaattttattcaagctccagttttccgaacaggtggagaacattaaacccgagatcgtctcggtaacggctgcctgcgaggagctgagaaaatctgagtcattctccaaccttctcgagatcaccttgctagttggcaactacatgaatgccggtagtcgtaacgccggcgcttttggcttcaacatatccttcctgtgtaagctgagagacacaaaatcaactgaccagaagatgacactcctccactttctggcagaactgtgtgagaacgactaccctgacgtgctcaagttccctgacgaactcgcgcacgtcgagaaggctagtagagtgtctgctgagaacctccagaagaatcttgatcaaatgaagaaacagattagcgacgtcgagcgggatgtgcagaactttccggctgccacagatgaaaaagataaattcgtcgagaagatgacaatcttcgtgaaggatgctcaggagcaatataataaactgagaatgatgcactccaatatggaaaccttgtacaaagaattgggcgagtatttcctctttgatcccaaaaaactttccgtggaggagttcttcatggacctgcataactttaggaacatgttcttacaagcagttaaagagaatcagaaacgtcgcgagactgaagaaaagatgagaagggccaaactcgcaaaagaaaaagccgaaaaagagaggctggaaaagcaacagaaaagagaacagctaatcgacatgaacgctgaaggggacgagaccggagtgatggacagcctccttgaggcactccagtctggggctgccttcagacggaaacgggggccgaggcaggcaaataggaaagctggctgcgctgtaacaagcttgctggcgtccgaactcactaaggatgatgccatggcagcggttccggcgaaggttagtaagaacagtgagacctttcccaccatattggaggaagccaaagaactggtgggtcgtgcgtcctag

SEQ ID NO: 35731 - DNA, 3795 bp, Artificial Sequence
  derived and/or modified sequence
atggaaccacccggcgggagcctaggccccggccgtggcacaagggataagaaaaagggtcggagtccagacgagctcccgagcgccggtggcgacgggggcaagagcaaaaagttcctcgagcggttcacctctatgcgcattaagaaagaaaaagagaagccaaattcagcgcatagaaattcctccgcaagctacggtgatgatcctacggcccagagtctgcaagacgtgtcggacgagcaagtccttgtcttgttcgaacagatgttactggacatgaaccttaatgaagagaagcagcagccactgagagagaaggatataataatcaagcgggaaatggtgagccagtatttgtacacctccaaggccggaatgtctcagaaagaatctagtaaaagtgctatgatgtacattcaggagctcagaagtggcctgagagatatgccactactgtcttgtctcgagtccctccgcgtctctctgaataataaccccgtaagctgggtgcagacctttggtgccgaagggctggcgagcctgctcgatatactgaaaagactgcatgatgagaaggaggaaaccgctggctcctacgattcccgaaataagcacgagattataagatgtctgaaggcattcatgaataacaaattcgggatcaaaactatgcttgagaccgaagagggaatcctgctgttggtgcgggccatggatcctgccgtccccaatatgatgatcgatgctgcaaaactgctcagcgctctatgtatactgccccagcccgaagacatgaatgagcgggtgctagaggccatgacggaaagggcggaaatggacgaggtggagagattccagcctctgctcgacgggttgaagagcggtaccaccatagccctgaaagtgggatgcttgcagctgattaatgccctgataacccccgctgaggaactggattttagagtccatataagatccgaactgatgcgcctcggactacatcaggtgcttcaagacctgagagagatcgaaaacgaggatatgagagttcagcttaacgtcttcgatgaacagggcgaggaggactcatacgacctaaagggccgcctggacgacataagaatggagatggatgatttcaatgaggtgtttcagatcttactgaatactgtgaaagactccaaagctgagccccacttcttgtcgatcctgcagcacctacttctggtccggaacgattacgaggcaaggcctcagtactacaagcttattgaggagtgcatatcacaaattgtactgcataaaaatggtgccgaccccgactttaagtgtcgccatttgcaaatcgagatcgagggtttgatagatcagatgattgacaaaaccaaagttgagaaatctgaggctaaggctgccgaattggagaagaagctggatagcgaactcactgcaagacacgagctgcaggtcgagatgaaaaaaatggagagcgatttcgagcagaagctccaggatttgcagggagagaaggatgcactgcactctgaaaaacagcagattgctactgagaagcaagacctggaggccgaagttagccagcttaccggggaagtcgccaagctgaccaaggaactggaagatgcaaaaaaagaaatggcttccctttcagccgccgccattactgtccctccctcagtgccctcacgggcccctgtgccaccggctccgcccctgccgggtgactctggtactattatccctccgccgccagctcccggggatagcacaacccctcctccccctcctcccccacccccaccacccccgccacttcccgggggagtgtgcatttcctcacctcctagcctgccagggggcacagctattagccctcctccacctttaagtggggatgctactattccgccccccccccccttgccagagggcgtaggtattccttccccaagctctctgcccggcggcaccgcaattcctccccccccacctctgcccgggtctgccaggataccacccccgcccccccctctaccgggaagcgcgggaattccacctccacctccacccctcccgggcgaggcggggatgcccccaccacctccgcccctcccgggtgggccaggaatcccccctcccccacctttccctgggggccctggcatccctcctcctcctcccgggatggggatgcctccccctcccccgttcggcttcggggtgcccgctgcccccgtgctcccctttgggctgacccccaagaaactttataaaccggaggtccagctccgccgccctaactggagtaaattagtggccgaggacctgagtcaggactgcttctggactaaagtgaaagaggatcgtttcgagaataacgaactgttcgccaagctgaccttgactttctcagcccagacaaagagaaccaagaaggctaagaaggaccaggagggaggagaggagaagaaatcagtccaaaaaaaaaaggttaaggaactgaaggttttggatagtaaaaccgctcagaatttatcaattttcctcggtagttttcggatgccctatcaggagataaagaatgtcatactcgaagttaacgaggccgtgctgaccgaatccatgatccagaatcttatcaagcaaatgcccgagcccgaacaacttaagatgctcagtgagttgaaagacgaatacgatgacctcgctgaaagtgagcagttcggcgtggtgatgggcactgtaccaaggttgagaccaaggctgaacgcgattttgttcaaactgcaattttcagagcaggtcgaaaacattaagccagaaattgttagcgttacagcagcctgtgaagagctcagaaagagcgagtcgttctccaacctgttggaaattaccctactagtaggaaattacatgaatgctggctccaggaacgccggtgccttcggttttaacattagctttctctgcaaacttagggataccaagtctaccgatcagaaaatgaccctgctgcacttcctcgctgaactatgtgagaatgattatccagatgtgctgaagttccctgatgagttggctcatgtcgaaaaagcatccagagtgagtgcagaaaacctccagaagaatctggatcaaatgaagaagcaaatcagtgacgtggaacgcgacgtccaaaattttcccgcagccaccgacgaaaaagataagttcgtcgaaaaaatgaccattttcgtcaaggacgcgcaagaacaatataacaagctgagaatgatgcattcaaatatggaaaccctctataaagagcttggcgagtacttcttattcgatccaaaaaagcttagcgttgaggagttcttcatggatctgcacaactttcggaacatgttcctgcaggccgtgaaggagaaccaaaaacgaagggagaccgaagaaaagatgagacgggccaaattagcaaaggagaaggccgagaaggaacggctggaaaagcagcagaagagggagcagttaattgacatgaatgctgaaggcgacgaaaccggtgtgatggacagcctgctggaagcccttcaatcaggagcggcatttcgtaggaagaggggccccaggcaggccaacagaaaggctggctgtgctgttacgagtctcctggccagcgaactcaccaaggacgacgcaatggccgccgtgccagccaaagttagcaagaactccgagacctttcccaccatcttagaggaggccaaggagctggtaggccgcgcatcctag

SEQ ID NO: 35732 - DNA, 3792 bp, Artificial Sequence
  derived and/or modified sequence
atggagcccccaggcggcagcctgggccctggccggggcacccgggacaagaagaagggccgcagcccagatgagctgcccagcgctggaggagatggcggcaagagcaagaagttcctggagcgcttcacctccatgaggatcaagaaggagaaggagaagcccaacagcgcccacaggaacagcagcgccagctatggagatgaccccacagcccagagcctgcaggatgtgtctgatgagcaggtgctggtgctgtttgagcagatgctgctggacatgaacctgaatgaggagaagcagcagcccctgcgggagaaggacatcatcatcaagcgggagatggtgtcccagtacctgtacaccagcaaggccggcatgagccagaaggagagcagcaagagcgccatgatgtacatccaggagctgcggagcggcctgcgggacatgcccctgctgagctgcctggagagcctgcgggtgtccctgaacaacaaccctgtgtcctgggtgcagaccttcggggctgagggcctggccagcctgctggacatcctgaagaggctgcatgatgagaaggaggagacagctggcagctatgacagcaggaacaagcatgagatcatccgctgcctgaaggccttcatgaacaacaagtttggcatcaagaccatgctggagacagaggagggcatcctgctgctggtgcgggccatggaccctgctgtgcccaacatgatgattgatgctgccaagctgctgagcgccctgtgcatcctgccccagcctgaggacatgaatgaaagagtgctggaggccatgacagagcgggcagagatggatgaggtggagcgcttccagcccctgctggatggcctgaagagcggcaccaccatcgccctgaaggtgggctgcctgcagctgatcaatgccctgatcaccccagctgaggagctggacttccgggtgcacatccgctctgagctgatgaggctgggcctgcaccaggtgctgcaggacctgcgggagattgaaaatgaagacatgagggtgcagctgaatgtgtttgatgagcagggcgaggaggacagctatgacctgaagggccgcctggatgacatccgcatggagatggatgacttcaatgaggtgttccagatcctgctgaacacagtgaaggacagcaaggccgagccccacttcctgagcatcctgcagcacctgctgctggtgagaaatgactatgaggcccggccccagtactacaagctgattgaggagtgcatcagccagatcgtgctgcacaagaatggagctgaccctgacttcaagtgccgccacctgcagatcgagattgagggcctgattgaccagatgattgacaagaccaaggtggagaagtctgaggccaaggctgctgagctggagaagaagctggacagcgagctgacagcccggcatgagctgcaggtggagatgaagaagatggagagtgactttgagcagaagctgcaggacctgcagggcgagaaggatgccctgcacagcgagaagcagcagatcgccacagagaagcaggacctggaggccgaggtgtcccagctgaccggggaggtggccaagctgaccaaggagctggaggatgccaagaaggagatggccagcctgtctgctgctgccatcaccgtgccccccagcgtgcccagccgggcccctgtgcccccagccccacccctgcccggggacagcggcaccatcatccccccacctccagcccctggggacagcaccaccccacctcctcctcctcctcctcctcctcctcctccacccctgcctggaggagtgtgcatcagcagcccccccagcctgcccggcggcacagccatcagccccccaccacccctgtctggagatgccaccatccccccacctccacccctgcctgagggcgtgggcatccccagccccagcagcctgcccggcggcacagccatccccccacctccacccctgcccggcagcgcccgcatccccccacctcctccacccctgcccggcagcgctggcatccccccacctcctccacccctgcctggagaggccggcatgcctcctcctcctccacccctgcccggcggccctggcatccccccacctccacccttccctgggggccctggcatccccccacctcctcctggcatgggcatgcctcctcctccacccttcggcttcggcgtgcctgctgcccctgtgctgcccttcggcctgacccccaagaagctgtacaagccagaggtgcagctgcggcggcccaactggagcaagctggtggccgaggacctgagccaggactgcttctggaccaaggtgaaggaggacagatttgagaacaatgagctgtttgccaagctgaccctgaccttcagcgcccagaccaagaccagcaaggccaagaaggaccaggagggcggggaggagaagaagtctgtgcagaagaagaaggtgaaggagctgaaggtgctggacagcaagacagcccagaacctgagcatcttcctgggcagcttcaggatgccctaccaggagatcaagaatgtcatcctggaggtgaatgaagctgtgctgacagagagcatgatccagaacctgatcaagcagatgcctgagcctgagcagctgaagatgctgtctgagctgaaggatgaatatgatgacctggccgagagcgagcagtttggagtggtgatgggcaccgtgccccggctgcggccccggctgaatgccatcctcttcaagctgcagttcagcgagcaggtggagaacatcaagccagagatcgtgtctgtgacagctgcctgtgaggagctgaggaagtctgagagcttcagcaacctgctggagatcaccctgctggtgggcaactacatgaatgccggcagcagaaatgctggggccttcggcttcaacatctccttcctgtgcaagctgcgggacaccaagagcacagaccagaagatgaccctgctgcacttcctggccgagctgtgtgaaaatgactacccagatgtgctgaagttcccagatgagctggcccacgtggagaaggccagccgggtgtctgctgagaacctgcagaagaacctggaccagatgaagaagcagatcagtgatgtggagagagatgtgcagaacttccctgctgccacagatgagaaggacaagtttgtggagaagatgaccagctttgtgaaggatgcccaggagcagtacaacaagctgaggatgatgcacagcaacatggagaccctgtacaaggagctgggggagtacttcctgtttgaccccaagaagctgtctgtggaggagttcttcatggacctgcacaacttcaggaacatgttcctgcaggccgtgaaggagaaccagaagaggcgggagacagaggagaagatgaggcgggccaagctggccaaggagaaggccgagaaggagcggctggagaagcagcagaagcgggagcagctgattgacatgaatgcagaaggagatgaaacaggagtgatggacagcctgctggaggccctgcagagcggggccgccttccggaggaagaggggcccccggcaggccaacaggaaggccggctgtgctgtgaccagcctgctggccagcgagctgaccaaggatgatgccatggctgctgtgcctgccaaggtgtccaagaacagcgagaccttccccaccatcctggaggaggccaaggagctggtgggccgggccagctag

SEQ ID NO: 35733 - DNA, 3747 bp, Artificial Sequence
  derived and/or modified sequence
atggagcccccaggcggcagcctgggccctggccggggcacccgggacaagaagaagggccgcagcccagatgagctgcccagcgctggaggagatggcggcaagagcaagaagttcctggagcgcttcacctccatgaggatcaagaaggagaaggagaagcccaacagcgcccacaggaacagcagcgccagctatggagatgaccccacagcccagagcctgcaggatgtgtctgatgagcaggtgctggtgctgtttgagcagatgctgctggacatgaacctgaatgaggagaagcagcagcccctgcgggagaaggacatcatcatcaagcgggagatggtgtcccagtacctgtacaccagcaaggccggcatgagccagaaggagagcagcaagagcgccatgatgtacatccaggagctgcggagcggcctgcgggacatgcccctgctgagctgcctggagagcctgcgggtgtccctgaacaacaaccctgtgtcctgggtgcagaccttcggggctgagggcctggccagcctgctggacatcctgaagaggctgcatgatgagaaggaggagacagctggcagctatgacagcaggaacaagcatgagatcatccgctgcctgaaggccttcatgaacaacaagtttggcatcaagaccatgctggagacagaggagggcatcctgctgctggtgcgggccatggaccctgctgtgcccaacatgatgattgatgctgccaagctgctgagcgccctgtgcatcctgccccagcctgaggacatgaatgaaagagtgctggaggccatgacagagcgggcagagatggatgaggtggagcgcttccagcccctgctggatggcctgaagagcggcaccaccatcgccctgaaggtgggctgcctgcagctgatcaatgccctgatcaccccagctgaggagctggacttccgggtgcacatccgctctgagctgatgaggctgggcctgcaccaggtgctgcaggacctgcgggagattgaaaatgaagacatgagggtgcagctgaatgtgtttgatgagcagggcgaggaggacagctatgacctgaagggccgcctggatgacatccgcatggagatggatgacttcaatgaggtgttccagatcctgctgaacacagtgaaggacagcaaggccgagccccacttcctgagcatcctgcagcacctgctgctggtgagaaatgactatgaggcccggccccagtactacaagctgattgaggagtgcatcagccagatcgtgctgcacaagaatggagctgaccctgacttcaagtgccgccacctgcagatcgagattgagggcctgattgaccagatgattgacaagaccaaggtggagaagtctgaggccaaggctgctgagctggagaagaagctggacagcgagctgacagcccggcatgagctgcaggtggagatgaagaagatggagagtgactttgagcagaagctgcaggacctgcagggcgagaaggatgccctgcacagcgagaagcagcagatcgccacagagaagcaggacctggaggccgaggtgtcccagctgaccggggaggtggccaagctgaccaaggagctggaggatgccaagaaggagatggccagcctgtctgctgctgccatcaccgtgccccccagcgtgcccagccgggcccctgtgcccccagccccacccctgcccggggacagcggcaccatcatccccccacctccagcccctggggacagcaccaccccacctcctcctcctcctcctcctcctcctcctccacccctgcccggcggcacagccatcagccccccaccacccctgtctggagatgccaccatccccccacctccacccctgcctgagggcgtgggcatccccagccccagcagcctgcccggcggcacagccatccccccacctccacccctgcccggcagcgcccgcatccccccacctcctccacccctgcccggcagcgctggcatccccccacctcctccacccctgcctggagaggccggcatgcctcctcctcctccacccctgcccggcggccctggcatccccccacctccacccttccctgggggccctggcatccccccacctcctcctggcatgggcatgcctcctcctccacccttcggcttcggcgtgcctgctgcccctgtgctgcccttcggcctgacccccaagaagctgtacaagccagaggtgcagctgcggcggcccaactggagcaagctggtggccgaggacctgagccaggactgcttctggaccaaggtgaaggaggacagatttgagaacaatgagctgtttgccaagctgaccctgaccttcagcgcccagaccaagaccaagaaggaccaggagggcggggaggagaagaagtctgtgcagaagaagaaggtgaaggagctgaaggtgctggacagcaagacagcccagaacctgagcatcttcctgggcagcttcaggatgccctaccaggagatcaagaatgtcatcctggaggtgaatgaggccgtgctgacagagagcatgatccagaacctgatcaagcagatgcctgagcctgagcagctgaagatgctgtctgagctgaaggatgaatatgatgacctggccgagagcgagcagtttggagtggtgatgggcaccgtgccccggctgcggccccggctgaatgccatcctcttcaagctgcagttcagcgagcaggtggagaacatcaagccagaaattgtgtctgtgacagctgcctgtgaggagctgaggaagtctgagagcttcagcaacctgctggagatcaccctgctggtgggcaactacatgaatgccggcagcagaaatgctggggccttcggcttcaacatctccttcctgtgcaagctgcgggacaccaagagcacagaccagaagatgaccctgctgcacttcctggccgagctgtgtgaaaatgactacccagatgtgctgaagttcccagatgagctggcccacgtggagaaggccagccgggtgtctgctgagaacctgcagaagaacctggaccagatgaagaagcagatcagtgatgtggagagagatgtgcagaacttccctgctgccacagatgagaaggacaagtttgtggagaagatgaccatctttgtgaaggatgcccaggagcagtacaacaagctgaggatgatgcacagcaacatggagaccctgtacaaggagctgggggagtacttcctgtttgaccccaagaagctgtctgtggaggagttcttcatggacctgcacaacttcaggaacatgttcctgcaggccgtgaaggagaaccagaagagaagagaaacagaggagaagatgagaagagccaagctggccaaggagaaggccgagaaggagcggctggagaagcagcagaagcgggagcagctgattgacatgaatgcagaaggagatgagaccggggtgatggacagcctgctggaggccctgcagagcggggccgccttccggaggaagaggggcccccggcaggccaacaggaaggccggctgtgctgtgaccagcctgctggccagcgagctgaccaaggatgatgccatggctgctgtgcctgccaaggtgtccaagaacagcgagaccttccccaccatcctggaggaggccaaggagctggtgggccgggccagctag

SEQ ID NO: 35734 - DNA, 3795 bp, Artificial Sequence
  derived and/or modified sequence
atggagcccccaggcggcagcctgggccctggccggggcacccgggacaagaagaagggccgcagcccagatgagctgcccagcgctggaggagatggcggcaagagcaagaagttcctggagcgcttcacctccatgaggatcaagaaggagaaggagaagcccaacagcgcccacaggaacagcagcgccagctatggagatgaccccacagcccagagcctgcaggatgtgtctgatgagcaggtgctggtgctgtttgagcagatgctgctggacatgaacctgaatgaggagaagcagcagcccctgcgggagaaggacatcatcatcaagcgggagatggtgtcccagtacctgtacaccagcaaggccggcatgagccagaaggagagcagcaagagcgccatgatgtacatccaggagctgcggagcggcctgcgggacatgcccctgctgagctgcctggagagcctgcgggtgtccctgaacaacaaccctgtgtcctgggtgcagaccttcggggctgagggcctggccagcctgctggacatcctgaagaggctgcatgatgagaaggaggagacagctggcagctatgacagcaggaacaagcatgagatcatccgctgcctgaaggccttcatgaacaacaagtttggcatcaagaccatgctggagacagaggagggcatcctgctgctggtgcgggccatggaccctgctgtgcccaacatgatgattgatgctgccaagctgctgagcgccctgtgcatcctgccccagcctgaggacatgaatgaaagagtgctggaggccatgacagagcgggcagagatggatgaggtggagcgcttccagcccctgctggatggcctgaagagcggcaccaccatcgccctgaaggtgggctgcctgcagctgatcaatgccctgatcaccccagctgaggagctggacttccgggtgcacatccgctctgagctgatgaggctgggcctgcaccaggtgctgcaggacctgcgggagattgaaaatgaagacatgagggtgcagctgaatgtgtttgatgagcagggcgaggaggacagctatgacctgaagggccgcctggatgacatccgcatggagatggatgacttcaatgaggtgttccagatcctgctgaacacagtgaaggacagcaaggccgagccccacttcctgagcatcctgcagcacctgctgctggtgagaaatgactatgaggcccggccccagtactacaagctgattgaggagtgcatcagccagatcgtgctgcacaagaatggagctgaccctgacttcaagtgccgccacctgcagatcgagattgagggcctgattgaccagatgattgacaagaccaaggtggagaagtctgaggccaaggctgctgagctggagaagaagctggacagcgagctgacagcccggcatgagctgcaggtggagatgaagaagatggagagtgactttgagcagaagctgcaggacctgcagggcgagaaggatgccctgcacagcgagaagcagcagatcgccacagagaagcaggacctggaggccgaggtgtcccagctgaccggggaggtggccaagctgaccaaggagctggaggatgccaagaaggagatggccagcctgtctgctgctgccatcaccgtgccccccagcgtgcccagccgggcccctgtgcccccagccccacccctgcccggggacagcggcaccatcatccccccacctccagcccctggggacagcaccaccccacctcctcctcctcctcctcctcctcctcctccacccctgcctggaggagtgtgcatcagcagcccccccagcctgcccggcggcacagccatcagccccccaccacccctgtctggagatgccaccatccccccacctccacccctgcctgagggcgtgggcatccccagccccagcagcctgcccggcggcacagccatccccccacctccacccctgcccggcagcgcccgcatccccccacctcctccacccctgcccggcagcgctggcatccccccacctcctccacccctgcctggagaggccggcatgcctcctcctcctccacccctgcccggcggccctggcatccccccacctccacccttccctgggggccctggcatccccccacctcctcctggcatgggcatgcctcctcctccacccttcggcttcggcgtgcctgctgcccctgtgctgcccttcggcctgacccccaagaagctgtacaagccagaggtgcagctgcggcggcccaactggagcaagctggtggccgaggacctgagccaggactgcttctggaccaaggtgaaggaggacagatttgagaacaatgagctgtttgccaagctgaccctgaccttcagcgcccagaccaagaggaccaagaaggccaagaaggaccaggagggcggggaggagaagaagtctgtgcagaagaagaaggtgaaggagctgaaggtgctggacagcaagacagcccagaacctgagcatcttcctgggcagcttcaggatgccctaccaggagatcaagaatgtcatcctggaggtgaatgaggccgtgctgacagagagcatgatccagaacctgatcaagcagatgcctgagcctgagcagctgaagatgctgtctgagctgaaggatgaatatgatgacctggccgagagcgagcagtttggagtggtgatgggcaccgtgccccggctgcggccccggctgaatgccatcctcttcaagctgcagttcagcgagcaggtggagaacatcaagccagaaattgtgtctgtgacagctgcctgtgaggagctgaggaagtctgagagcttcagcaacctgctggagatcaccctgctggtgggcaactacatgaatgccggcagcagaaatgctggggccttcggcttcaacatctccttcctgtgcaagctgcgggacaccaagagcacagaccagaagatgaccctgctgcacttcctggccgagctgtgtgaaaatgactacccagatgtgctgaagttcccagatgagctggcccacgtggagaaggccagccgggtgtctgctgagaacctgcagaagaacctggaccagatgaagaagcagatcagtgatgtggagagagatgtgcagaacttccctgctgccacagatgagaaggacaagtttgtggagaagatgaccatctttgtgaaggatgcccaggagcagtacaacaagctgaggatgatgcacagcaacatggagaccctgtacaaggagctgggggagtacttcctgtttgaccccaagaagctgtctgtggaggagttcttcatggacctgcacaacttcaggaacatgttcctgcaggccgtgaaggagaaccagaagagaagagaaacagaggagaagatgagaagagccaagctggccaaggagaaggccgagaaggagcggctggagaagcagcagaagcgggagcagctgattgacatgaatgcagaaggagatgagaccggggtgatggacagcctgctggaggccctgcagagcggggccgccttccggaggaagaggggcccccggcaggccaacaggaaggccggctgtgctgtgaccagcctgctggccagcgagctgaccaaggatgatgccatggctgctgtgcctgccaaggtgtccaagaacagcgagaccttccccaccatcctggaggaggccaaggagctggtgggccgggccagctag

SEQ ID NO: 35735 - DNA, 3792 bp, Artificial Sequence
  derived and/or modified sequence
atggagccccccggcggcagcctgggccccggccggggcacccgggataaaaaaaagggtcgctcaccggatgaactcccctcggccggtggcgatgggggaaaatctaaaaaattcctggagcgcttcacatctatgagaatcaagaaggaaaaggaaaagcctaattctgctcaccgaaactccagcgcctcttacggagatgatccgaccgcccagtccctgcaggacgtctctgatgagcaagtgcttgtgttgtttgagcaaatgctgctggatatgaacctcaacgaggaaaagcagcagccgttgagagaaaaggatatcattatcaaaagagagatggtctcacagtatctctataccagtaaggcaggcatgagtcagaaagagtcttctaaatcagcaatgatgtacattcaggaactcaggtcaggactgagggacatgcctctcctctcctgtcttgaatctctcagagttagcttgaacaataaccccgtgtcctgggtccaaactttcggcgctgaggggctggctagcctactggatattcttaaacggctccacgacgagaaggaggaaaccgcaggcagttatgattcgcgcaacaagcacgagatcatacggtgcttaaaggccttcatgaacaacaagttcggaatcaagaccatgctggagacagaggagggcatcttattgctggtgcgcgccatggatcctgcagtacccaacatgatgatcgatgctgcaaaactcctgtccgcactctgcattctaccccagcccgaagatatgaatgaaagggtcctggaagccatgacagaacgagcagaaatggatgaggtcgagcgcttccagcctctgctggacgggctcaagtcgggcactacgatcgccctgaaagtaggctgcctgcagttaatcaacgccctgatcacacccgctgaggagcttgattttagagtacatatacggtcggagctgatgagattggggctgcatcaggttctccaggatctcagagaaattgaaaatgaggacatgagagtacagcttaacgtctttgatgagcaaggcgaagaagactcttacgacttgaagggacggctcgacgacatccgcatggagatggatgactttaatgaggtgtttcaaatactgctgaataccgtcaaagattctaaggctgagccccattttctttctatcctgcagcacctgctgctagtgcggaacgactacgaagctaggcctcaatattacaaattaatcgaggagtgcatcagccagatcgtgcttcacaaaaatggagcagatcccgattttaagtgcaggcatttacagatcgaaatcgaaggactgatcgaccaaatgatcgataagacaaaagtcgagaaaagcgaagcgaaggctgccgagttggagaagaagctggacagcgaactgactgctcggcatgagctccaggttgagatgaagaagatggagagtgattttgagcaaaaactgcaggatttgcaaggtgagaaggatgctctacacagcgagaagcaacagatagcaactgagaaacaagatctggaagcggaagtgagccagctaaccggcgaagtcgcgaagctgacaaaagaactcgaagacgcgaagaaagagatggcttctctcagcgccgctgcaattacagtcccgccttctgtcccatctcgcgcccctgtacccccagcccccccgctccctggcgattctggtaccataattcccccaccaccagctcctggtgatagtacaacaccccctcccccaccacccccccctccaccccctccccccctcccaggaggcgtgtgtatctcctcaccgcccagtctgcccggcgggacggctatctcaccccctccacctctgtctggggacgccactatccctcccccgccccctctgcccgagggcgtcggaatcccttcaccttcctctttacctgggggcacagctatcccacctcccccgcccctgcccggatctgctcggatccccccaccccccccacccttgccagggtccgcaggcatccctccccctccccctcccctaccaggagaagcgggtatgccaccaccaccgcccccgttgccagggggacccggaatcccccctcctcccccattccccggcggccccggcatccctccaccacctccggggatgggaatgcccccccctcctccttttggatttggtgtaccagccgcccctgttttgcctttcgggcttacccctaaaaaactgtacaaacccgaagtgcagctgagacggccaaattggtctaagctggtagccgaagatctgtcacaagattgtttctggacaaaagtgaaagaggaccggtttgagaataatgaattattcgcaaaactcacgctcaccttcagcgcacagactaagacttccaaggccaagaaagaccaggaaggcggcgaagaaaaaaagtccgtacagaaaaaaaaagtaaaagaattaaaggtgctggatagcaagacggcacaaaatctgtctatatttttggggagtttcaggatgccctaccaggagattaagaatgttatccttgaggtgaatgaggctgtactgactgagagcatgatccagaatctcattaagcagatgcctgaacctgagcagttgaaaatgctatccgagctgaaggacgagtacgatgacttggctgagtcggaacagttcggagtcgtgatgggcactgtgcctaggttgcgcccaagactaaatgcgatcctcttcaagctccagttttctgaacaggtcgagaacatcaaacccgagattgtgtccgtaacagcagcatgcgaagaactacggaaatccgaatcattctccaacttgctcgaaatcacactccttgtgggtaactatatgaatgccggaagtcgcaacgccggtgcatttggcttcaacatttcctttctgtgcaaactgcgcgatactaagtctacagaccagaagatgactctgctgcactttctcgcggagctgtgtgagaacgattatcctgacgtgcttaaattcccggacgaactcgcacacgtcgaaaaggcctcaagggttagtgccgagaatctacagaagaatctggaccagatgaaaaaacagatcagtgacgtcgagcgggatgttcagaacttccctgctgccaccgacgagaaggataagtttgtggagaagatgacttcctttgttaaagatgcccaggaacagtataacaaattacgaatgatgcattcaaatatggaaacactttataaggaactaggcgagtattttctatttgatccgaagaagctctctgtggaagaattttttatggatctccacaattttagaaatatgttcctccaggctgtcaaggagaatcagaagcggcgggaaaccgaggaaaaaatgagacgcgccaagctcgcaaaagaaaaagccgagaaggaacggctcgagaaacagcagaaaagggaacagctgattgatatgaacgccgaaggggacgaaacgggcgtcatggactctctgttggaggcactccagagcggagccgcattcaggaggaagagagggccccgacaggctaatcggaaggctggatgcgccgttacctccctcctggcctctgagttgacaaaggatgatgccatggctgcagttcccgctaaagtttctaagaatagtgaaacctttcctactatattagaggaagcaaaggaactggtagggcgagcctcatag

SEQ ID NO: 35736 - DNA, 3747 bp, Artificial Sequence
  derived and/or modified sequence
atggagccccccggcggcagcctgggccccggccggggcacccgggataagaaaaagggccgctctcctgacgaactaccgagtgcaggcggcgacggaggcaagtcaaagaagttcctggagcgatttacctcgatgaggatcaaaaaagagaaagagaagcccaactccgcacaccggaactccagcgcgagctacggcgacgaccctacagcacaaagtctgcaggatgtgagcgacgagcaagtgctggtattgtttgaacaaatgttgctggacatgaaccttaacgaagaaaagcagcaaccacttagggaaaaagacataatcataaaaagggagatggtaagccagtacctctacacatccaaagctggaatgtcacagaaggagagttcaaagagcgcgatgatgtacattcaggaacttcgatctggattgagggacatgcccttgctgagctgccttgagagcttgagggtgtccctaaataacaaccccgtgtcctgggtgcagacttttggggccgaaggcctggcctcactcctggatatcctgaaaaggcttcacgacgagaaggaagaaacagctggatcttacgacagccgcaacaaacacgagattatacgctgcctgaaggcctttatgaacaataaatttgggatcaaaaccatgctcgaaaccgaggaggggattctcctgctggtgcgggcaatggaccctgctgtccctaacatgatgatcgacgctgctaagcttctcagtgccctctgtatactccctcaacctgaggacatgaatgaacgtgttctcgaggccatgacagaaagggccgaaatggacgaggtagagagattccaaccgctcctggatgggctgaaatctgggacaaccattgcactgaaagtagggtgcttgcagctgattaacgctctaatcacgcccgcagaagaactggacttcagggtccatattagatccgaactaatgcggctcgggttgcatcaggtgttgcaggacttacgggagatagaaaatgaggatatgagagttcagttaaatgtcttcgatgaacagggggaggaggatagctacgacctgaaggggcggcttgacgacatacgcatggagatggacgacttcaacgaggtgttccagattttgctgaacacagtgaaggattcaaaggctgagcctcatttcttgagtattcttcagcacctgctgcttgtgaggaatgattacgaggcgaggcctcaatattacaaactcatcgaggaatgtatatcacagatagtgctgcacaaaaacggagctgatcctgatttcaaatgccgccatctccagatcgaaattgaaggtttgatcgatcaaatgattgataaaaccaaggttgaaaagtccgaagctaaagccgcggaattagagaaaaaactggacagcgaactgaccgccagacatgagctgcaggtggaaatgaagaagatggaaagcgactttgagcagaagctacaggacttgcaaggggagaaagatgccctgcattctgagaagcagcaaattgccaccgagaagcaagacctagaggctgaggtgtcccagctgaccggagaagtcgctaaactaaccaaggaactcgaggatgccaagaaggagatggctagcctctctgccgccgcgattacagtcccgccctcagtcccatcacgggcgccagtgccacccgcacctcctctccctggtgactccgggacaatcatcccaccgccacccgccccgggcgattccaccactccccctcccccgcctcctcctccccccccccctccgccactccccgggggaacggctatcagcccccctcctcctttgtcgggggacgctacaatcccaccccccccccctctgcctgagggggtggggatcccaagtcctagctccctgcccgggggtaccgcaataccaccaccgccacccctgcctgggtccgctagaatccctcctccccctccccctttgcccggctcagccggcatcccacctccgcccccacccctgccaggggaggcaggaatgcctccccccccccccccactccctggcggaccaggaatccccccacccccccccttccctggcgggccaggcattcctcctcccccccccgggatggggatgcccccccccccaccatttggctttggcgttcctgccgctccagtccttccgttcggactcaccccaaagaaattgtacaaacccgaggttcagctgagacgcccaaactggtccaagctagtcgcagaagacctttcgcaggactgcttttggacgaaggtgaaagaggacaggtttgagaataacgaactcttcgctaaactcaccctgaccttctctgcacagaccaagacgaaaaaagaccaggaggggggggaagagaagaaaagcgtgcaaaaaaaaaaagtgaaggagctgaaagtgctcgactccaagactgcccagaacctgagcatctttcttgggagctttcggatgccttaccaagagatcaagaatgtgatcctggaagtgaacgaggccgtgctaactgaatcaatgattcagaatctcatcaagcaaatgcccgagccggagcagttgaaaatgctctctgagttgaaggacgaatacgatgacctcgccgagtcagaacagtttggtgtggtaatgggcacagtgcccaggctgagaccccggctgaacgcaatactgtttaaactgcagttttcagagcaggtggagaacatcaagcccgagatagtgtccgttacggctgcctgcgaggagctgcgcaagagtgagagcttcagtaatttgttggagatcaccctcctggtgggtaattacatgaacgcgggatcccgtaacgccggagcgttcggatttaatatcagcttcctctgcaagctgagagacactaagtcaaccgatcagaaaatgaccctgttgcatttcttggcagagctgtgtgagaatgattaccccgatgttctgaagttcccggacgagctggcacacgtggagaaggcatcaagggtctctgctgaaaacttgcaaaagaacctggatcaaatgaagaagcaaatctccgacgtagaacgtgatgtgcagaactttcctgccgctacagatgagaaggataaattcgtagagaagatgacaatatttgtcaaggatgcacaggaacagtataacaagttgcggatgatgcattccaatatggaaacactgtacaaggagctgggcgagtacttcctcttcgatccaaagaaactgtctgtcgaggagttctttatggacctccacaatttccggaatatgtttctacaggccgtgaaagagaaccagaagagacgcgagactgaggaaaaaatgcgccgggcaaaactcgcaaaggagaaggctgagaaagaacggctagagaagcagcaaaagagagaacagctaatcgatatgaatgctgagggggatgaaaccggggtgatggattctcttttggaagcactacagagtggggctgcattccgccgcaagcgcggcccccgacaggccaatcgaaaagctgggtgtgctgttacgagccttttagctagcgagttaacaaaagacgacgctatggcagccgtccccgctaaagtgtctaagaacagcgagacattccctactattctagaggaggcgaaggagttagtgggcagggccagctag

SEQ ID NO: 35737 - DNA, 3795 bp, Artificial Sequence
  derived and/or modified sequence
atggagccccccggcggcagcctgggccccggccggggcacccgggataagaaaaaggggaggagcccagacgaattgccttctgccggaggcgatggagggaagagtaaaaaatttctggagcgatttacatccatgagaatcaagaaggagaaggaaaagcctaacagcgcacatcgcaattcctctgcgagctacggcgatgaccctacagcacagagtcttcaggatgtgagcgacgaacaggttctggtcttgttcgagcagatgctgctagacatgaatctgaacgaagaaaagcaacagcccctcagggaaaaggacattattatcaagagagaaatggtatctcagtatctgtatacatcaaaagcaggtatgtcacagaaggagtcctccaagtctgcaatgatgtacattcaagaactccgttcaggactccgggacatgccactcctcagctgtctcgaatccctccgcgtatccctgaataacaaccccgtatcgtgggtccagacctttggtgcggaaggattggctagcttgctggacatcctcaagcgcttgcacgacgagaaagaagaaacggcaggctcttacgacagcaggaacaaacatgagattatccggtgtttaaaagccttcatgaacaataaatttggaattaagacaatgctggaaacagaagagggaatccttctactggtgcgggccatggatcctgcagtgcctaacatgatgatcgatgctgccaaactgttatctgcattgtgtatcctacctcaacccgaggatatgaacgagcgtgttctggaagccatgacagaacgggccgaaatggacgaagttgagagatttcagccattattagatggtctcaagagcggaactactatcgccctcaaagtggggtgtctccaactcatcaacgctctcataactccagctgaggagctggattttcgtgtgcatatccgctcagagctcatgcgcttaggactccatcaggtgctgcaggatctcagagagatcgagaatgaggacatgcgcgtccagctgaacgtgttcgacgagcaaggggaagaagactcttacgacctgaagggacggttggacgacattcgaatggaaatggacgacttcaacgaggtcttccagatcctactcaacacagtgaaggattccaaggctgaaccacatttcttgtctattctgcagcacctgctcctggtccgcaacgattatgaagcacgtcctcaatactacaagcttattgaggagtgcatctcacagattgtgcttcacaagaatggagctgatccagatttcaagtgtaggcacctgcagattgaaatagaagggcttatcgaccagatgatcgacaagaccaaagtggagaaatccgaagcgaaagcagctgagcttgagaagaagttggactctgagcttacagcgagacacgagctccaggtagaaatgaagaagatggagtcggacttcgaacagaaactgcaggatcttcagggcgagaaagacgctctgcattccgagaaacagcaaatagcaaccgagaaacaagacctggaggccgaggtttctcagcttactggggaagtcgcaaagctgaccaaggagcttgaggatgctaagaaggagatggccagtctttcggctgccgctataactgttcccccctctgtgccctcgcgggctcccgtgccacctgcgcctccccttcctggagactctggcactattatccccccccccccagcccccggcgattccacaacgccgccacctcccccaccaccgcccccgccaccacccccattgcctgggggcgtctgtatttccagccctccaagtctaccaggcggtacagctattagtcctcctcctccactcagcggggatgcgacgatccccccaccccccccactccctgaaggcgtagggatcccaagcccctctagcctgcccggaggcaccgcaatccctcctccgcctccactgcctggaagtgcacgtataccccccccaccaccccctcttcctgggagtgctggcatcccgccccccccccctccacttccaggagaagctgggatgccacctcctcccccgccactcccaggaggtccgggcatcccgccccctccgcccttcccaggcggccccggcattccacctccaccccctggcatgggcatgccacctcccccaccctttggattcggggtgccggctgcaccagtgctgccatttggcctgactcccaagaagttgtacaaacccgaggtgcagctccgccggcctaactggtccaagttagtagcagaagatctgtcccaagactgcttttggactaaagttaaggaggaccgattcgagaacaacgagctgttcgctaaattgacactcacgttctctgcacagacgaaaaggacgaagaaagccaaaaaggatcaggaagggggcgaagaaaagaagtcagtccagaaaaagaaagtgaaggaattgaaggttctggattcgaagacagctcagaatctgagtatctttctggggagcttccgaatgccttatcaggagataaagaatgtgattcttgaggtcaacgaggccgtgctgacagagagcatgattcaaaaccttatcaaacagatgcccgaacccgaacagctgaaaatgctgtcagagcttaaagatgagtatgacgatttggccgagagcgagcagtttggcgtggtaatggggaccgtaccaaggctgcgccctcgattaaacgctattctcttcaaactccaattctctgagcaagttgagaatattaaaccagagatagtgtcagtgacggccgcctgtgaggagctgagaaagtcagaatctttttctaacctgctggaaatcacgttattagtcggaaactacatgaacgctggcagtcgtaacgccggagccttcggtttcaacatctccttcctatgcaagttgagggacaccaaaagcacagatcagaaaatgacactcttacacttcttggccgagctttgcgaaaatgactacccagatgttctcaagttccctgatgagttagcgcatgtcgagaaggcaagccgcgtgtccgccgaaaatctgcagaagaatctggatcaaatgaagaagcagataagcgacgtggaaagagatgttcagaactttcccgccgcgaccgacgagaaggacaagtttgtggaaaaaatgaccattttcgtgaaagacgcgcaggagcagtacaataagctgagaatgatgcactcaaacatggagacgctgtataaagaactcggggagtattttctgtttgatccgaaaaagctatcagtggaagagttcttcatggacctgcacaacttcaggaatatgttcctgcaagcagtgaaggaaaaccaaaaacggagggagacagaagaaaaaatgcgacgggccaagctagcaaaggagaaggccgagaaggagcgtctggagaagcaacagaagagggagcagctcatcgatatgaacgcggagggtgacgagaccggcgtcatggacagtctactggaggctctccaatcaggcgcagcctttcgccgtaagcgcggtccaaggcaggctaaccggaaagcaggctgtgcggtgacatcacttttagctagcgagctgaccaaggacgacgccatggcagccgtgcctgcgaaagtctcaaagaatagtgagactttcccgaccattctcgaagaggccaaggagctggtggggagagcttcctag

SEQ ID NO: 35738 - DNA, 3792 bp, Artificial Sequence
  derived and/or modified sequence
atggagccccctggcggttccctcgggccagggaggggaacacgggataagaaaaaaggtcgctcacctgacgaactcccatctgcgggaggggacggcggaaagtccaagaaatttctcgagcgctttacgtcgatgaggattaaaaaagaaaaagagaagcctaactcagcgcatcgcaacagcagcgcgagttatggcgacgatcctaccgcccagagcctccaggacgtcagcgacgagcaagtgctcgtgctcttcgaacagatgctgctggatatgaatctcaatgaagagaaacagcaaccgctgcgcgagaaagacatcataatcaagcgcgagatggtctcccagtacctgtatacttccaaggcagggatgtctcagaaagagtcatcaaagtcagctatgatgtacatacaggagctcaggtccggtctaagggacatgcccctgctctcttgcctggagagtctccgtgtatcgctgaataacaacccagtgagttgggttcagacctttggggcagagggcctcgccagtctgctggatatcctaaagcgcttgcacgatgagaaggaggagacagccggaagttacgacagccggaacaagcacgagatcatccggtgtctcaaagcgtttatgaacaataaattcggaatcaagaccatgctcgagactgaggaagggatccttctactggttcgcgctatggatccagctgtcccaaatatgatgatcgacgctgccaagcttctttctgctctttgtatcctgccacagccagaggacatgaatgagcgcgtgctcgaggccatgaccgaaagggccgaaatggacgaagtggagcgattccaacctctcctagacggactcaagagcggaactacaatcgctttgaaggtgggctgccttcagctgataaatgctttgattaccccagccgaggagttggacttccgggttcacattaggagcgagttgatgcgacttggattgcatcaggtactgcaggacttgcgagagattgagaatgaagatatgcgggtccagctgaatgtcttcgatgagcagggtgaggaggactcctatgacttgaagggcaggctggacgatatcagaatggaaatggacgacttcaatgaggtgtttcaaattcttcttaacacagtgaaagatagcaaagccgagccccactttcttagcatacttcaacatctacttctcgtgcgtaatgactacgaagccagacctcagtactacaaactgattgaggagtgtatctctcagatcgtccttcacaagaatggagccgacccggactttaaatgcaggcacttgcagatagaaatcgagggacttattgatcagatgatcgacaagactaaagtagagaaatcggaagccaaagccgctgaactcgagaaaaagttagacagtgagttgactgcgagacatgagctgcaagtagaaatgaaaaagatggagtcagattttgaacagaagctgcaggatctgcagggtgaaaaagacgcattgcacagcgaaaagcagcagatcgcaacagagaagcaggatcttgaagccgaggtatcacagttgaccggggaagtcgcaaaactgacaaaagagctggaggacgctaagaaagagatggccagcctttcagctgccgctatcactgttcctccttctgtgcctagtcgtgctcccgtacccccagcacccccacttcctggcgacagcggcacaatcattcccccaccccctgcccctggggatagcaccactccccctcctccaccccctccgcctcccccaccacctccactgcccggtggggtgtgtattagcagcccccctagtctgcctggtggaaccgctatttctccgccaccacctttatctggtgacgcaaccatcccacctccccctcccttacctgaaggggtcggcatccccagcccgagctcgctccccggtggtaccgctattccacctcccccaccgctgcccggttctgctcggatccccccacctccgcctcccctcccaggctccgccggaatcccgccacctcctccaccattgcctggcgaggcgggtatgccccctcctccaccacccctgccagggggtccaggaatcccaccaccccctcctttcccaggcggacctggaatccccccaccaccacccggtatggggatgcctccaccccctccctttggcttcggggtcccagctgctcccgtcctgcccttcgggctgactccaaagaaactgtacaaacccgaggtgcagttgcgccgtcctaattggtccaaacttgtggccgaagacctgtcccaggattgtttctggacgaaggtcaaagaggacagattcgaaaacaacgagctctttgcaaaactcaccctgactttcagcgctcagacaaagacgagcaaagccaaaaaagaccaagagggtggggaggagaagaagtccgtccaaaagaagaaagtcaaggagctgaaagttctagactccaagacagctcagaacctttccatcttccttgggagcttcaggatgccatatcaagagatcaagaacgtgatcctcgaggtgaatgaagccgtgctgacagagagtatgattcagaacctgattaaacagatgccagaacctgaacagttgaagatgctgtcagagttaaaagacgagtacgatgacctggcagagtccgagcagttcggtgtggtgatgggaaccgtcccgagacttcggccaaggttgaacgcaatcctgttcaagctccaattctctgagcaggtggaaaacatcaagcctgagattgtatctgtcacagccgcttgtgaagagctaaggaagtccgaatctttctcaaacctcctggagatcacactgctggtcgggaattacatgaatgccggatcacggaatgctggcgcttttgggtttaacatttctttcctgtgtaagcttcgagacactaaaagcacagaccagaagatgactttattacacttcctcgccgaactatgcgagaatgattacccagatgtccttaaatttcccgacgaattggctcatgtggagaaggctagcagagtgagcgccgagaatctgcagaagaacctggatcaaatgaagaagcaaatttcggacgtcgaacgggacgttcagaattttccagctgccactgacgaaaaggacaagtttgtggaaaaaatgacttcatttgtgaaggacgcacaggagcagtacaacaagctgagaatgatgcattccaacatggagacactctataaggagctcggcgaatattttctatttgacccgaagaaactgtctgtggaggagttcttcatggacctgcataatttccgtaacatgttcctccaggctgtaaaagagaatcaaaaacgccgtgagactgaggagaagatgagacgggctaaactcgctaaggagaaagccgaaaaagagcggctggagaagcagcaaaagcgcgaacagttgatcgacatgaacgctgaaggtgatgagacgggggtgatggattccctgctggaggcactccaaagcggcgcagccttccggcgaaagagaggccctaggcaagccaatcgcaaggcgggttgcgctgtgaccagcctcctggcatctgaattgacaaaagatgacgccatggcggcagtgcccgcaaaagtgtccaagaacagcgagacttttcccacgatattagaggaggctaaagaactcgtgggcagagcctcctag

SEQ ID NO: 35739 - DNA, 3747 bp, Artificial Sequence
  derived and/or modified sequence
atggaacctcccggaggcagcttggggcctgggaggggcacccgtgacaagaagaaaggaaggtccccagatgagttgcctagcgcaggtggggacggcggaaagtcaaagaaattcctggagagattcacatctatgcgtatcaagaaggagaaagagaagcctaacagtgcacacaggaactcttctgccagttacggagacgaccccacagctcagtccttgcaagatgtgtccgacgaacaggtgctggtcttatttgagcaaatgcttctggacatgaatttaaacgaagagaagcagcagcccctgagggagaaggacattatcattaagcgggagatggtatctcagtatctatacacatcgaaggcaggaatgtctcagaaggagtcatctaagagcgccatgatgtacattcaagaactcaggtctggcctgcgagatatgcccttgctctcgtgtttagaaagcctgagggtctctcttaataataacccagtctcatgggtccagacctttggggcagaaggcttagccagcctgctggacatcctgaagaggcttcatgacgagaaagaagagacagccggaagttatgactcaagaaataagcacgagattataagatgcctgaaggcatttatgaacaacaaatttggcatcaaaactatgcttgagactgaagagggaatactcctgcttgtccgcgctatggaccctgcagtacctaatatgatgattgacgctgctaagcttctgagcgcactctgcatacttccacagccagaagacatgaacgagcgcgttctagaagctatgaccgagcgggctgagatggacgaggtagagaggttccagccccttttagacggtttaaagtctggcacgaccattgccttaaaagtagggtgccttcagctgattaacgctctcattactccagccgaggaactcgatttccgagttcatatcagaagcgagcttatgaggttggggctccatcaagtgttgcaggatctgcgggagattgaaaacgaggacatgcgggttcaattgaatgtgttcgacgagcagggggaggaggacagttatgaccttaaggggaggctagacgacattagaatggagatggacgactttaatgaggtatttcagatcctgcttaacacagttaaggattctaaggcagagccccacttcctgagtatcttgcaacatctcctgctcgttagaaacgattatgaagcgagacctcaatactacaagctaattgaggaatgcatctcgcaaattgtgctgcacaagaacggtgcggatccggatttcaagtgtagacatctgcagatcgaaatcgagggacttatcgatcaaatgatcgataagactaaggtagagaagtccgaagcgaaggccgctgaactggagaaaaaactagactccgaactgacagccagacatgagctgcaagtggagatgaagaagatggagtccgacttcgaacaaaagcttcaggacctgcagggagagaaagacgcccttcatagcgaaaaacagcaaatagctactgagaaacaggacctggaggccgaggtgtcccagctcacaggtgaagtcgcgaaattaacaaaggagttagaggatgcgaagaaggaaatggcgagtctttctgcggcagcgatcactgtgcccccatctgtgccaagtcgagctccagtaccacctgctcccccactgcccggtgatagcgggactataatcccaccaccgcctgcacccggagattctaccaccccaccaccacccccaccgccaccccctccccctccacccttgcctgggggtaccgcaattagcccaccaccccctctgtctggagatgctaccatccccccacccccaccgctacctgagggggtcggaattccgtctccatccagcctgcccggtggaaccgccataccacctcctccacctcttccgggtagtgcccgtatcccacctccaccacctcccctgccgggtagcgccggtattccaccccctccacctcccctcccaggcgaagctggtatgccgccaccacctccccctttgccaggcggacccggaatcccccctccaccgccatttccagggggaccaggtatacctcctccacctccaggaatgggtatgccacccccaccacctttcggatttggcgtcccagccgcaccagtgctcccatttggtttgactcctaagaagctttataaacctgaagtgcagcttcggaggcccaattggtccaaactcgtcgccgaggacttgtctcaagactgtttttggacaaaagtcaaagaagatcgattcgagaataatgagctgttcgccaagctcacgctgacatttagcgcccaaacgaagaccaagaaggatcaggaggggggagaagaaaaaaaatcggtgcagaaaaaaaaggttaaggagttaaaagtcctagacagtaagaccgcccagaatctgtccatcttcctgggcagttttagaatgccatatcaggagataaaaaacgtgatcctggaagtgaacgaggctgtcctgacggagtccatgatacagaacttgatcaagcaaatgcccgagcctgagcaactcaaaatgcttagcgagctgaaggacgagtatgacgacttggccgaaagcgaacaattcggcgtggtgatgggcactgtaccgagattgcggcctaggttaaacgccattttattcaagctgcaattttctgagcaggtagagaatattaagcctgagattgtgtcagttaccgctgcctgcgaggaactaagaaagtctgagagcttttctaatctgttagagatcacattacttgtagggaattatatgaacgctggcagccggaacgccggagcctttggcttcaacatcagctttctgtgcaaactccgtgacactaaatctacagatcagaagatgactttgttacactttcttgctgaattgtgtgagaacgattaccccgatgtgcttaaattccccgacgaactggcacacgtggaaaaggcctccagggtgtcagccgagaatctgcagaagaacctcgaccaaatgaagaaacagatctcagatgtagaacgggacgtgcaaaacttcccagcagccaccgacgagaaggacaaattcgtcgaaaaaatgacaatttttgtgaaggacgcgcaggaacagtacaataagcttaggatgatgcactcaaacatggagacgctgtacaaggaactgggagaatactttttgttcgatccaaagaaacttagtgtagaggaatttttcatggacttgcacaatttcagaaacatgtttctgcaggctgtcaaggaaaatcaaaagcgcagagaaacagaagaaaagatgcggagagccaagctcgcaaaagagaaagccgagaaggagaggctggagaaacagcagaagagagaacagctgatagatatgaatgccgaaggcgacgagacaggcgtgatggactctctgttggaggctcttcaatcaggggctgcgttccgccgaaagaggggacctcggcaggcaaaccgaaaggctgggtgtgctgtcacttctctcctggcaagcgagctgacaaaagatgacgctatggcagcggtgcctgcaaaagtgtccaagaacagtgaaacattccccactattctcgaagaggctaaggagttagtgggacgcgcaagctag

SEQ ID NO: 35740 - DNA, 3795 bp, Artificial Sequence
  derived and/or modified sequence
atggagcccccaggcggatccctgggccctggacgtggaacacgagataagaagaagggtagaagccctgatgaactcccttccgctggtggagatgggggtaaatccaaaaagttcttggaacggttcacatctatgcgaatcaaaaaggagaaagagaaaccgaattccgctcatcgcaactcctcggccagttacggtgatgacccgacagcccaaagtctccaagacgtctcagacgagcaggtgctggtcctgtttgaacagatgctgctggacatgaacctgaatgaagaaaaacagcaaccactgcgggaaaaagatatcatcataaaaagagagatggtgtctcagtatctgtatacatcaaaagctggtatgagtcaaaaggagagtagcaaaagcgccatgatgtacatacaggagcttcgttctggtcttcgcgatatgccactattaagttgtctggaaagtcttcgcgtgagtctcaataacaaccctgtgtcatgggtgcagactttcggggctgagggcttagctagcctgctcgacatcctgaagagactccacgatgagaaggaggagactgccggtagttacgattccagaaataaacatgaaatcattaggtgcctgaaagcttttatgaacaacaagttcgggataaaaactatgcttgagacggaagaaggcatcctgctgctggtaagagctatggatccagcagtgcccaatatgatgattgatgccgctaaactattaagcgccctctgcatcctgccccaacccgaagacatgaacgagagggtccttgaggcaatgacagaacgagctgagatggacgaggtcgagagattccagccgcttttagacggtctgaaatcgggcaccacgatcgccctgaaagtcggttgccttcagctgatcaatgcactgattacgcctgcagaggagctggattttcgggtccatattagatctgagctcatgcggctcgggctccaccaggtgctgcaagacctcagggagattgaaaatgaggatatgcgggtgcagttgaatgtttttgatgagcagggcgaggaggactcctacgacctgaagggaaggttagacgacatccgcatggagatggatgatttcaacgaggtgttccagatcctgcttaacactgtgaaagactctaaggctgaaccccactttttatctatattgcagcacctgctgctggtgcgtaatgactatgaagcccgtcctcagtattacaagctgattgaagagtgtatttcacagattgtgctccacaaaaacggtgcagaccctgatttcaagtgtcgccatctgcagattgagatcgaaggcttgatcgaccagatgatcgacaaaaccaaggtggagaagtccgaagcgaaggccgctgagcttgagaagaaactggacagcgaactcaccgcacgtcatgagctccaggtggagatgaagaagatggagagtgattttgagcagaagcttcaggacctgcagggcgagaaggacgctctgcattcggaaaagcagcaaatagccacagaaaaacaggacctcgaggcggaagtatcacagttaaccggcgaggtcgctaaattgactaaggagctggaggatgctaagaaggagatggcatcactgagcgccgcagcaattaccgttcctcctagtgtcccatcccgcgcaccagtacctcctgcccctcccctgcccggagactccgggactataatccctccacctcctgcgcctggcgattcaacgacacctcctccacctccccctcctcctccccctcccccacccttacccggaggggtgtgtatcagcagtcctccctccctgcccggagggaccgccatctcaccacctccacccctgagtggcgatgccaccattccccctcccccaccactccccgaaggagtgggaattccatcgccctcgagtttacctgggggtactgccataccacctccaccccctcttcccggatctgccagaatccctccccctcccccacctttgcccggatctgcgggaattccccctcctccacctccattgccaggcgaggccggtatgcccccaccacctcccccactgccaggaggcccagggatcccaccacctccacccttccctgggggacctggcattcctccgccacctcccggaatgggcatgcctccgccacccccattcggcttcggagtgccagcggctccagttctgccatttggcttaacaccgaaaaagttgtataaaccagaggtgcagctcaggcgcccaaattggagtaagcttgtagctgaagatctgagccaggattgtttctggacgaaggtgaaagaggaccgctttgaaaacaacgaattgttcgccaagttaacattaacattttctgcccaaactaagcgaaccaagaaggccaaaaaggatcaggagggcggtgaagagaagaagtccgtgcagaaaaagaaggtgaaggaactaaaagtactagattctaaaacagcacaaaacctatcgatctttttaggttctttccgaatgccttaccaggagattaagaatgttatcttagaggtgaatgaggccgttctcactgagtccatgatacagaacctgattaaacagatgcccgagccagaacagctgaaaatgcttagtgaactgaaagatgaatatgatgacttggctgagtctgagcagttcggtgtggtcatgggaacagttcccagactgcgaccaaggctgaatgccatcctgttcaagctgcaattttccgaacaggtggaaaatatcaagcccgaaatcgtcagtgtaaccgctgcctgcgaggaactcagaaagtccgaaagtttcagcaacctattggagatcacactgttggttggtaattatatgaatgcgggtagccggaatgctggggcatttggctttaacatatcctttttatgcaaactccgggacaccaagtcaaccgaccagaagatgacactcctgcactttctggcagagttgtgcgagaatgactatcccgatgtgctcaaatttccggatgagctagcgcatgtggagaaggcaagcagggtgtccgctgagaatctgcagaagaatctcgatcagatgaagaagcaaatctccgacgtggagcgagacgtgcaaaacttccccgctgccaccgacgaaaaagataagttcgtagaaaagatgactatctttgtgaaagatgctcaggagcagtacaacaaactgagaatgatgcactcaaacatggagacactctacaaggagctgggagagtactttctgtttgatcctaagaaactctccgtggaggagttcttcatggacctccataattttaggaatatgttcctgcaagcagttaaggaaaatcagaagcgacgagagacggaggagaagatgagacgggcaaagctggcgaaggagaaagccgagaaagagcgactggaaaagcagcagaagcgggaacaattaatcgatatgaatgccgaaggcgacgagacaggtgtgatggattctctgctggaggctttacagtcaggcgcagcctttaggaggaagcgtggaccaaggcaagccaatcggaaagctgggtgcgccgtcacatccctgctagcgtccgagctcaccaaggatgatgcaatggccgcagtgccagccaaagtgtctaaaaattcagagacattcccaaccattctcgaggaagcaaaagaattagtcggccgtgctagctag

SEQ ID NO: 35741 - protein, 1370 aa, Artificial Sequence
  derived and/or modified sequence
MATGGRRGAAAAPLLVAVAALLLGAAGHLYPGEVCPGMDIRNNLTRLHELENCSVIEGHLQILLMFKTRPEDFRDLSFPKLIMITDYLLLFRVYGLESLKDLFPNLTVIRGSRLFFNYALVIFEMVHLKELGLYNLMNITRGSVRIEKNNELCYLATIDWSRILDSVEDNYIVLNKDDNEECGDICPGTAKGKTNCPATVINGQFVERCWTHSHCQKVCPTICKSHGCTAEGLCCHSECLGNCSQPDDPTKCVACRNFYLDGRCVETCPPPYYHFQDWRCVNFSFCQDLHHKCKNSRRQGCHQYVIHNNKCIPECPSGYTMNSSNLLCTPCLGPCPKVCHLLEGEKTIDSVTSAQELRGCTVINGSLIINIRGGNNLAAELEANLGLIEEISGYLKIRRSYALVSLSFFRKLRLIRGETLEIGNYSFYALDNQNLRQLWDWSKHNLTITQGKLFFHYNPKLCLSEIHKMEEVSGTKGRQERNDIALKTNGDQASCENELLKFSYIRTSFDKILLRWEPYWPPDFRDLLGFMLFYKEAPYQNVTEFDGQDACGSNSWTVVDIDPPLRSNDPKSQNHPGWLMRGLKPWTQYAIFVKTLVTFSDERRTYGAKSDIIYVQTDATNPSVPLDPISVSNSSSQIILKWKPPSDPNGNITHYLVFWERQAEDSELFELDYCLKGLKLPSRTWSPPFESEDSQKHNQSEYEDSAGECCSCPKTDSQILKELEESSFRKTFEDYLHNVVFVPRPSRKRRSLGDVGNVTVAVPTVAAFPNTSSTSVPTSPEEHRPFEKVVNKESLVISGLRHFTGYRIELQACNQDTPEERCSVAAYVSARTMPEAKADDIVGPVTHEIFENNVVHLMWQEPKEPNGLIVLYEVSYRRYGDEELHLCVSRKHFALERGCRLRGLSPGNYSVRIRATSLAGNGSWTEPTYFYVTDYLDVPSNIAKIIIGPLIFVFLFSVVIGSIYLFLRKRQPDGPLGPLYASSNPEYLSASDVFPCSVYVPDEWEVSREKITLLRELGQGSFGMVYEGNARDIIKGEAETRVAVKTVNESASLRERIEFLNEASVMKGFTCHHVVRLLGVVSKGQPTLVVMELMAHGDLKSYLRSLRPEAENNPGRPPPTLQEMIQMAAEIADGMAYLNAKKFVHRDLAARNCMVAHDFTVKIGDFGMTRDIYETDYYRKGGKGLLPVRWMAPESLKDGVFTTSSDMWSFGVVLWEITSLAEQPYQGLSNEQVLKFVMDGGYLDQPDNCPERVTDLMRMCWQFNPKMRPTFLEIVNLLKDDLHPSFPEVSFFHSEENKAPESEELEMEFEDMENVPLDRSSHCQREEAGGRDGGSSLGFKRSYEEHIPYTHMNGGKKNGRILTLPRSNPS

SEQ ID NO: 35742 - protein, 83 aa, Artificial Sequence
  derived and/or modified sequence
PYQNVTEFDGQDACGSNSWTVVDIDPPLRSNDPKSQNHPGWLMRGLKPWTQYAIFVKTLVTFSDERRTYGAKSDIIYVQTDAT

SEQ ID NO: 35743 - DNA, 4113 bp, Artificial Sequence
  derived and/or modified sequence
atggccaccggagggcgtcggggcgcggctgcagctcccctcctggtggcagtcgccgccttgctgctgggagctgccggtcatctgtaccctggcgaggtctgccccggtatggacatccgcaacaacctgacacggttgcacgagctcgagaattgttccgtgattgaaggccaccttcaaattctgctgatgtttaagaccaggccagaagacttccgtgacctgtctttccctaagctgattatgatcactgactacctgctcctgtttcgggtgtacggactggagtccctcaaagacctgttcccaaatctgaccgtgatacgaggctctcggctcttctttaattatgcacttgttatatttgaaatggttcatctcaaggaattaggactgtacaacctgatgaacattacacgcggctcggtgaggatcgaaaaaaataacgagctctgttacctagccacgatcgattggagccggattctagactcggtcgaggataactacatcgttcttaacaaagatgataacgaagagtgcggggacatctgcccagggaccgccaaaggcaagacgaattgtcctgcaacggtcatcaacgggcaattcgtggagagatgctggacacatagccactgccagaaggtgtgtcctactatttgcaaaagtcatggctgtacagctgaaggcctttgttgtcattccgaatgcctgggtaactgttctcaacccgacgatcctacaaagtgcgtggcttgtaggaatttctatctggatggccgctgtgtggaaacctgcccccctccttactaccattttcaagattggaggtgtgtgaacttttccttctgccaggacctccatcacaagtgcaagaacagtcgcaggcaaggctgtcatcagtatgtcattcacaacaataagtgcatccctgaatgtccctctgggtacacaatgaacagctctaatttgttgtgcactccctgcttgggcccatgccctaaggtgtgccatctgttagagggagagaagacaatagactcagtgacgtccgcccaggaactgcgggggtgcaccgtaatcaatgggagcctgatcattaacatccgcgggggtaacaacctggcagccgagctcgaggccaaccttggactcattgaggaaatttctggctatctgaagataagaagatcatacgccttggtgtccctttccttttttcgcaaactgagactcatacggggcgaaaccctggagattgggaactattcattttacgccttggataaccaaaatcttcggcagctgtgggactggagtaagcacaacctgacaattacccaggggaaattattcttccactataatcccaaactctgtcttagcgaaatccataaaatggaggaagtcagcggaacaaagggccgtcaggaaaggaatgatattgcactaaaaacaaacggcgaccaggcatcctgtgagaacgaactgttaaagttctcgtacattcgcacaagctttgacaaaatactgctccggtgggagccctactggcctccagactttcgcgaccttttgggctttatgttattttataaagaagcaccctatcagaacgttaccgagtttgatggacaggacgcgtgcggctctaactcctggactgtggtggatattgatccccctcttcggtccaatgaccccaagagtcagaaccatcctgggtggctaatgagaggattgaagccatggactcagtatgccatattcgtaaagacgctagtgacatttagcgacgaacggagaacctacggtgccaagtccgacattatttacgtgcaaacggacgcaacaaatccctctgttccccttgaccctatctctgtgtcaaatagctccagtcaaatcatattgaagtggaagccacccagcgacccgaacggcaatattacacactacctggtgttctgggagaggcaagcagaagactccgagctattcgagttggactactgtttgaaaggattaaagctgccatcacggacctggtcgccgcccttcgagtccgaggattctcagaaacataatcagagcgaatatgaggactccgccggcgaatgctgttcttgtccaaaaactgacagccaaattttaaaagaattggaagaatcgagcttccgaaagaccttcgaggactacctacataacgtggtgttcgtgcctcggccgagccggaaaaggcgctcgctcggggatgttggaaacgtcaccgtggccgtccccacagtggccgctttccccaacacaagcagtacttctgtgcccaccagccctgaagagcaccgaccctttgaaaaagttgttaataaagaaagcctggtaatctctggcctgagacatttcaccggctaccggatcgagctacaggcctgtaaccaagatactccagaggaacgctgcagcgtggccgcatacgtgagcgctaggactatgccggaagcaaaggctgatgatatagtagggcctgtcacgcatgagatttttgagaataatgtggtgcatctgatgtggcaagagcctaaagagccaaacggcctgatagtgctctatgaagtctcatatcgtcgatacggagatgaggagctgcatctctgtgtctcaaggaagcatttcgcactggaaaggggatgccgtctgcgtggactgtctccagggaattacagcgttcgcattcgagccactagcctggccggaaatggttcttggacagagcccacatacttctatgtcactgattacctggatgtcccgtccaacatcgccaagattatcattgggcccctgatctttgtttttctttttagcgtggtgatcggatctatatatctgtttctgagaaagcgtcagcctgatggacccttggggccgttgtatgcgtcctcgaatcccgagtatctgtccgcaagcgacgttttcccctgcagtgtttacgttccggacgaatgggaggtctcacgggaaaagattactttgcttcgtgagctgggacagggaagtttcggcatggtgtacgaagggaacgcgcgtgatataattaagggtgaagccgagactcgggtggctgtgaagaccgtgaatgagtcagctagcctgcgggaaaggatcgagtttcttaatgaggctagtgttatgaagggcttcacatgccatcacgtcgtgcgtctgcttggagtggtgagtaagggccaacctacattagtggtgatggaattgatggcccacggtgatttgaagtcctatttacgcagcttacgccctgaggcggagaacaaccccggaaggcctccccctaccctccaggagatgattcagatggcagctgagatcgctgacgggatggcttacctcaatgctaagaagtttgtgcatagagatctcgccgcccgcaactgcatggtagcacatgattttaccgtcaaaatcggcgattttggaatgacgcgtgatatctacgagacagattattataggaaggggggcaagggcctgctgcctgtccgctggatggcccccgagtctcttaaggatggagtatttacaacgtcatccgatatgtggagtttcggagtagtgctttgggagatcacaagtttagcagaacaaccttatcaaggcctgtccaacgagcaggtgctgaaatttgtgatggatgggggctacctagatcagccagacaactgcccagaacgggttacagacctaatgcgtatgtgctggcagttcaacccaaaaatgaggccgaccttcctcgaaatagtaaacttactgaaggacgatctccatccaagttttcccgaggtctctttctttcattcagaggaaaataaagcccctgagtccgaggagctggagatggagttcgaggatatggaaaatgtgcccttagaccgcagttcgcactgccagcgcgaagaggcaggcggccgagacggcggtagcagcctggggtttaaacgctcctacgaagagcacattccttacacccacatgaacggtggcaagaagaatggacgaattctgacactccctaggtccaatccatcctag

SEQ ID NO: 35744 - DNA, 9023 bp, Artificial Sequence
  derived and/or modified sequence
gagaaggacgcgcggcccccagcgcctcttgggtggccgcctcggagcatgacccccgcgggccagcgccgcgcgctctgatccgaggagaccccgcgctcccgcagccatggccaccgggggccggcggggggcggcggccgcgccgctgctggtggcggtggccgcgctgctactgggcgccgcgggccacctgtaccccggagaggtgtgtcccggcatggatatccggaacaacctcactaggttgcatgagctggagaattgctctgtcatcgaaggacacttgcagatactcttgatgttcaaaacgaggcccgaagatttccgagacctcagtttccccaaactcatcatgatcactgattacttgctgctcttccgggtctatgggctcgagagcctgaaggacctgttccccaacctcacggtcatccggggatcacgactgttctttaactacgcgctggtcatcttcgagatggttcacctcaaggaactcggcctctacaacctgatgaacatcacccggggttctgtccgcatcgagaagaacaatgagctctgttacttggccactatcgactggtcccgtatcctggattccgtggaggataattacatcgtgttgaacaaagatgacaacgaggagtgtggagacatctgtccgggtaccgcgaagggcaagaccaactgccccgccaccgtcatcaacgggcagtttgtcgaacgatgttggactcatagtcactgccagaaagtttgcccgaccatctgtaagtcacacggctgcaccgccgaaggcctctgttgccacagcgagtgcctgggcaactgttctcagcccgacgaccccaccaagtgcgtggcctgccgcaacttctacctggacggcaggtgtgtggagacctgcccgcccccgtactaccacttccaggactggcgctgtgtgaacttcagcttctgccaggacctgcaccacaaatgcaagaactcgcggaggcagggctgccaccagtacgtcattcacaacaacaagtgcatccctgagtgtccctccgggtacacgatgaattccagcaacttgctgtgcaccccatgcctgggtccctgtcccaaggtgtgccacctcctagaaggcgagaagaccatcgactcggtgacgtctgcccaggagctccgaggatgcaccgtcatcaacgggagtctgatcatcaacattcgaggaggcaacaatctggcagctgagctagaagccaacctcggcctcattgaagaaatttcagggtatctaaaaatccgccgatcctacgctctggtgtcactttccttcttccggaagttacgtctgattcgaggagagaccttggaaattgggaactactccttctatgccttggacaaccagaacctaaggcagctctgggactggagcaaacacaacctcaccatcactcaggggaaactcttcttccactataaccccaaactctgcttgtcagaaatccacaagatggaagaagtttcaggaaccaaggggcgccaggagagaaacgacattgccctgaagaccaatggggaccaggcatcctgtgaaaatgagttacttaaattttcttacattcggacatcttttgacaagatcttgctgagatgggagccgtactggccccccgacttccgagacctcttggggttcatgctgttctacaaagaggccccttatcagaatgtgacggagttcgacgggcaggatgcgtgtggttccaacagttggacggtggtagacattgacccacccctgaggtccaacgaccccaaatcacagaaccacccagggtggctgatgcggggtctcaagccctggacccagtatgccatctttgtgaagaccctggtcaccttttcggatgaacgccggacctatggggccaagagtgacatcatttatgtccagacagatgccaccaacccctctgtgcccctggatccaatctcagtgtctaactcatcatcccagattattctgaagtggaaaccaccctccgaccccaatggcaacatcacccactacctggttttctgggagaggcaggcggaagacagtgagctgttcgagctggattattgcctcaaagggctgaagctgccctcgaggacctggtctccaccattcgagtctgaagattctcagaagcacaaccagagtgagtatgaggattcggccggcgaatgctgctcctgtccaaagacagactctcagatcctgaaggagctggaggagtcctcgtttaggaagacgtttgaggattacctgcacaacgtggttttcgtccccaggccatctcggaaacgcaggtcccttggcgatgttgggaatgtgacggtggccgtgcccacggtggcagctttccccaacacttcctcgaccagcgtgcccacgagtccggaggagcacaggccttttgagaaggtggtgaacaaggagtcgctggtcatctccggcttgcgacacttcacgggctatcgcatcgagctgcaggcttgcaaccaggacacccctgaggaacggtgcagtgtggcagcctacgtcagtgcgaggaccatgcctgaagccaaggctgatgacattgttggccctgtgacgcatgaaatctttgagaacaacgtcgtccacttgatgtggcaggagccgaaggagcccaatggtctgatcgtgctgtatgaagtgagttatcggcgatatggtgatgaggagctgcatctctgcgtctcccgcaagcacttcgctctggaacggggctgcaggctgcgtgggctgtcaccggggaactacagcgtgcgaatccgggccacctcccttgcgggcaacggctcttggacggaacccacctatttctacgtgacagactatttagacgtcccgtcaaatattgcaaaaattatcatcggccccctcatctttgtctttctcttcagtgttgtgattggaagtatttatctattcctgagaaagaggcagccagatgggccgctgggaccgctttacgcttcttcaaaccctgagtatctcagtgccagtgatgtgtttccatgctctgtgtacgtgccggacgagtgggaggtgtctcgagagaagatcaccctccttcgagagctggggcagggctccttcggcatggtgtatgagggcaatgccagggacatcatcaagggtgaggcagagacccgcgtggcggtgaagacggtcaacgagtcagccagtctccgagagcggattgagttcctcaatgaggcctcggtcatgaagggcttcacctgccatcacgtggtgcgcctcctgggagtggtgtccaagggccagcccacgctggtggtgatggagctgatggctcacggagacctgaagagctacctccgttctctgcggccagaggctgagaataatcctggccgccctccccctacccttcaagagatgattcagatggcggcagagattgctgacgggatggcctacctgaacgccaagaagtttgtgcatcgggacctggcagcgagaaactgcatggtcgcccatgattttactgtcaaaattggagactttggaatgaccagagacatctatgaaacggattactaccggaaagggggcaagggtctgctccctgtacggtggatggcaccggagtccctgaaggatggggtcttcaccacttcttctgacatgtggtcctttggcgtggtcctttgggaaatcaccagcttggcagaacagccttaccaaggcctgtctaatgaacaggtgttgaaatttgtcatggatggagggtatctggatcaacccgacaactgtccagagagagtcactgacctcatgcgcatgtgctggcaattcaaccccaagatgaggccaaccttcctggagattgtcaacctgctcaaggacgacctgcaccccagctttccagaggtgtcgttcttccacagcgaggagaacaaggctcccgagagtgaggagctggagatggagtttgaggacatggagaatgtgcccctggaccgttcctcgcactgtcagagggaggaggcggggggccgggatggagggtcctcgctgggtttcaagcggagctacgaggaacacatcccttacacacacatgaacggaggcaagaaaaacgggcggattctgaccttgcctcggtccaatccttcctaacagtgcctaccgtggcgggggcgggcaggggttcccattttcgctttcctctggtttgaaagcctctggaaaactcaggattctcacgactctaccatgtccaatggagttcagagatcgttcctatacatttctgttcatcttaaggtggactcgtttggttaccaatttaactagtcctgcagaggatttaactgtgaacctggagggcaaggggtttccacagttgctgctcctttggggcaacgacggtttcaaaccaggattttgtgttttttcgttccccccacccgcccccagcagatggaaagaaagcacctgtttttacaaattctttttttttttttttttttttgctggtgtctgagcttcagtataaaagacaaaacttcctgtttgtggaacaaaagttcgaaagaaaaaacaaaacaaaaacacccagccctgttccaggagaatttcaagttttacaggttgagcttcaagatggtttttttggttttttttttttctctcatccaggctgaaggattttttttttctttacaaaatgagttcctcaaattgaccaatagctgctgctttcatattttggataagggtctgtggtcccggcgtgtgctcacgtgtgtatgcacgtgtgtgtgtccattagacacggctgatgtgtgtgcaaagtatccatgcggagttgatgctttgggaattggctcatgaaggttcttctcaagggtgcgagctcatccccctctctccttccttcttattgactgggagactgtgctctcgacagattcttcttgtgtcagaagtctagcctcaggtttctaccctcccttcacattggtggccaagggaggagcatttcatttggagtgattatgaatcttttcaagaccaaaccaagctaggacattaaaaaaaaaaaaagaaaaagaaagaaaaaacaaaatggaaaaaggaaaaaaaaaaagaactgagatgacagagttttgagaatatatttgtaccatatttaatttttaaagtctctggtattagcctcataagttattgactattccccggggttggcggggagtggggacatgagttggtctgcctgttgtggggccgggaaggggagggagtcaggcacaagtggcctctttgtttggtcttaaaggcatccatttctgggaatgaagccatgttcgctgctaacacttttggatgttgtgaggccacgtggagtgtgtgagagactaggttttatggatggtctggttcaggtaccaggtctgctggaaggttcctgttcggataagctggtagctacctagctctgagcctgccttcaagaacacctgtgttcatcctctgattctctgtgtgtacctcttgtggcgtttcctctcccgggtgtgaacatcctaaccgttattgtgcaaacccaagaacgtcagatcccaaagcacaacaacctggatggactttgggaacatctaagcaatgtaagagagaggtgcactgagagtacgtcttggtcccctccaccctgagagcatctgacggtcctcagtactgaactcccggaagctgctctgagcccggtgacctcatctgggccaggtgtggtgcctgagctgaatgctcaggtgcttacagtgttgcaatccctaagagagtagagtctggaggagaaaccgtgaaaaagaccttacacaccaccaagaacttccgaatgggcgtgaatccaccgtttcttctctttgcaaaaagaaccaccacagctgctcaaagaacacagtgaactcatcactttggttcatcaaaaaatcatcgcccatgcgttattcctgagtgcattttcttacaactttttgactgcttccttttcttcttctcttaagagttgtgggcttaagaatgggatagagtcataatggcaacctccaagccctctcaattcttgattaagaacacaggtagacatgaatcccaattgtctattgctatcttatttatatgattcgggaaaatacagcatgtaaaaatattgctgaggagcctcagtgattgggtacaagaagcaagagtacagaaattatttttgccaaatttattttgtaaatatgagggtctgtacctaaatttaaaaaaaaaacacgtagaactaggtattttgttctcttcttagtaaatttgtagtggttgtatactacactagctgcaattttcacatttttctaattcagaaaggtttttcttatattaggggaaaaagtatttattttaatatataaaatcactctgaaaatcactctcataaaaaatggagcgcatgtaaatttttatcaaagaaaaataaacaggtgaatgggggatagtgattttcttttttcagcacagtctacctcagtgtattgttaagatgtgattcaatcatggacatctttgagatttcagaattctacctggaaccggtctgaatcagggaacgtgtgtatcagctgattcgaatgccagggaccagtaagaattttgagggagggagttgggatggagaaggtatggcctttatgcgagcatagatccttttcttcctggctggtaatattcttctctgaatttaatcttcctttaaaaaaaaatcctccatctattgtcactatgttccccaaacataaactaagttccaggctgtcatgatgtatctgatatatggggtaacccagcaaggtgtaccttcctttggtgagagatggctgccggggcaaagacgggctttgattcagagcaagcattcccacctgttccatggaatccccctgaagtgagcacaaaggtgccctgggctccctgatggtttatgcccactcctttcaggctggtgatgcaccttacacacaaacacctaatgcaatgtctttttaaattctccaagtgggatgggagcatgtgagggaaattccaatccaaaacccattaatgtgctgaacgctttttttttttttttttttttttttgcaacaacaccttggacctctgtgttggggtttgactgacctcaagctgatattattggaccttgtgcagctttgataacccatgtgagagtctaggcaggaccagtggggcccaaatcttgctgctcttgtacttttaggcactgcccttgcagactcacctttctccacctgccctggagaaaggtagggtgtgctgggcctgccccttgcaaatgggattcaccagtttcatttatttgactctactgccacagtgaaaagagcaaacagctattgggttgcaaacctcctttgacattaggaaatgttgactttgtaacaataaaactttggtcctagaaagacacggttgtcctgggagtttgtagtgttaagttgcaacaacaacaacaaaaagcaacaaaaccagcttaggataacactttttgttgcttgttcttaaagatgtctcactatgattaaaacccttttcattaatgtagtgaaagccacacaggagttccttcttccaggaggagaataccaagcacatcactttctctctgcatcagtgatgtcaaatacgcatcagaaaatgttcaggttttaggagctgtcctaggtgctgtttcatcattggaagcagtgagaaagagaagcactgctgcttgtctggatataggctgaggatgattgagagaagctgtgggaactgacacaagggtctgcataggtcatcctgtgaccctggggactatgttaccaactgacagacagatctttcactgtatcctagcagggcaggtagtccaccaagaaatgtgcttattggattgggaggtgtttatttgtagtctgctgtaacacgtgtgaaagagcaggagcgtcatcagcatatgacttgcgctggtcatccggtaaatggatgtgctgtagtcccagtgctaatcatttctctccttcacagtgggtggaagtttagggttaaatgtcctttgaatgtcacctggtgagtccttgacaccttaggctcttcagaaacaatggttttgttgaggatggggaacagggaatgccgattttatatacatggtacacagagaggggtgtcacttcagaaaatcttccagcatgttcttcagaatattaatttatatgcgaggtgaggttgggaatgaaaagaacaggtcagcacttttttttttcctagaacatacaaaagaacatggtggactttcagggagtgcaatggaaggtgaatatttccttaagggtccccgagaaatgggagtgaggggaggggacacaatggctttttgagcttacttttaccttctgatactagtcaaggtccagaaccagccaccagccaaatttctatctgggtgcgggccactgaaaatccttgttaaaaaccagatcacaaatctggggctcttggtcccattggagaaggaaggaagagcctcaaaataagtgtgcacccatgcacatattcaggaacagcttgtttagtctttacactttgcctgaaagttgcttctcctcgtccctttgtgtgcctgggtggcctcggccctgtgcgttggcaacgcaggatcaaatgtgctgcagcttttgcagaaaacaactcagaaacacaaaaccccccaacagctcaattattattttttcaatgttttcctacaagagccaagtagcaccatgtacagaagacgcctttttttttggaatattgaaatcgttctgcatgtaaaatatgggataatgacctgtttatattaaaattctgattaaattatctgagaata

SEQ ID NO: 35745 - DNA, 637 bp, Artificial Sequence
  derived and/or modified sequence
cccttatcagaatgtgacggagttcgacgggcaggatgcgtgtggttccaacagttggacggtggtagacattgacccacccctgaggtccaacgaccccaaatcacagaaccacccagggtggctgatgcggggtctcaagccctggacccagtatgccatctttgtgaagaccctggtcaccttttcggatgaacgccggacctatggggccaagagtgacatcatttatgtccagacagatgccaccaacccctctgtgcccctggatccaatctcagtgtctaactcatcatcccagattattctgaagtggaaaccaccctccgaccccaatggcaacatcacccactacctggttttctgggagaggcaggcggaagacagtgagctgttcgagctggattattgcctcaaagggcgagtccagtcatcagctccgctgtaagctgttggccctgcattcaagtaaccagaaccacccgtgagagctgccaccagtaatgtcactcgaagcttccttttttttttttttaattccgaaagtctaaatctgtaattaccaagggaccatttaaacatggttttatttgtaattgtcacaaagttaatatcattaaaaggaaactcactaagg

SEQ ID NO: 35746 - DNA, 4113 bp, Artificial Sequence
  derived and/or modified sequence
atggccactggaggaagaagaggagctgctgctgcccccctgctggtggccgtggccgccctgctgctgggcgccgccggccacctgtacccaggagaggtgtgccccggcatggacatccggaacaacctgacccggctgcacgagctggagaactgcagcgtcatcgagggccacctgcagatcctgctgatgttcaagaccaggcctgaggacttccgggacctgtccttccccaagctgatcatgatcacagactacctgctgctcttccgggtgtatggcctggagagcctgaaggacctcttccccaacctgaccgtcatccggggcagccgcctcttcttcaactatgccctggtgatctttgagatggtgcacctgaaggagctgggcctgtacaacctgatgaacatcacccggggctctgtgcgcatcgagaagaacaatgagctgtgctacctggccaccatcgactggagccgcatcctggacagcgtggaggacaactacatcgtgctgaacaaggatgacaatgaagaatgtggggacatctgccctggaacagccaagggcaagaccaactgcccagccaccgtcatcaatggccagtttgtggagcgctgctggacccacagccactgccagaaggtgtgccccaccatctgcaagagccacggctgcacagctgagggcctgtgctgccacagcgagtgcctgggcaactgcagccagccagatgaccccaccaagtgtgtggcctgcaggaacttctacctggatggccgctgtgtggagacctgccccccaccctactaccacttccaggactggaggtgtgtgaacttctccttctgccaggacctgcaccacaagtgcaagaacagccggcggcagggctgccaccagtatgtgatccacaacaacaagtgcatccctgagtgccccagcggctacaccatgaacagcagcaacctgctgtgcaccccctgcctgggcccctgccccaaggtgtgccacctgctggagggggagaagaccatcgacagcgtgaccagcgcccaggagctgcggggctgcaccgtcatcaatggcagcctcatcatcaacatccggggcggcaacaacctggccgctgagctggaggccaacctgggcctcatcgaggagatcagcggctacctgaagatccgccgctcctatgccctggtgtccctgtccttcttcaggaagctgcggctcatccggggggagaccctggagatcggcaactacagcttctacgccctggacaaccagaacctgcggcagctgtgggactggagcaagcacaacctgaccatcacccagggcaagctgttcttccactacaaccccaagctgtgcctgtctgagatccacaagatggaggaggtgtctggcaccaagggccggcaggagagaaatgacatcgccctgaagaccaatggagaccaggccagctgtgaaaatgagctgctgaagttctcctacatccgcaccagctttgacaagatcctgctgcgctgggagccctactggcccccagacttccgggacctgctgggcttcatgctgttctacaaggaggccccctaccagaatgtgacagaatttgatggccaggatgcctgtggcagcaacagctggacagtggtggacattgatcctcccctgcggagcaatgaccccaagagccagaaccaccctggctggctgatgaggggcctgaagccctggacccagtatgccatctttgtgaagaccctggtgaccttcagtgatgaaagaaggacctacggggccaagagtgacatcatctacgtgcagacagatgccaccaaccccagcgtgcccctggaccccatctctgtgagcaacagcagcagccagatcatcctgaagtggaagccacccagcgaccccaatggaaacatcacccactacctggtgttctgggagcggcaggccgaggacagcgagctgtttgagctggactactgcctgaagggcctgaagctgcccagcaggacctggagccccccatttgaaagtgaggacagccagaagcacaaccagagtgaatatgaagattctgctggggagtgctgcagctgccccaagacagacagccagatcctgaaggagctggaggagagcagcttcaggaagacctttgaggactacctgcacaacgtggtgtttgtgccccggcccagcaggaagagaagaagcctgggagatgtgggcaatgtgacagtggccgtgcccaccgtggccgccttccccaacaccagcagcacctctgtgcccaccagccctgaggagcaccggccctttgagaaggtggtgaacaaggagagcctggtgatcagcggcctgcggcacttcaccggctaccgcatcgagctgcaggcctgcaaccaggacaccccagaggagcgctgcagcgtggccgcctacgtgtctgcccggaccatgcctgaggccaaggcagatgacatcgtgggccctgtgacccatgagatctttgaaaataatgtggtgcacctgatgtggcaggagcccaaggagcccaacggcctgattgtgctgtatgaggtgtcctacagaagatatggagatgaggagctgcacctgtgtgtgtccaggaagcactttgccctggagcggggctgccgcctgcggggcctgagccctggcaactacagcgtgcgcatccgggccaccagcctggccggaaatggctcctggacagagcccacctacttctacgtgacagactacctggatgtgcccagcaacatcgccaagatcatcatcggccccctcatctttgtgttcctgttctctgtggtgattggcagcatctacctgttcctgaggaagaggcagccagatggccccctgggccccctgtatgccagcagcaaccctgagtacctgagcgccagtgatgtgttcccctgcagcgtgtatgtgcctgatgagtgggaggtgtcccgggagaagatcaccctgctgcgggagctgggccagggcagctttggcatggtgtatgagggcaatgcccgggacatcatcaagggggaggccgagaccagggtggccgtgaagacagtgaatgaaagtgccagcctgcgggagagaattgagttcctgaatgaggcctctgtgatgaagggcttcacctgccaccacgtggtgcggctgctgggcgtggtgtccaagggccagcccaccctggtggtgatggagctgatggcccacggggacctgaagagctacctgcggagcctgcggcctgaggccgagaacaaccctggccggcccccacccaccctgcaggagatgatccagatggctgctgagattgctgatggcatggcctacctgaatgccaagaagtttgtgcaccgggacctggccgccaggaactgcatggtggcccatgacttcaccgtgaagattggagactttggcatgacccgggacatctatgaaacagactactacaggaagggcggcaagggcctgctgcctgtgcgctggatggcccctgagagcctgaaggatggagtcttcaccaccagcagtgacatgtggagctttggagtggtgctgtgggagatcaccagcctggccgagcagccctaccagggcctgagcaatgagcaggtgctgaagtttgtgatggatggcggctacctggaccagcctgacaactgcccagagcgggtgacagacctgatgaggatgtgctggcagttcaaccccaagatgaggcccaccttcctggagatcgtgaacctgctgaaggatgacctgcaccccagcttccctgaggtgtccttcttccacagcgaggagaacaaggcccctgagagcgaggagctggagatggagtttgaggacatggagaatgtgcccctggacaggagcagccactgccagcgggaggaggccggcggcagagatggcggcagcagcctgggcttcaagaggagctatgaggagcacatcccctacacccacatgaatggaggcaagaagaatggccgcatcctgaccctgcccaggagcaaccccagctag

SEQ ID NO: 35747 - DNA, 4113 bp, Artificial Sequence
  derived and/or modified sequence
atggccaccggcggccggcggggcgccgccgccgcccccctgctggtggccgtggcagccctgctactcggcgcagccggacacctttatcctggggaggtctgtccagggatggatatacggaacaaccttacacgtctccatgagctggagaactgctccgtcatcgaagggcacctccagatcctgctgatgtttaagactcgccccgaagattttcgcgacctgagcttcccaaaattaataatgattaccgactatctgctcctcttccgggtgtatggcctggagagtttaaaagacctatttccaaacctgacagttattcgggggagcagactgttttttaattacgctctggtcatcttcgagatggtccatttaaaagagcttgggctctacaatcttatgaacatcactcggggtagcgtgcgtattgaaaagaataacgagctttgttatctggctaccattgattggtcaagaattctggatagcgttgaagacaattacatcgttctgaataaagacgacaacgaggaatgcggagatatttgtcccggaacggccaaggggaaaaccaattgtccagccactgtcatcaatggccaattcgttgagagatgttggacccattcacattgtcagaaagtgtgtcctactatttgtaaatcacacggctgcacagccgagggtctctgttgccattccgaatgtctcggaaattgctcgcagcctgacgatccaacgaagtgtgtcgcttgtagaaacttttacctcgatggacggtgtgtcgaaacttgcccccccccatattatcacttccaggactggcggtgtgtgaatttttccttttgccaggatcttcaccataaatgtaaaaatagcaggcgtcaggggtgccatcagtatgtaatccacaataataagtgtataccagaatgccccagtgggtacactatgaactctagtaacctgctatgcactccctgtttgggtccttgcccgaaggtctgccacctgttggagggggagaagacaatcgacagtgtgactagcgcccaagaattgcgtgggtgtaccgtcatcaacggctccctaattattaatatccgagggggcaataacttggctgccgagcttgaggctaacctgggtctgatcgaagaaattagtgggtatctgaagataagaaggagttatgcgctggtcagccttagtttctttaggaaactcaggttgattaggggagagacacttgagatcgggaattactcgttttatgccctggataatcagaacctgcgccagctgtgggactggtcaaaacacaatttaacgattacccagggaaagttgttcttccactataacccaaaactctgtctgtctgagatccacaagatggaagaggtgtcgggcacgaaaggacgacaggagaggaacgatatagcgctaaaaaccaatggagatcaagcttcctgcgaaaatgagctgctgaagttttcctacattcggacttcttttgacaaaatcctattacggtgggagccttattggccccccgatttccgggacctgttgggcttcatgctgttttataaggaagccccttatcagaatgtaacagaatttgacgggcaggatgcctgcggttctaacagttggactgtcgtcgatatcgatcccccccttcgctcaaatgaccctaagtcacaaaatcatccagggtggctgatgaggggcctgaagccttggacccaatatgccatctttgtgaaaactctcgtgactttctccgacgagagaaggacatacggcgccaagagtgacattatttatgtgcaaaccgatgccaccaatcctagtgtgcccctcgatccaatttctgtcagcaatagttcttcgcagatcatcctgaagtggaagcccccgagcgatcccaatggcaacatcacccactacctggtattttgggagcgccaggctgaagactctgagctctttgagctcgactattgtctgaagggcctaaagttgccctcaagaacctggagtccccccttcgagtctgaggattcccagaaacacaaccagtctgagtatgaggacagtgccggtgaatgctgctcatgcccaaaaaccgattctcagatcctgaaggaactggaagagtctagttttcgaaaaactttcgaggattacctgcataacgtagtgtttgtgcctcgaccctctagaaagaggcgctctctaggagacgtgggtaacgtgacggttgccgtgccaacagtagccgcctttcctaatacatcatcaacgagcgtgcctactagccctgaggagcaccgccccttcgagaaggtagtgaataaagagtccctggtgatctctggtcttcgacactttacgggatatagaattgagctgcaggcatgcaatcaggataccccggaggagagatgtagtgtggctgcctacgtgtccgcccgcactatgcccgaagcaaaggccgacgatattgtcggccccgtgacacacgagatttttgaaaataatgtagtgcatctgatgtggcaagaacctaaagagccaaatggactgattgtcttatacgaggtatcctatcgtcggtatggggacgaggagctgcacctgtgcgtgagtagaaaacacttcgcacttgaaaggggatgtagacttcgagggctcagtccgggaaactattcagtgaggattagagctacttcacttgctggcaacggctcctggaccgagccaacctacttttatgtgacggactatctggacgtgccgagcaatatcgcaaaaataataattggacctcttattttcgtgtttctgttcagtgtggtgatcggaagcatctatctatttctcagaaagcgccagcccgacggccctctcggccccttatacgcatctagcaacccagagtacttatctgcctccgatgtcttcccctgcagtgtttatgttcctgatgagtgggaggtatcacgtgagaaaataacactgctgagagagcttggtcagggtagcttcgggatggtctacgagggaaatgcccgcgatataatcaaaggagaggccgagacgagagttgctgtgaagaccgtgaatgaatctgccagcctacgggagagaattgaattcttgaatgaggcaagcgtgatgaagggtttcacttgccaccacgttgtacgcctgttgggtgtggtcagcaaagggcaacctactctggtagtgatggagctgatggcccatggggacttgaagagctacttgcgaagcttgagacctgaggctgaaaataacccgggacgtcctccccctacacttcaggagatgatccagatggccgcagaaatcgcagacggtatggcatacctcaacgcaaagaagtttgttcacagagacctagccgcccggaactgcatggtggctcacgattttacagtgaagattggtgattttggcatgacaagggacatatatgagacggactactaccgcaaaggaggaaagggattactccctgttaggtggatggcgcccgagtcattaaaggatggggtcttcacgaccagctccgacatgtggtcgtttggtgtggtgctgtgggagattacaagccttgccgaacaaccttaccagggcctgtctaatgagcaggtgttgaagttcgtcatggacggaggatacctggaccagcccgataattgtcccgaaagggttacagatctaatgcgcatgtgctggcagtttaatcctaagatgagaccaactttcctcgagattgtgaacctcctgaaagatgacttgcatccctcctttccggaagtaagcttttttcatagtgaggaaaacaaggccccggagagcgaggagcttgagatggagttcgaggacatggaaaacgtgcctctggaccgttcctctcactgtcagcgggaagaggcaggtggcagggacggcgggtcatccctgggctttaaaaggagctatgaggagcatattccttacacccatatgaacggaggcaaaaaaaatggccgaattttgactctgcccagatccaatcctagttag

SEQ ID NO: 35748 - DNA, 4113 bp, Artificial Sequence
  derived and/or modified sequence
atggccacaggcggacgtcgcggagccgcagcagccccactgctcgtggctgtcgctgccctcctactgggagccgcaggacatttgtaccccggagaggtatgtccgggtatggatatcagaaacaatttgacccggttgcacgagctcgaaaactgttccgtgattgaagggcacctgcaaatcttgttaatgtttaagacgcgcccagaagacttccgcgacttgtcctttcctaagttaatcatgatcactgactatctattgctgtttagggtctatggattggaatccctcaaggatctgttccccaacctaacagtgatacgcggttcgaggctcttctttaactacgcccttgtcatctttgagatggtgcatctgaaggaactcgggttatacaacttgatgaatataacacgaggaagcgtgaggatcgagaaaaacaatgagctctgttacttggcaaccattgattggagccgcattttagactcagttgaggacaactatatcgtgctaaacaaagacgacaatgaggaatgcggggacatatgccctggaacagctaaggggaagactaactgcccagctaccgtgataaacgggcagttcgtggaacggtgctggactcacagccattgtcaaaaggtttgtcctacaatatgtaaatctcacggatgtactgcagagggcctgtgctgccacagtgaatgcttaggcaactgcagtcagccagacgaccctaccaagtgtgtggcatgccgaaacttctacttggacggaagatgtgtggaaacctgtccacctccttactatcacttccaagattggcggtgtgtcaatttcagcttttgtcaagacctgcaccacaagtgcaaaaactccaggagacaaggatgccaccaatatgtgatccacaataataaatgtatacccgaatgccccagcgggtataccatgaattcctcgaaccttttgtgcacaccctgcctggggccatgtcccaaggtttgtcatcttctcgaaggtgagaagactatcgattctgtgactagtgctcaggaactccgcggatgcactgtgattaatggatctctaattataaacataagagggggtaacaacttggctgccgagctggaggccaacctcggactaattgaggagatctctggctatctgaaaataaggagatcttatgctctggtgagcttgagcttttttaggaaattacgcctgataaggggcgaaactctggagattggaaactactccttctacgccctggacaatcagaatctccgccagctctgggactggagtaaacacaacctaacaatcacgcaaggtaaacttttttttcactataatcctaagctgtgcttatccgaaattcataagatggaagaggtgtccggtacaaagggacgtcaggagaggaatgacattgccctgaagaccaacggagatcaagccagttgcgagaatgaactcttaaagttcagctatattaggactagcttcgataaaatactattaagatgggagccctactggcctccagactttagggatttactcggtttcatgcttttttataaggaagcaccctatcagaacgttaccgagtttgacggccaagatgcctgcggatctaatagctggaccgtcgtggacattgacccaccgctccgaagtaacgatcccaaatcccaaaaccatcctggctggcttatgcgcggattgaagccttggactcagtacgccatcttcgtgaagaccctggtgactttctccgacgagaggaggacctatggggcaaagagcgacataatttatgtccagaccgacgccaccaatccaagcgtccccttagaccctatatcagtctcaaatagttccagtcagattattctgaaatggaagccaccctctgatccgaacggaaatattacacactacctggtcttctgggagcgtcaggccgaggacagcgaacttttcgaactggattactgcctgaaagggctgaagctgcccagcagaacttggtcccctcctttcgagagcgaggattctcaaaagcataatcaaagcgagtacgaagacagtgccggagagtgttgcagctgccctaaaaccgattcgcaaattctgaaggaacttgaagagagctctttccgaaagactttcgaggattaccttcacaatgtcgtttttgtacccagaccctctagaaagagacgctcccttggtgacgttggtaacgtgaccgtggccgtgcccacggtcgctgcattccccaacacatcttccacgtctgtgccaacgtcacccgaggaacataggccctttgaaaaagtggttaataaggaatctctcgtgatatcgggactgcgccacttcaccggttacaggattgaactccaggcctgtaaccaggatacaccagaggaacgttgttccgtagcagcctacgtgtcagctcggaccatgccagaggctaaagctgatgacattgtggggccagtgacccacgagatatttgagaacaatgtcgtccatcttatgtggcaggagcccaaggagcccaatggactcattgtgctttatgaggtttcttaccgcagatacggagatgaggagttgcatctctgcgttagtaggaaacacttcgctctggaacgaggctgccggctgcgcggtctgtctccagggaattactctgtgcggattcgggctactagcctggccggaaacggatcatggacagaacctacatatttttacgtcacagactatctggatgtgccctcaaacatcgctaaaataatcatcggccctctcatattcgtctttttattctccgtagtgatcggtagcatttatctatttctcaggaaaagacagcccgatggcccacttggccctctctatgcatcttcaaatcccgaatacctcagtgcttccgacgtgtttccgtgcagcgtatatgtccctgatgaatgggaggtttccagggaaaagatcacactacttcgcgagctaggccaagggtctttcggcatggtctatgagggcaatgcgagagacatcatcaagggagaagcggagacgcgcgtggctgtgaagaccgtgaacgaaagtgcatcattgagagaaagaatcgagttccttaacgaggcatccgtaatgaaagggttcacgtgtcaccatgtggtacgcctgttgggcgtagtgagtaagggccagcccactctggtagtgatggagttgatggcgcacggagatctcaagtcataccttcgaagtcttcggccagaggccgaaaacaatcctggcagaccccctcccacactgcaagaaatgatccagatggccgcagagatcgcagatggtatggcttacctcaacgccaagaagtttgttcatagggatcttgctgccagaaactgtatggtggctcatgatttcaccgtcaagattggagactttggcatgacacgcgacatttatgaaactgattattacaggaaaggaggaaagggactgctacccgttcgctggatggcacccgaatctctgaaggacggggtgtttaccacttcatctgatatgtggtcttttggggtagtgctctgggaaatcactagcctggcggaacaaccctatcagggattatccaatgagcaggtgttgaagttcgttatggatggaggatatttagaccaaccagacaactgccctgagcgagtgactgacctgatgagaatgtgttggcagttcaaccccaagatgcgaccgacatttctggaaatcgttaacctacttaaggacgacctacacccatctttcccggaagtgtcatttttccactctgaggagaacaaggcccctgaaagcgaagaactcgaaatggagttcgaagacatggaaaacgtacctctggacaggtccagtcattgccagcgggaggaggccggtggaagagatggtggcagttcactggggtttaagcgctcctatgaagagcatatcccctatacccacatgaacggaggcaagaagaacgggagaatcttaactctccctaggtcaaatccatcatag

SEQ ID NO: 35749 - DNA, 4113 bp, Artificial Sequence
  derived and/or modified sequence
atggccaccggcggcagaagaggcgccgccgccgcccccctgctggtggccgtggccgccctgctgctgggcgccgccggccacctgtaccccggcgaggtgtgccccggcatggacatcagaaacaacctgaccagactgcacgagctggagaactgcagcgtgatcgagggccacctgcagatcctgctgatgttcaagaccagacccgaggacttcagagacctgagcttccccaagctgatcatgatcaccgactacctgctgctgttcagagtgtacggcctggagagcctgaaggacctgttccccaacctgaccgtgatcagaggcagcagactgttcttcaactacgccctggtgatcttcgagatggtgcacctgaaggagctgggcctgtacaacctgatgaacatcaccagaggcagcgtgagaatcgagaagaacaacgagctgtgctacctggccaccatcgactggagcagaatcctggacagcgtggaggacaactacatcgtgctgaacaaggacgacaacgaggagtgcggcgacatctgccccggcaccgccaagggcaagaccaactgccccgccaccgtgatcaacggccagttcgtggagagatgctggacccacagccactgccagaaggtgtgccccaccatctgcaagagccacggctgcaccgccgagggcctgtgctgccacagcgagtgcctgggcaactgcagccagcccgacgaccccaccaagtgcgtggcctgcagaaacttctacctggacggcagatgcgtggagacctgcccccccccctactaccacttccaggactggagatgcgtgaacttcagcttctgccaggacctgcaccacaagtgcaagaacagcagaagacagggctgccaccagtacgtgatccacaacaacaagtgcatccccgagtgccccagcggctacaccatgaacagcagcaacctgctgtgcaccccctgcctgggcccctgccccaaggtgtgccacctgctggagggcgagaagaccatcgacagcgtgaccagcgcccaggagctgagaggctgcaccgtgatcaacggcagcctgatcatcaacatcagaggcggcaacaacctggccgccgagctggaggccaacctgggcctgatcgaggagatcagcggctacctgaagatcagaagaagctacgccctggtgagcctgagcttcttcagaaagctgagactgatcagaggcgagaccctggagatcggcaactacagcttctacgccctggacaaccagaacctgagacagctgtgggactggagcaagcacaacctgaccatcacccagggcaagctgttcttccactacaaccccaagctgtgcctgagcgagatccacaagatggaggaggtgagcggcaccaagggcagacaggagagaaacgacatcgccctgaagaccaacggcgaccaggccagctgcgagaacgagctgctgaagttcagctacatcagaaccagcttcgacaagatcctgctgagatgggagccctactggccccccgacttcagagacctgctgggcttcatgctgttctacaaggaggccccctaccagaacgtgaccgagttcgacggccaggacgcctgcggcagcaacagctggaccgtggtggacatcgacccccccctgagaagcaacgaccccaagagccagaaccaccccggctggctgatgagaggcctgaagccctggacccagtacgccatcttcgtgaagaccctggtgaccttcagcgacgagagaagaacctacggcgccaagagcgacatcatctacgtgcagaccgacgccaccaaccccagcgtgcccctggaccccatcagcgtgagcaacagcagcagccagatcatcctgaagtggaagccccccagcgaccccaacggcaacatcacccactacctggtgttctgggagagacaggccgaggacagcgagctgttcgagctggactactgcctgaagggcctgaagctgcccagcagaacctggagcccccccttcgagagcgaggacagccagaagcacaaccagagcgagtacgaggacagcgccggcgagtgctgcagctgccccaagaccgacagccagatcctgaaggagctggaggagagcagcttcagaaagaccttcgaggactacctgcacaacgtggtgttcgtgcccagacccagcagaaagagaagaagcctgggcgacgtgggcaacgtgaccgtggccgtgcccaccgtggccgccttccccaacaccagcagcaccagcgtgcccaccagccccgaggagcacagacccttcgagaaggtggtgaacaaggagagcctggtgatcagcggcctgagacacttcaccggctacagaatcgagctgcaggcctgcaaccaggacacccccgaggagagatgcagcgtggccgcctacgtgagcgccagaaccatgcccgaggccaaggccgacgacatcgtgggccccgtgacccacgagatcttcgagaacaacgtggtgcacctgatgtggcaggagcccaaggagcccaacggcctgatcgtgctgtacgaggtgagctacagaagatacggcgacgaggagctgcacctgtgcgtgagcagaaagcacttcgccctggagagaggctgcagactgagaggcctgagccccggcaactacagcgtgagaatcagagccaccagcctggccggcaacggcagctggaccgagcccacctacttctacgtgaccgactacctggacgtgcccagcaacatcgccaagatcatcatcggccccctgatcttcgtgttcctgttcagcgtggtgatcggcagcatctacctgttcctgagaaagagacagcccgacggccccctgggccccctgtacgccagcagcaaccccgagtacctgagcgccagcgacgtgttcccctgcagcgtgtacgtgcccgacgagtgggaggtgagcagagagaagatcaccctgctgagagagctgggccagggcagcttcggcatggtgtacgagggcaacgccagagacatcatcaagggcgaggccgagaccagagtggccgtgaagaccgtgaacgagagcgccagcctgagagagagaatcgagttcctgaacgaggccagcgtgatgaagggcttcacctgccaccacgtggtgagactgctgggcgtggtgagcaagggccagcccaccctggtggtgatggagctgatggcccacggcgacctgaagagctacctgagaagcctgagacccgaggccgagaacaaccccggcagacccccccccaccctgcaggagatgatccagatggccgccgagatcgccgacggcatggcctacctgaacgccaagaagttcgtgcacagagacctggccgccagaaactgcatggtggcccacgacttcaccgtgaagatcggcgacttcggcatgaccagagacatctacgagaccgactactacagaaagggcggcaagggcctgctgcccgtgagatggatggcccccgagagcctgaaggacggcgtgttcaccaccagcagcgacatgtggagcttcggcgtggtgctgtgggagatcaccagcctggccgagcagccctaccagggcctgagcaacgagcaggtgctgaagttcgtgatggacggcggctacctggaccagcccgacaactgccccgagagagtgaccgacctgatgagaatgtgctggcagttcaaccccaagatgagacccaccttcctggagatcgtgaacctgctgaaggacgacctgcaccccagcttccccgaggtgagcttcttccacagcgaggagaacaaggcccccgagagcgaggagctggagatggagttcgaggacatggagaacgtgcccctggacagaagcagccactgccagagagaggaggccggcggcagagacggcggcagcagcctgggcttcaagagaagctacgaggagcacatcccctacacccacatgaacggcggcaagaagaacggcagaatcctgaccctgcccagaagcaaccccagctag

SEQ ID NO: 35750 - protein, 1130 aa, Artificial Sequence
  derived and/or modified sequence
MAAAGQLCLLYLSAGLLSRLGAAFNLDTREDNVIRKYGDPGSLFGFSLAMHWQLQPEDKRLLLVGAPRAEALPLQRANRTGGLYSCDITARGPCTRIEFDNDADPTSESKEDQWMGVTVQSQGPGGKVVTCAHRYEKRQHVNTKQESRDIFGRCYVLSQNLRIEDDMDGGDWSFCDGRLRGHEKFGSCQQGVAATFTKDFHYIVFGAPGTYNWKGIVRVEQKNNTFFDMNIFEDGPYEVGGETEHDESLVPVPANSYLGLLFLTSVSYTDPDQFVYKTRPPREQPDTFPDVMMNSYLGFSLDSGKGIVSKDEITFVSGAPRANHSGAVVLLKRDMKSAHLLPEHIFDGEGLASSFGYDVAVVDLNKDGWQDIVIGAPQYFDRDGEVGGAVYVYMNQQGRWNNVKPIRLNGTKDSMFGIAVKNIGDINQDGYPDIAVGAPYDDLGKVFIYHGSANGINTKPTQVLKGISPYFGYSIAGNMDLDRNSYPDVAVGSLSDSVTIFRSRPVINIQKTITVTPNRIDLRQKTACGAPSGICLQVKSCFEYTANPAGYNPSISIVGTLEAEKERRKSGLSSRVQFRNQGSEPKYTQELTLKRQKQKVCMEETLWLQDNIRDKLRPIPITASVEIQEPSSRRRVNSLPEVLPILNSDEPKTAHIDVHFLKEGCGDDNVCNSNLKLEYKFCTREGNQDKFSYLPIQKGVPELVLKDQKDIALEITVTNSPSNPRNPTKDGDDAHEAKLIATFPDTLTYSAYRELRAFPEKQLSCVANQNGSQADCELGNPFKRNSNVTFYLVLSTTEVTFDTPDLDINLKLETTSNQDNLAPITAKAKVVIELLLSVSGVAKPSQVYFGGTVVGEQAMKSEDEVGSLIEYEFRVINLGKPLTNLGTATLNIQWPKEISNGKWLLYLVKVESKGLEKVTCEPQKEINSLNLTESHNSRKKREITEKQIDDNRKFSLFAERKYQTLNCSVNVNCVNIRCPLRGLDSKASLILRSRLWNSTFLEEYSKLNYLDILMRAFIDVTAAAENIRLPNAGTQVRVTVFPSKTVAQYSGVPWWIILVAILAGILMLALLVFILWKCGFFKRSRYDDSVPRYHAVRIRKEEREIKDEKYIDNLEKKQWITKWNENESYS

SEQ ID NO: 35751 - protein, 1091 aa, Artificial Sequence
  derived and/or modified sequence
MAAAGQLCLLYLSAGLLSRLGAAFNLDTREDNVIRKYGDPGSLFGFSLAMHWQLQPEDKRLLLVGAPRAEALPLQRANRTGGLYSCDITARGPCTRIEFDNDADPTSESKEDQWMGVTVQSQGPGGKVVTCAHRYEKRQHVNTKQESRDIFGRCYVLSQNLRIEDDMDGGDWSFCDGRLRGHEKFGSCQQGVAATFTKDFHYIVFGAPGTYNWKGIVRVEQKNNTFFDMNIFEDGPYEVGGETEHDESLVPVPANSYLGFSLDSGKGIVSKDEITFVSGAPRANHSGAVVLLKRDMKSAHLLPEHIFDGEGLASSFGYDVAVVDLNKDGWQDIVIGAPQYFDRDGEVGGAVYVYMNQQGRWNNVKPIRLNGTKDSMFGIAVKNIGDINQDGYPDIAVGAPYDDLGKVFIYHGSANGINTKPTQVLKGISPYFGYSIAGNMDLDRNSYPDVAVGSLSDSVTIFRSRPVINIQKTITVTPNRIDLRQKTACGAPSGICLQVKSCFEYTANPAGYNPSISIVGTLEAEKERRKSGLSSRVQFRNQGSEPKYTQELTLKRQKQKVCMEETLWLQDNIRDKLRPIPITASVEIQEPSSRRRVNSLPEVLPILNSDEPKTAHIDVHFLKEGCGDDNVCNSNLKLEYKFCTREGNQDKFSYLPIQKGVPELVLKDQKDIALEITVTNSPSNPRNPTKDGDDAHEAKLIATFPDTLTYSAYRELRAFPEKQLSCVANQNGSQADCELGNPFKRNSNVTFYLVLSTTEVTFDTPDLDINLKLETTSNQDNLAPITAKAKVVIELLLSVSGVAKPSQVYFGGTVVGEQAMKSEDEVGSLIEYEFRVINLGKPLTNLGTATLNIQWPKEISNGKWLLYLVKVESKGLEKVTCEPQKEINSLNLTESHNSRKKREITEKQIDDNRKFSLFAERKYQTLNCSVNVNCVNIRCPLRGLDSKASLILRSRLWNSTFLEEYSKLNYLDILMRAFIDVTAAAENIRLPNAGTQVRVTVFPSKTVAQYSGVPWWIILVAILAGILMLALLVFILWKCGFFKRSRYDDSVPRYHAVRIRKEEREIKDEKYIDNLEKKQWITKWNENESYS

SEQ ID NO: 35752 - protein, 1086 aa, Artificial Sequence
  derived and/or modified sequence
MAAAGQLCLLYLSAGLLSRLGAAFNLDTREDNVIRKYGDPGSLFGFSLAMHWQLQPEDKRLLLVGAPRAEALPLQRANRTGGLYSCDITARGPCTRIEFDNDADPTSESKEDQWMGVTVQSQGPGGKVVTCAHRYEKRQHVNTKQESRDIFGRCYVLSQNLRIEDDMDGGDWSFCDGRLRGHEKFGSCQQGVAATFTKDFHYIVFGAPGTYNWKGLLFLTSVSYTDPDQFVYKTRPPREQPDTFPDVMMNSYLGFSLDSGKGIVSKDEITFVSGAPRANHSGAVVLLKRDMKSAHLLPEHIFDGEGLASSFGYDVAVVDLNKDGWQDIVIGAPQYFDRDGEVGGAVYVYMNQQGRWNNVKPIRLNGTKDSMFGIAVKNIGDINQDGYPDIAVGAPYDDLGKVFIYHGSANGINTKPTQVLKGISPYFGYSIAGNMDLDRNSYPDVAVGSLSDSVTIFRSRPVINIQKTITVTPNRIDLRQKTACGAPSGICLQVKSCFEYTANPAGYNPSISIVGTLEAEKERRKSGLSSRVQFRNQGSEPKYTQELTLKRQKQKVCMEETLWLQDNIRDKLRPIPITASVEIQEPSSRRRVNSLPEVLPILNSDEPKTAHIDVHFLKEGCGDDNVCNSNLKLEYKFCTREGNQDKFSYLPIQKGVPELVLKDQKDIALEITVTNSPSNPRNPTKDGDDAHEAKLIATFPDTLTYSAYRELRAFPEKQLSCVANQNGSQADCELGNPFKRNSNVTFYLVLSTTEVTFDTPDLDINLKLETTSNQDNLAPITAKAKVVIELLLSVSGVAKPSQVYFGGTVVGEQAMKSEDEVGSLIEYEFRVINLGKPLTNLGTATLNIQWPKEISNGKWLLYLVKVESKGLEKVTCEPQKEINSLNLTESHNSRKKREITEKQIDDNRKFSLFAERKYQTLNCSVNVNCVNIRCPLRGLDSKASLILRSRLWNSTFLEEYSKLNYLDILMRAFIDVTAAAENIRLPNAGTQVRVTVFPSKTVAQYSGVPWWIILVAILAGILMLALLVFILWKCGFFKRSRYDDSVPRYHAVRIRKEEREIKDEKYIDNLEKKQWITKWNENESYS

SEQ ID NO: 35753 - DNA, 3393 bp, Artificial Sequence
  derived and/or modified sequence
atggccgccgccggccagctgtgcctgctgtacctgagcgccggcctgctgagcagactgggcgccgccttcaacctggacaccagagaggacaacgtgatcagaaagtacggcgaccccggcagcctgttcggcttcagcctggccatgcactggcagctgcagcccgaggacaagagactgctgctggtgggcgcccccagagccgaggccctgcccctgcagagagccaacagaaccggcggcctgtacagctgcgacatcaccgccagaggcccctgcaccagaatcgagttcgacaacgacgccgaccccaccagcgagagcaaggaggaccagtggatgggcgtgaccgtgcagagccagggccccggcggcaaggtggtgacctgcgcccacagatacgagaagagacagcacgtgaacaccaagcaggagagcagagacatcttcggcagatgctacgtgctgagccagaacctgagaatcgaggacgacatggacggcggcgactggagcttctgcgacggcagactgagaggccacgagaagttcggcagctgccagcagggcgtggccgccaccttcaccaaggacttccactacatcgtgttcggcgcccccggcacctacaactggaagggcatcgtgagagtggagcagaagaacaacaccttcttcgacatgaacatcttcgaggacggcccctacgaggtgggcggcgagaccgagcacgacgagagcctggtgcccgtgcccgccaacagctacctgggcctgctgttcctgaccagcgtgagctacaccgaccccgaccagttcgtgtacaagaccagaccccccagagagcagcccgacaccttccccgacgtgatgatgaacagctacctgggcttcagcctggacagcggcaagggcatcgtgagcaaggacgagatcaccttcgtgagcggcgcccccagagccaaccacagcggcgccgtggtgctgctgaagagagacatgaagagcgcccacctgctgcccgagcacatcttcgacggcgagggcctggccagcagcttcggctacgacgtggccgtggtggacctgaacaaggacggctggcaggacatcgtgatcggcgccccccagtacttcgacagagacggcgaggtgggcggcgccgtgtacgtgtacatgaaccagcagggcagatggaacaacgtgaagcccatcagactgaacggcaccaaggacagcatgttcggcatcgccgtgaagaacatcggcgacatcaaccaggacggctaccccgacatcgccgtgggcgccccctacgacgacctgggcaaggtgttcatctaccacggcagcgccaacggcatcaacaccaagcccacccaggtgctgaagggcatcagcccctacttcggctacagcatcgccggcaacatggacctggacagaaacagctaccccgacgtggccgtgggcagcctgagcgacagcgtgaccatcttcagaagcagacccgtgatcaacatccagaagaccatcaccgtgacccccaacagaatcgacctgagacagaagaccgcctgcggcgcccccagcggcatctgcctgcaggtgaagagctgcttcgagtacaccgccaaccccgccggctacaaccccagcatcagcatcgtgggcaccctggaggccgagaaggagagaagaaagagcggcctgagcagcagagtgcagttcagaaaccagggcagcgagcccaagtacacccaggagctgaccctgaagagacagaagcagaaggtgtgcatggaggagaccctgtggctgcaggacaacatcagagacaagctgagacccatccccatcaccgccagcgtggagatccaggagcccagcagcagaagaagagtgaacagcctgcccgaggtgctgcccatcctgaacagcgacgagcccaagaccgcccacatcgacgtgcacttcctgaaggagggctgcggcgacgacaacgtgtgcaacagcaacctgaagctggagtacaagttctgcaccagagagggcaaccaggacaagttcagctacctgcccatccagaagggcgtgcccgagctggtgctgaaggaccagaaggacatcgccctggagatcaccgtgaccaacagccccagcaaccccagaaaccccaccaaggacggcgacgacgcccacgaggccaagctgatcgccaccttccccgacaccctgacctacagcgcctacagagagctgagagccttccccgagaagcagctgagctgcgtggccaaccagaacggcagccaggccgactgcgagctgggcaaccccttcaagagaaacagcaacgtgaccttctacctggtgctgagcaccaccgaggtgaccttcgacacccccgacctggacatcaacctgaagctggagaccaccagcaaccaggacaacctggcccccatcaccgccaaggccaaggtggtgatcgagctgctgctgagcgtgagcggcgtggccaagcccagccaggtgtacttcggcggcaccgtggtgggcgagcaggccatgaagagcgaggacgaggtgggcagcctgatcgagtacgagttcagagtgatcaacctgggcaagcccctgaccaacctgggcaccgccaccctgaacatccagtggcccaaggagatcagcaacggcaagtggctgctgtacctggtgaaggtggagagcaagggcctggagaaggtgacctgcgagccccagaaggagatcaacagcctgaacctgaccgagagccacaacagcagaaagaagagagagatcaccgagaagcagatcgacgacaacagaaagttcagcctgttcgccgagagaaagtaccagaccctgaactgcagcgtgaacgtgaactgcgtgaacatcagatgccccctgagaggcctggacagcaaggccagcctgatcctgagaagcagactgtggaacagcaccttcctggaggagtacagcaagctgaactacctggacatcctgatgagagccttcatcgacgtgaccgccgccgccgagaacatcagactgcccaacgccggcacccaggtgagagtgaccgtgttccccagcaagaccgtggcccagtacagcggcgtgccctggtggatcatcctggtggccatcctggccggcatcctgatgctggccctgctggtgttcatcctgtggaagtgcggcttcttcaagagaagcagatacgacgacagcgtgcccagataccacgccgtgagaatcagaaaggaggagagagagatcaaggacgagaagtacatcgacaacctggagaagaagcagtggatcaccaagtggaacgagaacgagagctacagctag

SEQ ID NO: 35754 - DNA, 3276 bp, Artificial Sequence
  derived and/or modified sequence
atggccgccgccggccagctgtgcctgctgtacctgagcgccggcctgctgagcagactgggcgccgccttcaacctggacaccagagaggacaacgtgatcagaaagtacggcgaccccggcagcctgttcggcttcagcctggccatgcactggcagctgcagcccgaggacaagagactgctgctggtgggcgcccccagagccgaggccctgcccctgcagagagccaacagaaccggcggcctgtacagctgcgacatcaccgccagaggcccctgcaccagaatcgagttcgacaacgacgccgaccccaccagcgagagcaaggaggaccagtggatgggcgtgaccgtgcagagccagggccccggcggcaaggtggtgacctgcgcccacagatacgagaagagacagcacgtgaacaccaagcaggagagcagagacatcttcggcagatgctacgtgctgagccagaacctgagaatcgaggacgacatggacggcggcgactggagcttctgcgacggcagactgagaggccacgagaagttcggcagctgccagcagggcgtggccgccaccttcaccaaggacttccactacatcgtgttcggcgcccccggcacctacaactggaagggcatcgtgagagtggagcagaagaacaacaccttcttcgacatgaacatcttcgaggacggcccctacgaggtgggcggcgagaccgagcacgacgagagcctggtgcccgtgcccgccaacagctacctgggcttcagcctggacagcggcaagggcatcgtgagcaaggacgagatcaccttcgtgagcggcgcccccagagccaaccacagcggcgccgtggtgctgctgaagagagacatgaagagcgcccacctgctgcccgagcacatcttcgacggcgagggcctggccagcagcttcggctacgacgtggccgtggtggacctgaacaaggacggctggcaggacatcgtgatcggcgccccccagtacttcgacagagacggcgaggtgggcggcgccgtgtacgtgtacatgaaccagcagggcagatggaacaacgtgaagcccatcagactgaacggcaccaaggacagcatgttcggcatcgccgtgaagaacatcggcgacatcaaccaggacggctaccccgacatcgccgtgggcgccccctacgacgacctgggcaaggtgttcatctaccacggcagcgccaacggcatcaacaccaagcccacccaggtgctgaagggcatcagcccctacttcggctacagcatcgccggcaacatggacctggacagaaacagctaccccgacgtggccgtgggcagcctgagcgacagcgtgaccatcttcagaagcagacccgtgatcaacatccagaagaccatcaccgtgacccccaacagaatcgacctgagacagaagaccgcctgcggcgcccccagcggcatctgcctgcaggtgaagagctgcttcgagtacaccgccaaccccgccggctacaaccccagcatcagcatcgtgggcaccctggaggccgagaaggagagaagaaagagcggcctgagcagcagagtgcagttcagaaaccagggcagcgagcccaagtacacccaggagctgaccctgaagagacagaagcagaaggtgtgcatggaggagaccctgtggctgcaggacaacatcagagacaagctgagacccatccccatcaccgccagcgtggagatccaggagcccagcagcagaagaagagtgaacagcctgcccgaggtgctgcccatcctgaacagcgacgagcccaagaccgcccacatcgacgtgcacttcctgaaggagggctgcggcgacgacaacgtgtgcaacagcaacctgaagctggagtacaagttctgcaccagagagggcaaccaggacaagttcagctacctgcccatccagaagggcgtgcccgagctggtgctgaaggaccagaaggacatcgccctggagatcaccgtgaccaacagccccagcaaccccagaaaccccaccaaggacggcgacgacgcccacgaggccaagctgatcgccaccttccccgacaccctgacctacagcgcctacagagagctgagagccttccccgagaagcagctgagctgcgtggccaaccagaacggcagccaggccgactgcgagctgggcaaccccttcaagagaaacagcaacgtgaccttctacctggtgctgagcaccaccgaggtgaccttcgacacccccgacctggacatcaacctgaagctggagaccaccagcaaccaggacaacctggcccccatcaccgccaaggccaaggtggtgatcgagctgctgctgagcgtgagcggcgtggccaagcccagccaggtgtacttcggcggcaccgtggtgggcgagcaggccatgaagagcgaggacgaggtgggcagcctgatcgagtacgagttcagagtgatcaacctgggcaagcccctgaccaacctgggcaccgccaccctgaacatccagtggcccaaggagatcagcaacggcaagtggctgctgtacctggtgaaggtggagagcaagggcctggagaaggtgacctgcgagccccagaaggagatcaacagcctgaacctgaccgagagccacaacagcagaaagaagagagagatcaccgagaagcagatcgacgacaacagaaagttcagcctgttcgccgagagaaagtaccagaccctgaactgcagcgtgaacgtgaactgcgtgaacatcagatgccccctgagaggcctggacagcaaggccagcctgatcctgagaagcagactgtggaacagcaccttcctggaggagtacagcaagctgaactacctggacatcctgatgagagccttcatcgacgtgaccgccgccgccgagaacatcagactgcccaacgccggcacccaggtgagagtgaccgtgttccccagcaagaccgtggcccagtacagcggcgtgccctggtggatcatcctggtggccatcctggccggcatcctgatgctggccctgctggtgttcatcctgtggaagtgcggcttcttcaagagaagcagatacgacgacagcgtgcccagataccacgccgtgagaatcagaaaggaggagagagagatcaaggacgagaagtacatcgacaacctggagaagaagcagtggatcaccaagtggaacgagaacgagagctacagctag

SEQ ID NO: 35755 - DNA, 3261 bp, Artificial Sequence
  derived and/or modified sequence
atggccgccgccggccagctgtgcctgctgtacctgagcgccggcctgctgagcagactgggcgccgccttcaacctggacaccagagaggacaacgtgatcagaaagtacggcgaccccggcagcctgttcggcttcagcctggccatgcactggcagctgcagcccgaggacaagagactgctgctggtgggcgcccccagagccgaggccctgcccctgcagagagccaacagaaccggcggcctgtacagctgcgacatcaccgccagaggcccctgcaccagaatcgagttcgacaacgacgccgaccccaccagcgagagcaaggaggaccagtggatgggcgtgaccgtgcagagccagggccccggcggcaaggtggtgacctgcgcccacagatacgagaagagacagcacgtgaacaccaagcaggagagcagagacatcttcggcagatgctacgtgctgagccagaacctgagaatcgaggacgacatggacggcggcgactggagcttctgcgacggcagactgagaggccacgagaagttcggcagctgccagcagggcgtggccgccaccttcaccaaggacttccactacatcgtgttcggcgcccccggcacctacaactggaagggcctgctgttcctgaccagcgtgagctacaccgaccccgaccagttcgtgtacaagaccagaccccccagagagcagcccgacaccttccccgacgtgatgatgaacagctacctgggcttcagcctggacagcggcaagggcatcgtgagcaaggacgagatcaccttcgtgagcggcgcccccagagccaaccacagcggcgccgtggtgctgctgaagagagacatgaagagcgcccacctgctgcccgagcacatcttcgacggcgagggcctggccagcagcttcggctacgacgtggccgtggtggacctgaacaaggacggctggcaggacatcgtgatcggcgccccccagtacttcgacagagacggcgaggtgggcggcgccgtgtacgtgtacatgaaccagcagggcagatggaacaacgtgaagcccatcagactgaacggcaccaaggacagcatgttcggcatcgccgtgaagaacatcggcgacatcaaccaggacggctaccccgacatcgccgtgggcgccccctacgacgacctgggcaaggtgttcatctaccacggcagcgccaacggcatcaacaccaagcccacccaggtgctgaagggcatcagcccctacttcggctacagcatcgccggcaacatggacctggacagaaacagctaccccgacgtggccgtgggcagcctgagcgacagcgtgaccatcttcagaagcagacccgtgatcaacatccagaagaccatcaccgtgacccccaacagaatcgacctgagacagaagaccgcctgcggcgcccccagcggcatctgcctgcaggtgaagagctgcttcgagtacaccgccaaccccgccggctacaaccccagcatcagcatcgtgggcaccctggaggccgagaaggagagaagaaagagcggcctgagcagcagagtgcagttcagaaaccagggcagcgagcccaagtacacccaggagctgaccctgaagagacagaagcagaaggtgtgcatggaggagaccctgtggctgcaggacaacatcagagacaagctgagacccatccccatcaccgccagcgtggagatccaggagcccagcagcagaagaagagtgaacagcctgcccgaggtgctgcccatcctgaacagcgacgagcccaagaccgcccacatcgacgtgcacttcctgaaggagggctgcggcgacgacaacgtgtgcaacagcaacctgaagctggagtacaagttctgcaccagagagggcaaccaggacaagttcagctacctgcccatccagaagggcgtgcccgagctggtgctgaaggaccagaaggacatcgccctggagatcaccgtgaccaacagccccagcaaccccagaaaccccaccaaggacggcgacgacgcccacgaggccaagctgatcgccaccttccccgacaccctgacctacagcgcctacagagagctgagagccttccccgagaagcagctgagctgcgtggccaaccagaacggcagccaggccgactgcgagctgggcaaccccttcaagagaaacagcaacgtgaccttctacctggtgctgagcaccaccgaggtgaccttcgacacccccgacctggacatcaacctgaagctggagaccaccagcaaccaggacaacctggcccccatcaccgccaaggccaaggtggtgatcgagctgctgctgagcgtgagcggcgtggccaagcccagccaggtgtacttcggcggcaccgtggtgggcgagcaggccatgaagagcgaggacgaggtgggcagcctgatcgagtacgagttcagagtgatcaacctgggcaagcccctgaccaacctgggcaccgccaccctgaacatccagtggcccaaggagatcagcaacggcaagtggctgctgtacctggtgaaggtggagagcaagggcctggagaaggtgacctgcgagccccagaaggagatcaacagcctgaacctgaccgagagccacaacagcagaaagaagagagagatcaccgagaagcagatcgacgacaacagaaagttcagcctgttcgccgagagaaagtaccagaccctgaactgcagcgtgaacgtgaactgcgtgaacatcagatgccccctgagaggcctggacagcaaggccagcctgatcctgagaagcagactgtggaacagcaccttcctggaggagtacagcaagctgaactacctggacatcctgatgagagccttcatcgacgtgaccgccgccgccgagaacatcagactgcccaacgccggcacccaggtgagagtgaccgtgttccccagcaagaccgtggcccagtacagcggcgtgccctggtggatcatcctggtggccatcctggccggcatcctgatgctggccctgctggtgttcatcctgtggaagtgcggcttcttcaagagaagcagatacgacgacagcgtgcccagataccacgccgtgagaatcagaaaggaggagagagagatcaaggacgagaagtacatcgacaacctggagaagaagcagtggatcaccaagtggaacgagaacgagagctacagctag

SEQ ID NO: 35756 - DNA, 3393 bp, Artificial Sequence
  derived and/or modified sequence
atggccgccgccggccagctgtgtttgctgtatctgtccgccggattgctcagccggctgggggctgcttttaaccttgacactcgagaagacaatgtcataaggaagtacggggaccccggcagcttatttggctttagcctggcaatgcattggcagctccagcccgaggataaacggctgcttctagtgggcgccccccgcgctgaggctttaccgctgcagcgcgcaaaccggacaggaggcctctatagttgtgatataaccgcccgcggtccgtgtacacgcattgagtttgacaatgacgcagaccctacatccgaatccaaagaggatcagtggatgggtgtaaccgttcagtctcaggggcccggggggaaggtcgtgacctgcgcgcataggtatgaaaagcggcagcatgtgaatactaagcaggagtccagagatatttttggacggtgttatgtgctctctcagaaccttcgcatcgaagatgatatggatgggggcgactggtctttttgcgacgggcggctccggggccatgagaaattcggctcctgccagcagggggtcgccgctacctttacaaaggacttccactatatcgtgtttggcgcaccggggacttacaactggaaaggcatcgtccgggtggaacaaaaaaataatactttcttcgacatgaacatcttcgaagacgggccttacgaagtcgggggagaaactgagcacgacgaatcactggtaccagtgccagccaatagctacctgggcctcctcttcttaacctcggtgagttatactgatccagaccaattcgtatataagactcgtccaccacgggaacagccagatacctttcccgacgtgatgatgaacagctatttaggatttagtctagactccggtaagggcattgtgtccaaagatgagatcacgttcgtctccggcgcccctcgggccaatcattctggtgccgtagttcttttaaaaagagacatgaagagcgcccacctattgcctgaacacatattcgatggtgagggtctggcctcaagttttgggtacgatgtggctgtcgtcgacctgaataaggacggatggcaggacattgtgataggcgctccgcagtattttgacagggatggtgaagttggcggggcagtgtacgtatacatgaatcaacaggggcgatggaataatgtgaaaccgattcggttgaacggtacaaaagactccatgttcggcattgctgtcaaaaatatcggcgatatcaatcaggacgggtatcccgacattgctgtaggcgctccttacgacgatctcggcaaagtgttcatatatcacggctctgcaaacggcatcaatacaaagcccactcaggttctgaaaggaatatcgccctatttcggctacagtattgccggaaacatggacttggacagaaactcctaccctgacgtcgccgtcgggagtctaagcgactcagtgactattttcagaagtcggccagtgatcaacatccagaagaccataactgtgacgcctaatcgaattgacctccggcagaaaacagcctgtggcgccccttcgggtatctgtctgcaggtaaagtcatgctttgaatatactgctaacccagctgggtacaatcccagcattagcattgtgggtaccctcgaagccgagaaagaacggcgcaaatcagggctgtcctcgagagtacagttcaggaaccagggatctgagccgaagtatacccaggaacttacacttaaacgccagaagcagaaggtatgcatggaggagaccctgtggttacaggacaatatcagagacaaactgaggccaatccctatcaccgcttctgtcgaaattcaggagccatcctctcgtaggcgggtgaacagcctgcccgaggtgctgcccatactaaatagcgatgagcccaagacagctcacatcgacgtgcactttttaaaagagggatgcggagatgacaacgtgtgcaactccaaccttaagttggaatataagttttgtactcgcgaaggcaaccaggacaagtttagctacctcccaatccagaaaggagtgccagagctggtcctgaaagaccagaaggatatcgccctggagattaccgtaacgaactctcctagtaatcccagaaaccctaccaaagacggtgatgatgcgcatgaggctaaactgattgcaacattccctgacaccctgacatattcagcgtatagagagttaagagcttttccggagaagcagctgagttgtgtggcgaaccagaacggttcccaagctgactgtgaactagggaatccctttaagcggaatagcaacgtaacattctacctcgtgctgagtactactgaggttacctttgatacacctgatctcgatatcaatttgaaactggagacaacctcgaaccaagataatttagctcctataacagccaaggctaaggtggtcattgaactgctcctctctgtgtcaggcgtggcgaaaccttctcaggtgtactttggcggcactgtagtcggagaacaagcaatgaaaagtgaagacgaggtgggatcactcatcgagtacgagttccgagtgataaacctgggcaaacctctcacaaatctgggcaccgccaccctgaatatccaatggccgaaagaaatctccaacggtaaatggctgctatacctagtgaaggtagaatcaaagggacttgagaaggtcacctgtgagccacagaaagagattaatagcttgaaccttaccgaatcacataactcccgaaagaagcgagaaattaccgagaagcagatagacgacaacaggaagttctccttgttcgctgagcgtaaatatcaaaccctgaactgtagtgtgaacgtgaattgcgttaacatacgttgcccccttcggggcctggatagtaaagcctctctaatccttcgtagcagattatggaactccacgtttctggaggagtattccaaactcaattaccttgatatcctgatgagagctttcatcgatgtgacagccgcggcggaaaatatcagactccctaatgccgggacccaggtgagggtgactgtttttccctctaaaacggttgctcaatattccggcgtgccctggtggatcattcttgtcgccattctggcagggattttgatgttggctttgctggtgtttattctgtggaaatgtgggtttttcaaaaggagtaggtacgacgactccgtgccacgctaccatgcagtgcggataaggaaagaggagagggagatcaaagatgaaaagtacattgacaatctagagaagaagcagtggataaccaaatggaacgagaacgaaagttactcctag

SEQ ID NO: 35757 - DNA, 3276 bp, Artificial Sequence
  derived and/or modified sequence
atggccgcagccggccagctctgtctcttatacctttccgcggggctcctctcccggctcggggcagctttcaaccttgacacccgcgaggacaatgtaatcaggaagtacggagatcctggatccctgtttggtttctccctggccatgcattggcaactccagcccgaagataaacgcctgctgctggtgggcgccccccgcgccgaggccctgccattgcagcgtgctaatcggacaggtggattgtatagctgcgacatcactgcccgtgggccatgtacccgcatcgagttcgacaacgacgccgacccaacctctgagagcaaggaagaccagtggatgggggtcaccgtgcagtcacagggccccgggggcaaagttgtgacctgcgctcatcggtacgagaagagacagcatgtcaatacaaaacaggaaagccgggatatttttggaagatgctacgtgctgtcacagaacttgcgaatcgaggacgacatggacggcggagactggtcgttttgcgacggacggttacgcggccatgagaagttcggctcctgccaacagggcgtggccgctacctttaccaaagattttcactatattgttttcggcgcacctggcacctacaattggaaaggaattgtacgcgtggaacagaagaataatactttcttcgatatgaacatttttgaagacggaccctacgaggtaggcggcgagacagagcatgacgaaagtctggttcctgtaccagccaacagttatttagggttcagtctcgacagcgggaaaggcatcgtgtctaaagacgagataacattcgtctcgggagctccccgtgcaaaccactctggagcggtagttctcctgaaacgcgatatgaagtcagcccacctcctgcctgagcacatattcgatggcgaggggttggccagtagtttcgggtatgatgtggccgtggtggacttaaataaggatggatggcaagatatcgtgataggtgctcctcagtattttgaccgcgatggggaagtcggcggcgccgtctacgtctacatgaatcagcaggggaggtggaacaatgttaagcccatcagactaaatggaaccaaggacagcatgttcggaattgctgtgaaaaacatcggcgatatcaatcaagatggctaccctgacatcgcagttggcgcaccttacgacgatttggggaaagtcttcatatatcatggtagtgcaaatgggatcaatacaaaacccacccaggtcctgaaaggaattagcccttatttcggttattcgattgccggcaacatggatctggaccgaaactcatacccggacgtggccgtgggctccctcagcgactccgtcacaattttccgctctaggcctgttatcaatatccagaagacgatcactgtcaccccaaaccggatagaccttagacagaagacggcttgcggcgctccttccggaatatgcctgcaggtcaaatcctgttttgagtatactgccaatcccgcgggttataatccgtctatttctattgtggggacgcttgaggctgagaaggaacgaaggaaatccggcctatcctctcgtgttcagtttagaaatcagggtagcgagcccaaatatacacaggagctaacgctgaaacgacagaaacagaaagtttgcatggaggaaaccctctggctccaagacaacatacgggataaactaagaccgattcctatcactgcatctgtggaaatacaggaaccctcatctcgcagacgagttaactcccttccagaagtgttgccgattctgaatagcgacgaacccaagaccgcccacatagacgtgcattttcttaaagaggggtgcggtgacgataatgtgtgcaactcgaacctcaagctggagtacaaattttgtactcgggaaggaaaccaagataaattttcctacctccccatccagaaaggtgtgcctgaactggtgctgaaggaccagaaggacatcgccctcgaaattactgtgacaaacagcccgagtaaccccagaaacccaactaaagacggcgacgatgcccacgaggccaaactcatcgccacgtttccagacaccctgacgtacagcgcctacagagagctacgggccttccctgagaaacaattgtcctgtgttgccaatcagaacggaagccaggccgactgcgaactcggaaatccatttaagaggaacagcaacgtgactttctatctggttctctccacaacggaagtaacatttgacacacctgaccttgatatcaaccttaaactggagaccacaagcaaccaagataacctcgcccccatcacggccaaggcaaaggtcgtcattgagctgctgctctctgtgtccggtgttgccaagccgagccaggtgtacttcggtgggactgtagttggggagcaagccatgaaatcagaagatgaggtgggcagcctcatcgagtacgagtttcgggttatcaacctagggaaaccgcttacaaatcttgggacagctaccctaaatattcagtggccaaaagagatcagcaacggtaagtggctgctctacctcgtaaaagtcgaaagcaagggtctcgagaaagtaacctgtgagccacagaaggaaatcaactctttgaatctgacagagagccataattcacgaaagaaaagggagatcacagagaaacagatcgatgacaacagaaagttttcacttttcgctgaaagaaaatatcagacattaaactgcagcgttaacgtcaattgtgtgaatatccggtgtccactacgcggcttagactcaaaagcttccctcattctgcgctctaggttgtggaacagcactttcctagaagagtattccaaactgaactacttggatatcctgatgagggcttttatagacgtcaccgccgcagccgagaatattaggttaccaaatgccggcacccaggtcagggttaccgttttcccgagcaagacggtcgcccaatatagcggggtgccgtggtggataatccttgttgccatattggctggtatcctaatgctggccttactcgtctttattctgtggaagtgtggcttctttaaaaggtccagatatgatgattcggtgccacggtaccacgcagtcaggatcagaaaagaagagcgcgaaatcaaggatgaaaagtatattgataacctggaaaagaagcagtggatcacaaaatggaatgagaatgagagttactcttag

SEQ ID NO: 35758 - DNA, 3393 bp, Artificial Sequence
  derived and/or modified sequence
atggcagctgcagggcagctgtgtttactgtatctgagcgccggcctgctatcaagactgggggctgctttcaatctggatacccgggaggataacgtgattcggaagtacggcgatcctgggtcattgttcggattcagccttgccatgcactggcagctccaacccgaggacaaaagactcctcttggttggcgcccctcgtgccgaagcactcccactgcagcgggccaacagaaccgggggcttgtatagctgcgacatcacagccagaggcccctgcacaaggattgaattcgataatgacgcagatcctacatccgagtccaaggaggatcaatggatgggcgtcacggttcagagccagggccccggcggaaaggtcgttacctgtgctcacagatacgaaaagcggcaacacgttaataccaaacaggagagcagagatatctttgggcggtgttacgtactatcccagaacctgaggatagaagatgacatggacggaggcgattggtccttttgcgacggtaggctgcggggacacgagaagttcggatcctgccagcaaggggttgccgccacatttaccaaagacttccactacatcgtctttggtgcccctggaacctacaactggaaagggatcgtgcgagtggagcagaaaaataatactttcttcgacatgaatatcttcgaggacggaccctacgaggttgggggcgaaacagaacatgacgaatcacttgtacctgtcccagcgaacagctatctaggcctactgttcctgacctcagtgtcctacaccgatccagaccagttcgtctataaaacgaggcctccgcgcgagcagccagataccttccccgacgtgatgatgaacagttacttgggcttctctcttgacagcggaaaaggcatagtgtctaaggacgaaatcacctttgtctctggagccccacgggcaaaccactctggcgccgtggttctcctgaagagagacatgaagtccgcacacctcctccccgagcatatctttgatggggaagggcttgcatcgtctttcggctatgacgtcgctgtagtcgacctgaataaggatggttggcaggatatcgttatcggagctcctcaatattttgacagggacggcgaggtgggaggtgcggtctatgtttatatgaaccagcaggggcggtggaataatgtcaaacccatccggctgaacggaacgaaggacagcatgttcgggattgccgtgaaaaacattggggacattaatcaggacggatatcccgacatagccgtgggtgcaccatacgacgacctcggtaaagtgtttatatatcacgggtccgctaacgggatcaacaccaaacccacacaagtgctcaaaggaatctccccatattttggctatagcatagccgggaatatggacttagaccgtaatagctatcctgatgtggccgtgggtagcctgtcggattcagtaactatattcagaagtcgcccagtgatcaatatccagaagaccattaccgtaacccctaaccgcatcgacctgagacagaagacagcctgcggggctccaagcggtatttgtttgcaggttaagagttgtttcgagtatacagctaatccagcagggtacaatcctagcatttctattgtggggactctagaagctgagaaggaacggcgaaagtcaggactttcatctcgggttcagttcagaaatcaggggtctgaacccaagtatacccaggagctcacattgaagaggcagaaacagaaggtgtgcatggaggagacactgtggctgcaggataacattagggataaactccgcccaattcctattacagcatcggtcgagattcaggaaccctcctcaagaagaagagttaacagtctcccagaagtgttacccattctgaactcggacgaaccaaagacagcgcacatcgatgtgcacttccttaaagaaggttgcggagatgataatgtgtgtaacagcaatctcaagctcgagtacaagttttgcacaagagaagggaaccaggacaagttttcgtatctgccaatccagaagggcgttcctgagctcgtgctaaaagatcagaaagatatagcgctggagattacagttaccaattcaccctctaatccacgcaaccctaccaaggacggcgacgacgctcacgaggccaagctcatagccacattccccgacactctgacgtactccgcataccgggaactgagagccttcccagagaagcagttgtcctgtgtcgccaaccagaatggaagtcaagccgactgcgaattgggcaaccctttcaaacgcaacagtaatgtcactttttaccttgtgctgtccaccaccgaggtcactttcgacacccctgatctcgatattaatctgaagctcgagacgacctccaaccaggacaacctagcgcccattactgccaaggctaaggtcgtgatagagttgctcctctcagtgagtggggttgcgaagccttcccaggtgtactttggcggtactgttgtaggcgaacaggcaatgaaatccgaggatgaggtaggaagcctgatcgagtatgaatttagggttattaacctcggcaaacccctcacgaacctcggcacagccacactgaacattcagtggcctaaagagatatcaaatggaaagtggttgctgtatctcgtgaaggttgaatctaaggggctggagaaagtgacgtgcgagccacaaaaagagattaattcattaaatttaacagaatcccacaattcccggaagaaacgggagatcaccgagaagcagatcgacgacaataggaaattttccttgttcgctgagcgcaagtaccagactcttaactgtagcgtgaatgtaaattgtgtgaacatccggtgccctctccgcggcctagattctaaggcgtccctcatcctgagatctagactgtggaattcgactttcttagaggagtactctaagcttaactatctggacatcctcatgcgggccttcatcgacgttaccgctgccgccgagaatatccgccttccaaatgctggaactcaggtgcgcgttacagtattcccatccaaaactgtcgcccagtattcaggggtgccctggtggatcatcttggtagccattctggcaggcatcctgatgctggccctcttagtcttcatcctgtggaagtgtggattctttaaacgatcaaggtatgacgacagcgtgccgcgataccacgcggtgcgcattcggaaagaggaacgggaaattaaagacgagaaatacatcgataacctggagaaaaaacagtggatcacaaaatggaacgagaacgaaagctactcatag

SEQ ID NO: 35759 - DNA, 3261 bp, Artificial Sequence
  derived and/or modified sequence
atggctgccgcaggccaattatgcctgctttatctcagcgcaggtcttctgagcaggctgggagctgcctttaacctggatacaagagaagacaatgtgataagaaaatatggagacccgggttcactgtttggattctctcttgcgatgcattggcaactacagcccgaagacaaacggttattgctagttggggcgcccagagccgaagccctgcctttgcagcgggctaatagaaccggcggactctatagctgcgatatcacagcccggggtccttgcacccggatagagtttgacaacgacgctgatccaacatcggaatccaaagaggaccagtggatgggcgtcacagtccaatcccaaggaccagggggaaaggttgtcacatgcgcccataggtacgagaagaggcagcacgtgaacacaaaacaggagagtcgggatatctttggcaggtgttatgtgctcagccaaaacttgcggatcgaggacgacatggacggtggtgattggagcttctgcgacggacggttgaggggacacgagaaatttgggagctgtcagcaaggcgttgcggctacctttacaaaggattttcattacattgtgtttggagcgcccgggacgtacaactggaagggactcctgttcttaacttctgtgtcttacacggatcctgaccagttcgtctacaaaactcgaccacctcgcgaacagcccgatacatttccagatgttatgatgaattcatacttgggattctctctggacagcggcaagggcatcgtttcgaaagacgaaatcacgttcgtctccggtgctcctcgggccaatcatagtggggccgtcgtgcttctcaagcgcgacatgaaatctgcgcatctcctcccggagcacatcttcgatggggaggggctggcgtcctcctttggttatgatgttgctgttgtcgacctgaacaaggacggatggcaagacatcgtgatcggcgctcctcaatacttcgacagggacggagaggtcggtggggccgtctatgtgtatatgaatcaacagggaagatggaacaatgtcaaacccatccgcctgaatggtaccaaagactcaatgttcggtatcgcggtcaaaaacatcggggatattaaccaggatggttacccggacatagcggtaggagcgccttatgacgacctaggtaaggtgttcatataccatggctctgcaaacggaattaacactaaacctacacaagtattaaaggggatttctccctactttgggtattcaattgccgggaacatggacctggatcggaactcctaccctgatgtggccgtcggttctctttctgacagcgtgaccattttcaggtctagacccgtgattaatattcagaagacaatcaccgtcaccccaaacaggattgatctccggcaaaaaaccgcctgtggagccccaagcggtatttgtctgcaggtcaagagctgttttgagtataccgctaatccagctgggtataacccttccatttcgattgtgggcacgcttgaggcagagaaagaacgccggaagtcagggctgtctagccgggtccagtttcgcaatcaggggtccgagccaaagtatactcaggagcttactctgaaacgccagaagcagaaggtctgcatggaggagacgctctggctgcaggataatatcagggacaaactgcggcctatccccatcaccgcatcagtagaaattcaggagccttcatccaggcgcagggttaattctctgccagaggtgctgcctattctgaactccgatgaaccgaagaccgcccacatcgacgtccacttcttgaaggaaggatgcggcgacgataacgtatgtaactcaaacctgaaactggaatataagttttgcactagggaagggaatcaggataagttcagctacctgccaatacagaagggtgtccccgagctggtcctgaaggaccagaaggatatcgcactcgagattaccgtaacaaattcccccagcaacccacgcaacccgaccaaggatggtgatgatgcccacgaagcgaagctgatcgcaacctttccagacacgttgacttatagcgcgtacagagagctgagggcatttccagagaagcagttgtcttgtgtggccaaccagaacgggagccaggctgattgcgagctgggaaacccctttaagagaaacagcaatgtgaccttttacctcgtcctcagtacaactgaagtgacttttgataccccagacctcgacatcaatctgaagctcgaaaccacaagtaatcaggacaatttggcgccgataactgcaaaagccaaggtagtgatcgagctactactgtctgtctccggggtggcaaaaccgagtcaggtctatttcggggggaccgtcgtaggcgaacaggccatgaagtcagaggacgaagttggatcactgatagaatatgaattccgcgtcattaacctcggtaaacccctgaccaacctgggcacagccaccttgaatatccagtggcccaaggagatttccaacggtaagtggctgctgtatctggtcaaggtcgaatccaaaggacttgaaaaagtcacctgcgaaccacagaaggaaatcaactcactgaacctgaccgagtcccacaactctcggaaaaagcgggagattacggagaagcagatcgacgacaacagaaagttcagcctgtttgcagagaggaagtatcagacactgaactgctccgtgaacgtcaactgcgtaaatatccgatgtcctctgcgcgggctggattcaaaggccagccttatactgcgcagccgcctgtggaatagcaccttcttggaggagtattcaaaactgaattacctggacattctgatgcgtgcatttatcgatgtgaccgccgcagccgagaacattagactgcccaatgctggaacccaggtgcgggttacggtgttcccatctaagacagttgcccaatactctggcgtgccctggtggatcatcttagttgctatcctggccggcattttaatgctagctctgcttgtgttcattctatggaagtgtgggttcttcaagcgtagtcggtatgacgactccgtgcctagatatcatgctgtaaggattaggaaggaggagagagagataaaagatgagaagtacatcgacaacctcgagaagaagcagtggataacaaagtggaatgagaacgagtcttatagttag

SEQ ID NO: 35760 - DNA, 3393 bp, Artificial Sequence
  derived and/or modified sequence
atggctgctgctggccagctgtgcctgctgtacctgtctgctggcctgctgagccggctgggcgccgccttcaacctggacacccgggaggacaacgtcatcagaaaatatggagaccccggcagcctgtttggcttcagcctggccatgcactggcagctgcagcctgaggacaagaggctgctgctggtgggcgcccccagggctgaggccctgcccctgcagagggccaacagaactggaggcctgtacagctgtgacatcacagcccggggcccctgcaccagaattgaatttgacaatgatgctgaccccaccagcgagagcaaagaagaccagtggatgggcgtgacagtgcagagccagggccctgggggcaaggtggtgacctgtgcccacagatatgagaagaggcagcacgtgaacaccaagcaggagagccgggacatcttcggccgctgctacgtgctgagccagaacctgagaattgaagatgacatggatggaggagactggagcttctgtgatggccgcctgcggggccacgagaagtttggcagctgccagcagggcgtggccgccaccttcaccaaggacttccactacatcgtgtttggagcccctggcacctacaactggaagggcatcgtgcgggtggagcagaagaacaacaccttctttgacatgaacatctttgaagatggcccctatgaggtgggcggggagacagaacatgatgagagcctggtgcctgtgcctgccaacagctacctgggcctgctcttcctgacctctgtgtcctacacagatcctgaccagtttgtgtacaagacccggcccccccgggagcagcctgacaccttcccagatgtgatgatgaacagctacctgggcttcagcctggacagcgggaaaggaattgtgtccaaggatgagatcacctttgtgtctggggccccccgggccaaccacagcggggctgtggtgctgctgaagagggacatgaagagcgcccacctgctgcctgagcacatctttgatggagagggcctggccagcagctttggctatgatgtggccgtggtggacctgaacaaggatggctggcaggacatcgtcatcggggccccccagtactttgacagagatggagaggtgggcggcgctgtgtatgtgtacatgaaccagcagggccgctggaacaacgtgaagcccatccggctgaatggcaccaaggacagcatgtttggaattgctgtgaagaacattggagacatcaaccaggacggctacccagacattgctgtgggcgccccctatgatgacctgggcaaggtgttcatctaccacggcagcgccaacggcatcaacaccaagcccacccaggtgctgaagggcatcagcccctacttcggctacagcattgctggcaacatggacctggacagaaattcctacccagatgtggccgtgggcagcctgagtgacagcgtgaccatcttccgcagcaggcctgtgatcaacatccagaagaccatcaccgtgacccccaacagaattgacctgcggcagaagacagcctgtggggcccccagcggcatctgcctgcaggtgaagagctgctttgagtacacagccaacccagctggctacaaccccagcatcagcatcgtgggcaccctggaggccgagaaggagaggaggaagagcggcctgagcagccgggtgcagttcaggaaccagggcagcgagcccaagtacacccaggagctgaccctgaagaggcagaagcagaaggtgtgcatggaggagaccctgtggctgcaggacaacatccgggacaagctgcggcccatccccatcacagcctctgtggagatccaggagcccagcagcagaagaagagtgaacagcctgcctgaggtgctgcccatcctgaacagtgatgagcccaagacagcccacattgatgtgcacttcctgaaggagggctgtggagatgacaacgtgtgcaacagcaacctgaagctggagtacaagttctgcacccgggagggcaaccaggacaagttctcctacctgcccatccagaagggcgtgcctgagctggtgctgaaggaccagaaggacatcgccctggagatcaccgtgaccaacagccccagcaaccccaggaaccccaccaaggatggagatgatgcccacgaggccaagctgattgccaccttcccagacaccctgacctacagcgcctaccgggagctgcgggccttccctgagaagcagctgagctgtgtggccaaccagaatggcagccaggccgactgtgagctgggcaaccccttcaagaggaacagcaatgtgaccttctacctggtgctgagcaccacagaggtgacctttgacaccccagacctggacatcaacctgaagctggagaccaccagcaaccaggacaacctggcccccatcacagccaaggccaaggtggtgattgagctgctgctgtctgtgtctggagtggccaagcccagccaggtgtactttggaggcaccgtggtgggggagcaggccatgaagtcagaagatgaggtgggcagcctgattgaatatgagttccgggtcatcaacctgggcaagcccctgaccaacctgggcacagccaccctgaacatccagtggcccaaggagatcagcaatggcaagtggctgctgtacctggtgaaggtggagagcaagggcctggagaaggtgacctgtgagccccagaaggagatcaacagcctgaacctgacagagagccacaacagcaggaagaagcgggagatcacagagaagcagattgatgacaacaggaagttcagcctgtttgctgagaggaagtaccagaccctgaactgcagcgtgaatgtgaactgtgtgaacatccgctgccccctgcggggcctggacagcaaggccagcctcatcctgcggagccggctgtggaacagcaccttcctggaggagtacagcaagctgaactacctggacatcctgatgagggccttcattgatgtgacagctgctgctgagaacatccggctgcccaatgccggcacccaggtgcgggtgacagtgttccccagcaagacagtggcccagtacagcggcgtgccctggtggatcatcctggtggccatcctggccggcatcctgatgctggccctgctggtgttcatcctgtggaagtgtggcttcttcaagaggagccgctatgatgattctgtgccccgctaccacgctgtgcgcatcaggaaggaggagcgggagatcaaggatgagaagtacatcgacaacctggagaagaagcagtggatcaccaagtggaatgaaaatgaaagctacagctag

SEQ ID NO: 35761 - DNA, 3276 bp, Artificial Sequence
  derived and/or modified sequence
atggctgctgctggccagctgtgcctgctgtacctgtctgctggcctgctgagccggctgggcgccgccttcaacctggacacccgggaggacaacgtcatcagaaaatatggagaccccggcagcctgtttggcttcagcctggccatgcactggcagctgcagcctgaggacaagaggctgctgctggtgggcgcccccagggctgaggccctgcccctgcagagggccaacagaactggaggcctgtacagctgtgacatcacagcccggggcccctgcaccagaattgaatttgacaatgatgctgaccccaccagcgagagcaaagaagaccagtggatgggcgtgacagtgcagagccagggccctgggggcaaggtggtgacctgtgcccacagatatgagaagaggcagcacgtgaacaccaagcaggagagccgggacatcttcggccgctgctacgtgctgagccagaacctgagaattgaagatgacatggatggaggagactggagcttctgtgatggccgcctgcggggccacgagaagtttggcagctgccagcagggcgtggccgccaccttcaccaaggacttccactacatcgtgtttggagcccctggcacctacaactggaagggcatcgtgcgggtggagcagaagaacaacaccttctttgacatgaacatctttgaagatggcccctatgaggtgggcggggagacagaacatgatgagagcctggtgcctgtgcctgccaacagctacctgggcttcagcctggacagcggcaagggcatcgtgtccaaggatgagatcacctttgtgtctggggccccccgggccaaccacagcggggctgtggtgctgctgaagagggacatgaagagcgcccacctgctgcctgagcacatctttgatggagagggcctggccagcagctttggctatgatgtggccgtggtggacctgaacaaggatggctggcaggacatcgtgattggagccccccagtactttgacagagatggagaggtgggcggcgctgtgtatgtgtacatgaaccagcagggccgctggaacaacgtgaagcccatccggctgaatggcaccaaggacagcatgtttggaattgctgtgaagaacatcggggacatcaaccaggacggctacccagacattgctgtgggcgccccctatgatgacctgggcaaggtgttcatctaccacggcagcgccaacggcatcaacaccaagcccacccaggtgctgaagggcatcagcccctacttcggctacagcattgctggcaacatggacctggacaggaacagctacccagatgtggccgtgggcagcctgagtgacagcgtgaccatcttccgcagcaggcctgtgatcaacatccagaagaccatcaccgtgacccccaacagaattgacctgcggcagaagacagcctgtggggcccccagcggcatctgcctgcaggtgaagagctgctttgagtacacagccaacccagctggctacaaccccagcatcagcatcgtgggcaccctggaggccgagaaggagaggaggaagagcggcctgagcagccgggtgcagttcaggaaccagggcagcgagcccaagtacacccaggagctgaccctgaagaggcagaagcagaaggtgtgcatggaggagaccctgtggctgcaggacaacatccgggacaagctgcggcccatccccatcacagcctctgtggagatccaggagcccagcagcagaagaagagtgaacagcctgcctgaggtgctgcccatcctgaacagtgatgagcccaagacagcccacattgatgtgcacttcctgaaggagggctgtggagatgacaacgtgtgcaacagcaacctgaagctggagtacaagttctgcacccgggagggcaaccaggacaagttctcctacctgcccatccagaagggcgtgcctgagctggtgctgaaggaccagaaggacatcgccctggagatcaccgtgaccaacagccccagcaaccccaggaaccccaccaaggatggagatgatgcccacgaggccaagctgattgccaccttcccagacaccctgacctacagcgcctaccgggagctgcgggccttccctgagaagcagctgagctgtgtggccaaccagaatggcagccaggccgactgtgagctgggcaaccccttcaagaggaacagcaatgtgaccttctacctggtgctgagcaccacagaggtgacctttgacaccccagacctggacatcaacctgaagctggagaccaccagcaaccaggacaacctggcccccatcacagccaaggccaaggtggtgattgagctgctgctgtctgtgtctggagtggccaagcccagccaggtgtactttggaggcaccgtggtgggggagcaggccatgaagtcagaagatgaggtgggcagcctcatcgagtatgagttccgggtcatcaacctgggcaagcccctgaccaacctgggcacagccaccctgaacatccagtggcccaaggagatcagcaatggcaagtggctgctgtacctggtgaaggtggagagcaagggcctggagaaggtgacctgtgagccccagaaggagatcaacagcctgaacctgacagagagccacaacagcaggaagaagcgggagatcacagagaagcagattgatgacaacaggaagttcagcctgtttgctgagaggaagtaccagaccctgaactgcagcgtgaatgtgaactgtgtgaacatccgctgccccctgcggggcctggacagcaaggccagcctcatcctgcggagccggctgtggaacagcaccttcctggaggagtacagcaagctgaactacctggacatcctgatgagggccttcattgatgtgacagctgctgctgagaacatccggctgcccaatgccggcacccaggtgcgggtgaccgtcttccccagcaagacagtggcccagtacagcggcgtgccctggtggatcatcctggtggccatcctggccggcatcctgatgctggccctgctggtgttcatcctgtggaagtgtggcttcttcaagaggagccgctatgatgacagcgtgccccgctaccacgctgtgcgcatcaggaaggaggagcgggagatcaaggatgagaagtacatcgacaacctggagaagaagcagtggatcaccaagtggaatgaaaatgaaagctacagctag

SEQ ID NO: 35762 - DNA, 3261 bp, Artificial Sequence
  derived and/or modified sequence
atggctgctgctggccagctgtgcctgctgtacctgtctgctggcctgctgagccggctgggcgccgccttcaacctggacacccgggaggacaacgtcatcagaaaatatggagaccccggcagcctgtttggcttcagcctggccatgcactggcagctgcagcctgaggacaagaggctgctgctggtgggcgcccccagggctgaggccctgcccctgcagagggccaacagaactggaggcctgtacagctgtgacatcacagcccggggcccctgcaccagaattgaatttgacaatgatgctgaccccaccagcgagagcaaagaagaccagtggatgggcgtgacagtgcagagccagggccctgggggcaaggtggtgacctgtgcccacagatatgagaagaggcagcacgtgaacaccaagcaggagagccgggacatcttcggccgctgctacgtgctgagccagaacctgagaattgaagatgacatggatggaggagactggagcttctgtgatggccgcctgcggggccacgagaagtttggcagctgccagcagggcgtggccgccaccttcaccaaggacttccactacatcgtgtttggagcccctggcacctacaactggaagggcctgctcttcctgacctctgtgtcctacacagatcctgaccagtttgtgtacaagacccggcccccccgggagcagcctgacaccttcccagatgtgatgatgaacagctacctgggcttcagcctggacagcgggaaaggaattgtgtccaaggatgagatcacctttgtgtctggggccccccgggccaaccacagcggggctgtggtgctgctgaagagggacatgaagagcgcccacctgctgcctgagcacatctttgatggagagggcctggccagcagctttggctatgatgtggccgtggtggacctgaacaaggatggctggcaggacatcgtcatcggggccccccagtactttgacagagatggagaggtgggcggcgctgtgtatgtgtacatgaaccagcagggccgctggaacaacgtgaagcccatccggctgaatggcaccaaggacagcatgtttggaattgctgtgaagaacattggagacatcaaccaggacggctacccagacattgctgtgggcgccccctatgatgacctgggcaaggtgttcatctaccacggcagcgccaacggcatcaacaccaagcccacccaggtgctgaagggcatcagcccctacttcggctacagcattgctggcaacatggacctggacagaaattcctacccagatgtggccgtgggcagcctgagtgacagcgtgaccatcttccgcagcaggcctgtgatcaacatccagaagaccatcaccgtgacccccaacagaattgacctgcggcagaagacagcctgtggggcccccagcggcatctgcctgcaggtgaagagctgctttgagtacacagccaacccagctggctacaaccccagcatcagcatcgtgggcaccctggaggccgagaaggagaggaggaagagcggcctgagcagccgggtgcagttcaggaaccagggcagcgagcccaagtacacccaggagctgaccctgaagaggcagaagcagaaggtgtgcatggaggagaccctgtggctgcaggacaacatccgggacaagctgcggcccatccccatcacagcctctgtggagatccaggagcccagcagcagaagaagagtgaacagcctgcctgaggtgctgcccatcctgaacagtgatgagcccaagacagcccacattgatgtgcacttcctgaaggagggctgtggagatgacaacgtgtgcaacagcaacctgaagctggagtacaagttctgcacccgggagggcaaccaggacaagttctcctacctgcccatccagaagggcgtgcctgagctggtgctgaaggaccagaaggacatcgccctggagatcaccgtgaccaacagccccagcaaccccaggaaccccaccaaggatggagatgatgcccacgaggccaagctgattgccaccttcccagacaccctgacctacagcgcctaccgggagctgcgggccttccctgagaagcagctgagctgtgtggccaaccagaatggcagccaggccgactgtgagctgggcaaccccttcaagaggaacagcaatgtgaccttctacctggtgctgagcaccacagaggtgacctttgacaccccagacctggacatcaacctgaagctggagaccaccagcaaccaggacaacctggcccccatcacagccaaggccaaggtggtgattgagctgctgctgtctgtgtctggagtggccaagcccagccaggtgtactttggaggcaccgtggtgggggagcaggccatgaagtcagaagatgaggtgggcagcctgattgaatatgagttccgggtcatcaacctgggcaagcccctgaccaacctgggcacagccaccctgaacatccagtggcccaaggagatcagcaatggcaagtggctgctgtacctggtgaaggtggagagcaagggcctggagaaggtgacctgtgagccccagaaggagatcaacagcctgaacctgacagagagccacaacagcaggaagaagcgggagatcacagagaagcagattgatgacaacaggaagttcagcctgtttgctgagaggaagtaccagaccctgaactgcagcgtgaatgtgaactgtgtgaacatccgctgccccctgcggggcctggacagcaaggccagcctcatcctgcggagccggctgtggaacagcaccttcctggaggagtacagcaagctgaactacctggacatcctgatgagggccttcattgatgtgacagctgctgctgagaacatccggctgcccaatgccggcacccaggtgcgggtgacagtgttccccagcaagacagtggcccagtacagcggcgtgccctggtggatcatcctggtggccatcctggccggcatcctgatgctggccctgctggtgttcatcctgtggaagtgtggcttcttcaagaggagccgctatgatgattctgtgccccgctaccacgctgtgcgcatcaggaaggaggagcgggagatcaaggatgagaagtacatcgacaacctggagaagaagcagtggatcaccaagtggaatgaaaatgaaagctacagctag

SEQ ID NO: 35763 - DNA, 5797 bp, Artificial Sequence
  derived and/or modified sequence
aacgggctcattcagcggtcgcgagctgcccgcgagggggagcggccggacggagagcgcgacccgtcccgggggtggggccgggcgcagcggcgagaggaggcgaaggtggctgcggtagcagcagcgcggcagcctcggacccagcccggagcgcagggcggccgctgcaggtccccgctcccctccccgtgcgtccgcccatggccgccgccgggcagctgtgcttgctctacctgtcggcggggctcctgtcccggctcggcgcagccttcaacttggacactcgggaggacaacgtgatccggaaatatggagaccccgggagcctcttcggcttctcgctggccatgcactggcaactgcagcccgaggacaagcggctgttgctcgtgggggccccgcgggcagaagcgcttccactgcagagagccaacagaacgggagggctgtacagctgcgacatcaccgcccgggggccatgcacgcggatcgagtttgataacgatgctgaccccacgtcagaaagcaaggaagatcagtggatgggggtcaccgtccagagccaaggtccagggggcaaggtcgtgacatgtgctcaccgatatgaaaaaaggcagcatgttaatacgaagcaggaatcccgagacatctttgggcggtgttatgtcctgagtcagaatctcaggattgaagacgatatggatgggggagattggagcttttgtgatgggcgattgagaggccatgagaaatttggctcttgccagcaaggtgtagcagctacttttactaaagactttcattacattgtatttggagccccgggtacttataactggaaagggattgttcgtgtagagcaaaagaataacactttttttgacatgaacatctttgaagatgggccttatgaagttggtggagagactgagcatgatgaaagtctcgttcctgttcctgctaacagttacttaggcctgctgtttttgaccagcgtttcctatacagatcctgatcagtttgtttataaaacacggcctccccgggagcagcctgacacattccctgatgtgatgatgaatagctacctaggtttttctttggactcagggaaaggtattgtttctaaagatgagatcacttttgtatctggtgctcccagagccaatcacagtggagccgtggttttgctgaagagagacatgaagtctgcacatctcctccctgagcacatattcgatggagaaggtctggcctcttcatttggctatgatgtggcggtggtggacctcaacaaggatgggtggcaagatatagttattggagccccacagtattttgatagagatggagaagttggaggtgcagtgtatgtctacatgaaccagcaaggcagatggaataatgtgaagccaattcgtcttaatggaaccaaagattctatgtttggcattgcagtaaaaaatattggagatattaatcaagatggctacccagatattgcagttggagctccgtatgatgacttgggaaaggtttttatctatcatggatctgcaaatggaataaataccaaaccaacacaggttctcaagggtatatcaccttattttggatattcaattgctggaaacatggaccttgatcgaaattcctaccctgatgttgctgttggttccctctcagattcagtaactattttcagatcccggcctgtgattaatattcagaaaaccatcacagtaactcctaacagaattgacctccgccagaaaacagcgtgtggggcgcctagtgggatatgcctccaggttaaatcctgttttgaatatactgctaaccccgctggttataatccttcaatatcaattgtgggcacacttgaagctgaaaaagaaagaagaaaatctgggctatcctcaagagttcagtttcgaaaccaaggttctgagcccaaatatactcaagaactaactctgaagaggcagaaacagaaagtgtgcatggaggaaaccctgtggctacaggataatatcagagataaactgcgtcccattcccataactgcctcagtggagatccaagagccaagctctcgtaggcgagtgaattcacttccagaagttcttccaattctgaattcagatgaacccaagacagctcatattgatgttcacttcttaaaagagggatgtggagacgacaatgtatgtaacagcaaccttaaactagaatataaattttgcacccgagaaggaaatcaagacaaattttcttatttaccaattcaaaaaggtgtaccagaactagttctaaaagatcagaaggatattgctttagaaataacagtgacaaacagcccttccaacccaaggaatcccacaaaagatggcgatgacgcccatgaggctaaactgattgcaacgtttccagacactttaacctattctgcatatagagaactgagggctttccctgagaaacagttgagttgtgttgccaaccagaatggctcgcaagctgactgtgagctcggaaatccttttaaaagaaattcaaatgtcactttttatttggttttaagtacaactgaagtcacctttgacaccccagatctggatattaatctgaagttagaaacaacaagcaatcaagataatttggctccaattacagctaaagcaaaagtggttattgaactgcttttatcggtctcgggagttgctaaaccttcccaggtgtattttggaggtacagttgttggcgagcaagctatgaaatctgaagatgaagtgggaagtttaatagagtatgaattcagggtaataaacttaggtaaacctcttacaaacctcggcacagcaaccttgaacattcagtggccaaaagaaattagcaatgggaaatggttgctttatttggtgaaagtagaatccaaaggattggaaaaggtaacttgtgagccacaaaaggagataaactccctgaacctaacggagtctcacaactcaagaaagaaacgggaaattactgaaaaacagatagatgataacagaaaattttctttatttgctgaaagaaaataccagactcttaactgtagcgtgaacgtgaactgtgtgaacatcagatgcccgctgcgggggctggacagcaaggcgtctcttattttgcgctcgaggttatggaacagcacatttctagaggaatattccaaactgaactacttggacattctcatgcgagccttcattgatgtgactgctgctgccgaaaatatcaggctgccaaatgcaggcactcaggttcgagtgactgtgtttccctcaaagactgtagctcagtattcgggagtaccttggtggatcatcctagtggctattctcgctgggatcttgatgcttgctttattagtgtttatactatggaagtgtggattctttaaacgctctaggtacgatgacagtgttccccgataccatgctgtaaggatccggaaagaagagcgagagatcaaagatgaaaagtatattgataaccttgaaaaaaaacagtggatcacaaagtggaacgaaaatgaaagctactcatagcgggggcctaaaaaaaaaaagcttcacagtacccaaactgctttttccaactcagaaattcaatttggatttaaaagcctgctcaatccctgaggactgatttcagagtgactacacacagtacgaacctacagttttaactgtggatattgttacgtagcctaaggctcctgttttgcacagccaaatttaaaactgttggaatggatttttctttaactgccgtaatttaactttctgggttgcctttatttttggcgtggctgacttacatcatgtgttggggaagggcctgcccagttgcactcaggtgacatcctccagatagtgtagctgaggaggcacctacactcacctgcactaacagagtggccgtcctaacctcgggcctgctgcgcagacgtccatcacgttagctgtcccacatcacaagactatgccattggggtagttgtgtttcaacggaaagtgctgtcttaaactaaatgtgcaatagaaggtgatgttgccatcctaccgtcttttcctgtttcctagctgtgtgaatacctgctcacgtcaaatgcatacaagtttcattctccctttcactaaaacacacaggtgcaacagacttgaatgctagttatacttatttgtatatggtatttattttttcttttctttacaaaccattttgttattgactaacaggccaaagagtctccagtttacccttcaggttggtttaatcaatcagaattagagcatgggaggtcatcactttgacctaaattatttactgcaaaaagaaaatctttataaatgtaccagagagagttgttttaataacttatctataaactataacctctccttcatgacagcctccaccccacaacccaaaaggtttaagaaatagaattataactgtaaagatgtttatttcaggcattggatattttttactttagaagcctgcataatgtttctggatttcatactgtaacattcaggaattcttggagaaaatgggtttattcactgaactctagtgcggtttactcactgctgcaaatactgtatattcaggacttgaaagaaatggtgaatgcctatggtggatccaaactgatccagtataagactactgaatctgctaccaaaacagttaatcagtgagtcgatgttctattttttgttttgtttcctcccctatctgtattcccaaaaattactttggggctaatttaacaagaactttaaattgtgttttaattgtaaaaatggcagggggtggaattattactctatacattcaacagagactgaatagatatgaaagctgattttttttaattaccatgcttcacaatgttaagttatatggggagcaacagcaaacaggtgctaatttgttttggatatagtataagcagtgtctgtgttttgaaagaatagaacacagtttgtagtgccactgttgttttgggggggcttttttcttttcggaaatcttaaaccttaagatactaaggacgttgttttggttgtactttggaattcttagtcacaaaatatattttgtttacaaaaatttctgtaaaacaggttataacagtgtttaaagtctcagtttcttgcttggggaacttgtgtccctaatgtgtttagattgctagattgctaaggagctgatactttgacagtgtttttagacctgtgttactaaaaaaaagatgaatgtcctgaaaagggtgttgggagggtggttcaacaaagaaacaaagatgttatggtgtttagatttatggttgttaaaaatgtcatctcaagtcaagtcactggtctgtttgcatttgatacatttttgtactaactagcattgtaaaattatttcatgattagaaattacctgtggatatttgtataaaagtgtgaaataaattttttataaaagtgttcattgtttcgtaacacagcattgtatatgtgaagcaaactctaaaattataaatgacaacctgaattatctatttcatcaaaccaaagttcagtgtttttatttttggtgtctcatgtaatctcagatcagccaaagatactagtgccaaagcaatgggattcggggtttttttctgttttcgctctatgtaggtgatcctcaagtctttcattttccttctttatgattaaaagaaacctacaggtatttaacaacc

SEQ ID NO: 35764 - DNA, 5298 bp, Artificial Sequence
  derived and/or modified sequence
atggccgccgccgggcagctgtgcttgctctacctgtcggcggggctcctgtcccggctcggcgcagccttcaacttggacactcgggaggacaacgtgatccggaaatatggagaccccgggagcctcttcggcttctcgctggccatgcactggcaactgcagcccgaggacaagcggctgttgctcgtgggggccccgcgggcagaagcgcttccactgcagagagccaacagaacgggagggctgtacagctgcgacatcaccgcccgggggccatgcacgcggatcgagtttgataacgatgctgaccccacgtcagaaagcaaggaagatcagtggatgggggtcaccgtccagagccaaggtccagggggcaaggtcgtgacatgtgctcaccgatatgaaaaaaggcagcatgttaatacgaagcaggaatcccgagacatctttgggcggtgttatgtcctgagtcagaatctcaggattgaagacgatatggatgggggagattggagcttttgtgatgggcgattgagaggccatgagaaatttggctcttgccagcaaggtgtagcagctacttttactaaagactttcattacattgtatttggagccccgggtacttataactggaaagggattgttcgtgtagagcaaaagaataacactttttttgacatgaacatctttgaagatgggccttatgaagttggtggagagactgagcatgatgaaagtctcgttcctgttcctgctaacagttacttaggtttttctttggactcagggaaaggtattgtttctaaagatgagatcacttttgtatctggtgctcccagagccaatcacagtggagccgtggttttgctgaagagagacatgaagtctgcacatctcctccctgagcacatattcgatggagaaggtctggcctcttcatttggctatgatgtggcggtggtggacctcaacaaggatgggtggcaagatatagttattggagccccacagtattttgatagagatggagaagttggaggtgcagtgtatgtctacatgaaccagcaaggcagatggaataatgtgaagccaattcgtcttaatggaaccaaagattctatgtttggcattgcagtaaaaaatattggagatattaatcaagatggctacccagatattgcagttggagctccgtatgatgacttgggaaaggtttttatctatcatggatctgcaaatggaataaataccaaaccaacacaggttctcaagggtatatcaccttattttggatattcaattgctggaaacatggaccttgatcgaaattcctaccctgatgttgctgttggttccctctcagattcagtaactattttcagatcccggcctgtgattaatattcagaaaaccatcacagtaactcctaacagaattgacctccgccagaaaacagcgtgtggggcgcctagtgggatatgcctccaggttaaatcctgttttgaatatactgctaaccccgctggttataatccttcaatatcaattgtgggcacacttgaagctgaaaaagaaagaagaaaatctgggctatcctcaagagttcagtttcgaaaccaaggttctgagcccaaatatactcaagaactaactctgaagaggcagaaacagaaagtgtgcatggaggaaaccctgtggctacaggataatatcagagataaactgcgtcccattcccataactgcctcagtggagatccaagagccaagctctcgtaggcgagtgaattcacttccagaagttcttccaattctgaattcagatgaacccaagacagctcatattgatgttcacttcttaaaagagggatgtggagacgacaatgtatgtaacagcaaccttaaactagaatataaattttgcacccgagaaggaaatcaagacaaattttcttatttaccaattcaaaaaggtgtaccagaactagttctaaaagatcagaaggatattgctttagaaataacagtgacaaacagcccttccaacccaaggaatcccacaaaagatggcgatgacgcccatgaggctaaactgattgcaacgtttccagacactttaacctattctgcatatagagaactgagggctttccctgagaaacagttgagttgtgttgccaaccagaatggctcgcaagctgactgtgagctcggaaatccttttaaaagaaattcaaatgtcactttttatttggttttaagtacaactgaagtcacctttgacaccccagatctggatattaatctgaagttagaaacaacaagcaatcaagataatttggctccaattacagctaaagcaaaagtggttattgaactgcttttatcggtctcgggagttgctaaaccttcccaggtgtattttggaggtacagttgttggcgagcaagctatgaaatctgaagatgaagtgggaagtttaatagagtatgaattcagggtaataaacttaggtaaacctcttacaaacctcggcacagcaaccttgaacattcagtggccaaaagaaattagcaatgggaaatggttgctttatttggtgaaagtagaatccaaaggattggaaaaggtaacttgtgagccacaaaaggagataaactccctgaacctaacggagtctcacaactcaagaaagaaacgggaaattactgaaaaacagatagatgataacagaaaattttctttatttgctgaaagaaaataccagactcttaactgtagcgtgaacgtgaactgtgtgaacatcagatgcccgctgcgggggctggacagcaaggcgtctcttattttgcgctcgaggttatggaacagcacatttctagaggaatattccaaactgaactacttggacattctcatgcgagccttcattgatgtgactgctgctgccgaaaatatcaggctgccaaatgcaggcactcaggttcgagtgactgtgtttccctcaaagactgtagctcagtattcgggagtaccttggtggatcatcctagtggctattctcgctgggatcttgatgcttgctttattagtgtttatactatggaagtgtggattctttaaacgctctaggtacgatgacagtgttccccgataccatgctgtaaggatccggaaagaagagcgagagatcaaagatgaaaagtatattgataaccttgaaaaaaaacagtggatcacaaagtggaacgaaaatgaaagctactcatagcgggggcctaaaaaaaaaaagcttcacagtacccaaactgctttttccaactcagaaattcaatttggatttaaaagcctgctcaatccctgaggactgatttcagagtgactacacacagtacgaacctacagttttaactgtggatattgttacgtagcctaaggctcctgttttgcacagccaaatttaaaactgttggaatggatttttctttaactgccgtaatttaactttctgggttgcctttatttttggcgtggctgacttacatcatgtgttggggaagggcctgcccagttgcactcaggtgacatcctccagatagtgtagctgaggaggcacctacactcacctgcactaacagagtggccgtcctaacctcgggcctgctgcgcagacgtccatcacgttagctgtcccacatcacaagactatgccattggggtagttgtgtttcaacggaaagtgctgtcttaaactaaatgtgcaatagaaggtgatgttgccatcctaccgtcttttcctgtttcctagctgtgtgaatacctgctcacgtcaaatgcatacaagtttcattctccctttcactaaaacacacaggtgcaacagacttgaatgctagttatacttatttgtatatggtatttattttttcttttctttacaaaccattttgttattgactaacaggccaaagagtctccagtttacccttcaggttggtttaatcaatcagaattagagcatgggaggtcatcactttgacctaaattatttactgcaaaaagaaaatctttataaatgtaccagagagagttgttttaataacttatctataaactataacctctccttcatgacagcctccaccccacaacccaaaaggtttaagaaatagaattataactgtaaagatgtttatttcaggcattggatattttttactttagaagcctgcataatgtttctggatttcatactgtaacattcaggaattcttggagaaaatgggtttattcactgaactctagtgcggtttactcactgctgcaaatactgtatattcaggacttgaaagaaatggtgaatgcctatggtggatccaaactgatccagtataagactactgaatctgctaccaaaacagttaatcagtgagtcgatgttctattttttgttttgtttcctcccctatctgtattcccaaaaattactttggggctaatttaacaagaactttaaattgtgttttaattgtaaaaatggcagggggtggaattattactctatacattcaacagagactgaatagatatgaaagctgattttttttaattaccatgcttcacaatgttaagttatatggggagcaacagcaaacaggtgctaatttgttttggatatagtataagcagtgtctgtgttttgaaagaatagaacacagtttgtagtgccactgttgttttgggggggcttttttcttttcggaaatcttaaaccttaagatactaaggacgttgttttggttgtactttggaattcttagtcacaaaatatattttgtttacaaaaatttctgtaaaacaggttataacagtgtttaaagtctcagtttcttgcttggggaacttgtgtccctaatgtgtttagattgctagattgctaaggagctgatactttgacagtgtttttagacctgtgttactaaaaaaaagatgaatgtcctgaaaagggtgttgggagggtggttcaacaaagaaacaaagatgttatggtgtttagatttatggttgttaaaaatgtcatctcaagtcaagtcactggtctgtttgcatttgatacatttttgtactaactagcattgtaaaattatttcatgattagaaattacctgtggatatttgtataaaagtgtgaaataaattttttataaaagtgttcattgtttcgtaacacagcattgtatatgtgaagcaaactctaaaattataaatgacaacctgaattatctatttcatc

SEQ ID NO: 35765 - DNA, 3390 bp, Artificial Sequence
  derived and/or modified sequence
atggccgccgccgggcagctgtgcttgctctacctgtcggcggggctcctgtcccggctcggcgcagccttcaacttggacactcgggaggacaacgtgatccggaaatatggagaccccgggagcctcttcggcttctcgctggccatgcactggcaactgcagcccgaggacaagcggctgttgctcgtgggggccccgcgggcagaagcgcttccactgcagagagccaacagaacgggagggctgtacagctgcgacatcaccgcccgggggccatgcacgcggatcgagtttgataacgatgctgaccccacgtcagaaagcaaggaagatcagtggatgggggtcaccgtccagagccaaggtccagggggcaaggtcgtgacatgtgctcaccgatatgaaaaaaggcagcatgttaatacgaagcaggaatcccgagacatctttgggcggtgttatgtcctgagtcagaatctcaggattgaagacgatatggatgggggagattggagcttttgtgatgggcgattgagaggccatgagaaatttggctcttgccagcaaggtgtagcagctacttttactaaagactttcattacattgtatttggagccccgggtacttataactggaaagggattgttcgtgtagagcaaaagaataacactttttttgacatgaacatctttgaagatgggccttatgaagttggtggagagactgagcatgatgaaagtctcgttcctgttcctgctaacagttacttaggcctgctgtttttgaccagcgtttcctatacagatcctgatcagtttgtttataaaacacggcctccccgggagcagcctgacacattccctgatgtgatgatgaatagctacctaggtttttctttggactcagggaaaggtattgtttctaaagatgagatcacttttgtatctggtgctcccagagccaatcacagtggagccgtggttttgctgaagagagacatgaagtctgcacatctcctccctgagcacatattcgatggagaaggtctggcctcttcatttggctatgatgtggcggtggtggacctcaacaaggatgggtggcaagatatagttattggagccccacagtattttgatagagatggagaagttggaggtgcagtgtatgtctacatgaaccagcaaggcagatggaataatgtgaagccaattcgtcttaatggaaccaaagattctatgtttggcattgcagtaaaaaatattggagatattaatcaagatggctacccagatattgcagttggagctccgtatgatgacttgggaaaggtttttatctatcatggatctgcaaatggaataaataccaaaccaacacaggttctcaagggtatatcaccttattttggatattcaattgctggaaacatggaccttgatcgaaattcctaccctgatgttgctgttggttccctctcagattcagtaactattttcagatcccggcctgtgattaatattcagaaaaccatcacagtaactcctaacagaattgacctccgccagaaaacagcgtgtggggcgcctagtgggatatgcctccaggttaaatcctgttttgaatatactgctaaccccgctggttataatccttcaatatcaattgtgggcacacttgaagctgaaaaagaaagaagaaaatctgggctatcctcaagagttcagtttcgaaaccaaggttctgagcccaaatatactcaagaactaactctgaagaggcagaaacagaaagtgtgcatggaggaaaccctgtggctacaggataatatcagagataaactgcgtcccattcccataactgcctcagtggagatccaagagccaagctctcgtaggcgagtgaattcacttccagaagttcttccaattctgaattcagatgaacccaagacagctcatattgatgttcacttcttaaaagagggatgtggagacgacaatgtatgtaacagcaaccttaaactagaatataaattttgcacccgagaaggaaatcaagacaaattttcttatttaccaattcaaaaaggtgtaccagaactagttctaaaagatcagaaggatattgctttagaaataacagtgacaaacagcccttccaacccaaggaatcccacaaaagatggcgatgacgcccatgaggctaaactgattgcaacgtttccagacactttaacctattctgcatatagagaactgagggctttccctgagaaacagttgagttgtgttgccaaccagaatggctcgcaagctgactgtgagctcggaaatccttttaaaagaaattcaaatgtcactttttatttggttttaagtacaactgaagtcacctttgacaccccagatctggatattaatctgaagttagaaacaacaagcaatcaagataatttggctccaattacagctaaagcaaaagtggttattgaactgcttttatcggtctcgggagttgctaaaccttcccaggtgtattttggaggtacagttgttggcgagcaagctatgaaatctgaagatgaagtgggaagtttaatagagtatgaattcagggtaataaacttaggtaaacctcttacaaacctcggcacagcaaccttgaacattcagtggccaaaagaaattagcaatgggaaatggttgctttatttggtgaaagtagaatccaaaggattggaaaaggtaacttgtgagccacaaaaggagataaactccctgaacctaacggagtctcacaactcaagaaagaaacgggaaattactgaaaaacagatagatgataacagaaaattttctttatttgctgaaagaaaataccagactcttaactgtagcgtgaacgtgaactgtgtgaacatcagatgcccgctgcgggggctggacagcaaggcgtctcttattttgcgctcgaggttatggaacagcacatttctagaggaatattccaaactgaactacttggacattctcatgcgagccttcattgatgtgactgctgctgccgaaaatatcaggctgccaaatgcaggcactcaggttcgagtgactgtgtttccctcaaagactgtagctcagtattcgggagtaccttggtggatcatcctagtggctattctcgctgggatcttgatgcttgctttattagtgtttatactatggaagtgtggattctttaaacgctctaggtacgatgacagtgttccccgataccatgctgtaaggatccggaaagaagagcgagagatcaaagatgaaaagtatattgataaccttgaaaaaaaacagtggatcacaaagtggaacgaaaatgaaagctactca

SEQ ID NO: 35766 - DNA, 3258 bp, Artificial Sequence
  derived and/or modified sequence
atggccgccgccgggcagctgtgcttgctctacctgtcggcggggctcctgtcccggctcggcgcagccttcaacttggacactcgggaggacaacgtgatccggaaatatggagaccccgggagcctcttcggcttctcgctggccatgcactggcaactgcagcccgaggacaagcggctgttgctcgtgggggccccgcgggcagaagcgcttccactgcagagagccaacagaacgggagggctgtacagctgcgacatcaccgcccgggggccatgcacgcggatcgagtttgataacgatgctgaccccacgtcagaaagcaaggaagatcagtggatgggggtcaccgtccagagccaaggtccagggggcaaggtcgtgacatgtgctcaccgatatgaaaaaaggcagcatgttaatacgaagcaggaatcccgagacatctttgggcggtgttatgtcctgagtcagaatctcaggattgaagacgatatggatgggggagattggagcttttgtgatgggcgattgagaggccatgagaaatttggctcttgccagcaaggtgtagcagctacttttactaaagactttcattacattgtatttggagccccgggtacttataactggaaaggcctgctgtttttgaccagcgtttcctatacagatcctgatcagtttgtttataaaacacggcctccccgggagcagcctgacacattccctgatgtgatgatgaatagctacctaggtttttctttggactcagggaaaggtattgtttctaaagatgagatcacttttgtatctggtgctcccagagccaatcacagtggagccgtggttttgctgaagagagacatgaagtctgcacatctcctccctgagcacatattcgatggagaaggtctggcctcttcatttggctatgatgtggcggtggtggacctcaacaaggatgggtggcaagatatagttattggagccccacagtattttgatagagatggagaagttggaggtgcagtgtatgtctacatgaaccagcaaggcagatggaataatgtgaagccaattcgtcttaatggaaccaaagattctatgtttggcattgcagtaaaaaatattggagatattaatcaagatggctacccagatattgcagttggagctccgtatgatgacttgggaaaggtttttatctatcatggatctgcaaatggaataaataccaaaccaacacaggttctcaagggtatatcaccttattttggatattcaattgctggaaacatggaccttgatcgaaattcctaccctgatgttgctgttggttccctctcagattcagtaactattttcagatcccggcctgtgattaatattcagaaaaccatcacagtaactcctaacagaattgacctccgccagaaaacagcgtgtggggcgcctagtgggatatgcctccaggttaaatcctgttttgaatatactgctaaccccgctggttataatccttcaatatcaattgtgggcacacttgaagctgaaaaagaaagaagaaaatctgggctatcctcaagagttcagtttcgaaaccaaggttctgagcccaaatatactcaagaactaactctgaagaggcagaaacagaaagtgtgcatggaggaaaccctgtggctacaggataatatcagagataaactgcgtcccattcccataactgcctcagtggagatccaagagccaagctctcgtaggcgagtgaattcacttccagaagttcttccaattctgaattcagatgaacccaagacagctcatattgatgttcacttcttaaaagagggatgtggagacgacaatgtatgtaacagcaaccttaaactagaatataaattttgcacccgagaaggaaatcaagacaaattttcttatttaccaattcaaaaaggtgtaccagaactagttctaaaagatcagaaggatattgctttagaaataacagtgacaaacagcccttccaacccaaggaatcccacaaaagatggcgatgacgcccatgaggctaaactgattgcaacgtttccagacactttaacctattctgcatatagagaactgagggctttccctgagaaacagttgagttgtgttgccaaccagaatggctcgcaagctgactgtgagctcggaaatccttttaaaagaaattcaaatgtcactttttatttggttttaagtacaactgaagtcacctttgacaccccagatctggatattaatctgaagttagaaacaacaagcaatcaagataatttggctccaattacagctaaagcaaaagtggttattgaactgcttttatcggtctcgggagttgctaaaccttcccaggtgtattttggaggtacagttgttggcgagcaagctatgaaatctgaagatgaagtgggaagtttaatagagtatgaattcagggtaataaacttaggtaaacctcttacaaacctcggcacagcaaccttgaacattcagtggccaaaagaaattagcaatgggaaatggttgctttatttggtgaaagtagaatccaaaggattggaaaaggtaacttgtgagccacaaaaggagataaactccctgaacctaacggagtctcacaactcaagaaagaaacgggaaattactgaaaaacagatagatgataacagaaaattttctttatttgctgaaagaaaataccagactcttaactgtagcgtgaacgtgaactgtgtgaacatcagatgcccgctgcgggggctggacagcaaggcgtctcttattttgcgctcgaggttatggaacagcacatttctagaggaatattccaaactgaactacttggacattctcatgcgagccttcattgatgtgactgctgctgccgaaaatatcaggctgccaaatgcaggcactcaggttcgagtgactgtgtttccctcaaagactgtagctcagtattcgggagtaccttggtggatcatcctagtggctattctcgctgggatcttgatgcttgctttattagtgtttatactatggaagtgtggattctttaaacgctctaggtacgatgacagtgttccccgataccatgctgtaaggatccggaaagaagagcgagagatcaaagatgaaaagtatattgataaccttgaaaaaaaacagtggatcacaaagtggaacgaaaatgaaagctactca

SEQ ID NO: 35767 - DNA, 3393 bp, Artificial Sequence
  derived and/or modified sequence
atggccgccgccggccagctgtgcctgctgtacctgagcgccggcctgctctctcgtctcggcgccgcattcaatttggacacaagagaagataatgtgatcagaaagtacggcgaccccggcagcctgttcggcttcagcttggccatgcattggcagctgcagcccgaagataagcgcttactcctggtgggggcccctcgtgcggaggccctacctctgcaacgggcaaatcgcacaggcggcctttactcctgcgacatcacagcaagggggccttgcacccggatcgaattcgacaatgacgcagatccaacatctgaatccaaagaagaccagtggatgggcgttaccgtgcagtcccaagggcccggagggaaggttgtgacctgtgctcaccgttacgagaaaagacaacatgtgaacacgaaacaggaatcacgtgacatattcggccgatgttacgtgctcagtcagaaccttaggattgaggacgatatggatggaggggattggagtttttgtgacgggcggctaagaggacacgaaaagttcggttcatgtcagcagggcgttgcagctactttcaccaaggacttccattatatcgtgtttggcgccccaggcacctacaattggaagggcatcgttagggtggagcagaagaacaacaccttcttcgatatgaatatcttcgaagacgggccatacgaagttggcggggagacggagcatgatgaaagtctggtcccggtgcccgctaacagctatctgggactactctttctgaccagcgtctcgtatacagaccccgatcagtttgtgtataagactaggccaccacgcgagcaaccagataccttccctgatgtaatgatgaatagttacctgggattctcacttgattctgggaaagggattgtttctaaggatgaaatcacctttgtgtctggtgcccctcgggccaatcactcgggagccgttgtacttctgaagcgtgacatgaagtccgcccatcttctgccagaacatattttcgacggggaaggcctcgcatctagtttcggctatgacgtcgcagtagtagacctgaataaggacggatggcaggacatcgttattggcgcgccacagtactttgacagggacggcgaggtaggcggcgccgtgtatgtttatatgaatcagcagggtaggtggaataatgtcaagcccattcgactgaacgggactaaagacagtatgttcggtatcgcagtcaagaacattggggatattaatcaggatggctatccagacatcgccgtgggggccccttatgacgacttaggaaaggtcttcatctaccatggctccgcgaacggcattaacacaaaaccaacccaggtcctaaaaggtatttctccttacttcgggtattcaatcgccgggaatatggacctggatagaaatagctatccagacgtggccgtcgggagtctgtcagactctgtcaccattttccggtccagaccagtgatcaacatccagaaaactatcactgttactcccaaccggatcgacttgcggcagaagaccgcttgtggagccccttctggcatctgcctgcaagtgaaatcatgttttgaatatacagccaacccagccgggtataatcctagtataagcattgtggggacacttgaggccgagaaagaacgaagaaaaagcgggctgagtagccgggttcagtttcggaatcaaggatcggaacccaagtatacacaagagcttactctaaaacggcagaagcaaaaagtttgtatggaggagacactctggctacaggacaacattcgggacaagctgaggcccattcccatcacagcctccgtggagatacaagagccatcatccagacggcgcgtaaacagcctcccagaggtgctgcctatactgaatagcgatgaacctaaaaccgcccacattgatgtgcacttcctcaaggagggttgtggggatgacaacgtgtgtaattctaaccttaaactggagtacaagttctgcacccgtgaagggaaccaggacaaattttcttaccttccgattcagaagggcgttccggaattggttcttaaggatcagaaggacattgcacttgaaatcaccgtgacgaattccccttccaatccccgaaatcccaccaaagacggcgacgacgcccatgaggctaagctcatcgcaacctttcctgacaccttgacatactctgcctaccgcgaattgcgtgcattcccagagaagcagctatcttgtgtagccaaccagaacggatcacaagctgactgcgaattggggaatccttttaaacggaattccaatgtgactttttacctcgtgctgagtaccacggaagtgacattcgataccccggatctcgatattaacttgaagttggagaccacatccaatcaggacaacttggcgcccatcacagctaaggcgaaagtggtcatagagctcttactgtctgtgagcggggtggctaagccctcccaggtgtattttggcggcaccgtggtcggggagcaagccatgaaatctgaggatgaggtggggtcacttatcgagtacgagttcagggtgattaacctaggaaaaccgctaacgaacctgggcacagctactctgaacatccaatggccaaaggaaatttcaaatggcaagtggctactgtacctggtgaaggtcgaaagtaaaggactggagaaggtaacttgtgagccccagaaagagatcaattctttaaatctgaccgaatctcataattcgcgcaagaagcgggaaatcacagagaaacaaattgacgataaccggaagtttagcctgtttgcagaacgcaagtaccagacactcaattgctctgtgaatgttaactgtgtcaatatccggtgccctctgagaggactcgactccaaagcctcgctgatcctcaggtcacggttgtggaatagcaccttcctggaggagtattccaagttaaactacctagacattctcatgcgggcattcattgacgtcacagctgcggctgaaaatatccgcttacccaatgctggaacacaggttagagtgaccgtgttcccatcgaagaccgttgctcagtattcaggggtgccctggtggatcatcctggtcgcaattttggccggtatcctaatgctcgccttgttagtgttcatcttatggaaatgcggcttcttcaagcgctcaagatatgacgattccgtgcctcggtaccacgccgttcgcataagaaaggaagaaagggagattaaagacgagaagtatatcgacaatctcgagaaaaagcagtggattaccaagtggaatgagaatgaaagttacagctag

SEQ ID NO: 35768 - DNA, 3276 bp, Artificial Sequence
  derived and/or modified sequence
atggccgccgccggccagctgtgcctgctgtacctgagcgccggcctgctgtctcggctcggcgctgcttttaacctggacactcgggaggacaacgtgatcaggaagtatggcgaccctgggtcactcttcgggttttcgcttgccatgcactggcaactccagccagaagacaagagattgctgttagttggcgcccctagagcagaggccctgcctctgcaacgtgcgaaccgtaccggcggactgtactcatgtgatataacagctcgtggcccctgcaccagaatcgagtttgataatgacgccgatccaactagtgaaagcaaggaggaccaatggatgggtgtgacagtccagtcccagggcccaggagggaaggttgtaacctgcgctcacagatacgagaaacgccagcatgtaaacactaagcaagaatccagggatatatttgggcggtgctatgttctatcacaaaacctaaggatcgaggatgacatggacggaggcgactggtctttctgtgacggccggctgcgtggccacgaaaaattcggatcctgccagcagggagtggccgccaccttcacaaaagactttcattacattgtgtttggggcccccggaacatacaactggaaggggattgtccgtgtggagcagaaaaataatacttttttcgatatgaatatcttcgaggacggtccatatgaagtgggaggggagacagagcacgacgagtctcttgtgccagtgcctgccaattcgtacttggggttctcattagatagcggtaaggggatcgtgagtaaggacgaaataactttcgtgagcggggctccaagggccaatcactccggcgccgtggtattgctcaaaagagacatgaaatccgctcacttacttccggagcatatcttcgacggggaaggcctggcctccagttttgggtacgacgtcgcagtcgtagatctgaacaaggacgggtggcaggacattgtgattggggcaccacagtactttgatagagatggtgaggttgggggcgcggtttacgtgtatatgaatcagcaaggccggtggaataacgtcaagccaatccggctgaacgggacaaaggacagcatgtttgggatagccgtcaagaatatcggagacatcaatcaggacgggtacccggatattgccgtcggggcaccttacgacgacctgggaaaagtgttcatttaccatggaagtgcaaacggaatcaataccaaacccacgcaggttcttaaagggatttctccgtatttcggatattcaatcgccggcaacatggatctcgaccggaattcctatcccgatgtagctgtgggaagcctttcagatagcgtaaccatatttagaagtcggcctgtcattaatatacagaaaaccatcactgtgaccccaaaccgaatcgacctcaggcaaaaaacagcttgcggagctccatcagggatttgtcttcaagtcaaatcctgtttcgagtatactgcgaatcctgcggggtataacccttcaatcagtatcgtgggaaccctcgaggccgagaaagaacgacgcaaatccggtctgtcctcacgcgtacagttccggaaccaaggatccgaacctaaatacactcaggagctcaccctcaagcgacagaagcagaaagtttgtatggaagagacgctctggctgcaagacaacatcagagataaactaagaccgattccgatcacagctagcgtggagatccaggaaccttcctcacggagacgtgtgaatagcctgcccgaagtgttgcctatactcaattctgacgaaccaaaaacagcccatatcgatgttcatttcctgaaggaagggtgcggtgatgacaacgtgtgcaattctaatctgaagcttgagtacaagttctgcacccgcgaagggaaccaagacaagttctcttatttgccaattcaaaagggagtccccgaattggtgctgaaggatcagaaagatattgccctagagataacggtgaccaactcgcccagcaatcctcgcaaccctacaaaggacggggatgatgcccacgaggccaagctgatcgccacattcccagacaccctaacatattccgcttatagagaacttcgggcattccctgagaagcaattgagctgcgtcgccaaccagaatggcagccaggctgactgtgaattggggaacccattcaagcgcaactctaatgtaaccttctatctcgtcctgagcacaactgaggtgacatttgacaccccagatctggacattaatttgaagcttgagacaacatcgaaccaggataacttagcccccattacagccaaagctaaagtcgtgatagagttattactgtcagtaagtggcgttgcaaaaccctcacaagtgtactttggaggaacagtggtgggcgaacaggctatgaaatccgaagatgaagtgggttcactcatcgaatacgaatttcgggtaataaatctcggcaaacctctgacaaatctcgggacggcaactctgaatatccaatggcctaaagagatctcgaatggtaagtggctactttatctggttaaagtggagtcgaagggccttgagaaagttacctgcgaaccacagaaagagattaactcacttaatctcaccgaatctcataatagtcgtaagaagcgcgaaattacagagaaacaaattgacgataataggaagttttcactctttgccgaaagaaagtatcagacacttaattgcagtgtcaacgtgaattgcgttaatattaggtgcccactccgtggattggactcaaaggctagtttaatcttgaggtcccgcctgtggaactcaactttcctcgaagagtacagtaaacttaattaccttgatattctaatgagagctttcatcgacgtgacggccgcggccgaaaatatacgcttgcctaacgccggaacacaggttcgggtcaccgtctttcccagtaagaccgtggcccaatactcgggcgttccatggtggataatcctggtggccattctggccggaatacttatgctcgcgttactagtatttatattgtggaaatgcggcttcttcaaacggtctcgttatgatgatagtgtcccccggtaccatgctgtcaggatacgcaaggaggagcgggaaatcaaggacgagaagtacattgacaatttagaaaagaagcagtggatcacgaagtggaatgagaacgaaagctattcgtag

SEQ ID NO: 35769 - DNA, 3393 bp, Artificial Sequence
  derived and/or modified sequence
atggccgccgccggccagctgtgcctgctgtacctgagcgccggcctgctgagcagattgggtgccgcctttaatctagacacgagggaagacaatgtcattagaaagtacggcgaccctggctctttatttggtttcagccttgcaatgcattggcagcttcagccggaggataaaagacttcttctggtcggcgccccgcgggccgaggcacttcctctgcagcgcgcaaaccggaccggcggtctttatagctgtgacatcacggcaagaggcccttgtacaaggattgagtttgacaacgacgccgatccgacttccgaatctaaagaggaccagtggatgggtgttaccgtgcagagccaagggcccggcggcaaggtcgtgacgtgcgcacaccggtatgagaaacggcagcacgtcaacacaaagcaggaatccagagacattttcggtagatgctacgtgctgagccaaaatctcaggatcgaagacgacatggatgggggggattggagtttctgtgatggacgactgcgggggcacgagaagttcggttcatgtcaacagggggttgccgctactttcacaaaggattttcactatattgtgtttggagctccgggtacctacaattggaagggcattgtcagagtggagcagaaaaacaacacattttttgacatgaatatttttgaggacggcccgtatgaggtggggggagagaccgaacacgacgagagtctggttcctgttcccgctaacagctatttaggtctgctgttcctgacaagcgtgagctacaccgacccagatcaattcgtgtacaagactcggccgccacgggaacagcccgacactttccccgacgtgatgatgaactcttatctgggtttctcccttgattcaggaaagggcatcgtatctaaggacgaaatcacattcgtcagcggggcaccccgggccaatcactctggagccgtggtgttgctaaagagggacatgaagagcgcccatctccttcccgaacacattttcgatggtgaaggcttagcctcttcatttggatacgatgtagccgtcgtcgatcttaacaaggatggctggcaggacatcgtgatcggagcacctcagtacttcgacagggatggggaagtgggaggagccgtctacgtatacatgaatcagcaaggtagatggaataacgtaaagcctattaggctgaacgggacgaaggactcaatgttcggcatagctgtgaagaacataggtgacatcaaccaagatggctacccagacatagccgttggagctccctatgatgacctgggcaaggtctttatctaccacgggtctgctaacgggatcaatacaaagcctactcaggtactgaaggggatttctccttacttcgggtattcaatcgccggcaacatggatctggatcggaattcctacccagacgtggctgtggggagcctttctgatagtgtaacgatttttagatctcgccccgtgattaacatacagaagactattacggtgacaccaaacagaattgatttgcggcagaagacggcttgcggcgccccctcaggaatttgcctgcaggtgaaatcgtgcttcgaatataccgcaaatccggcaggctacaatccgtctatcagtattgtcgggactcttgaggcggagaaagagaggcggaaaagtgggcttagcagcagggttcagttcaggaatcaaggctctgagcctaagtatacccaggagctgacgctgaagaggcaaaaacaaaaggtttgtatggaggagacgctctggctccaggataatatcagggacaaacttcgccccatccctattaccgccagcgtggagatccaagaaccctcatccagacggcgtgtgaactccctccccgaagtcctgccaatcctcaattccgacgagccaaagactgctcacattgacgtccattttctgaaggagggttgtggcgacgacaacgtttgtaacagcaatctgaagcttgaatacaaattctgcacaagagagggcaatcaagacaagttttcttacctgcctatccagaaaggtgtccccgaactagttctgaaggaccagaaggatattgcactggagatcaccgttaccaactccccgtcaaacccccggaaccctacgaaggacggggacgacgctcacgaagccaaactgattgctaccttccctgacactctgacatactctgcgtacagagagctgcgtgccttccccgagaagcagctgtcatgtgtcgctaaccagaatggctcacaagccgattgtgagttggggaaccccttcaagcgaaactcaaatgtcactttctacttagtcttgtctacaacggaagtgacgttcgacacgcctgatctagacattaacctgaaacttgagactacatccaatcaggataatcttgccccaatcaccgccaaagcaaaggttgtgattgaattgttactgagtgttagtggggtcgccaaaccctcccaggtgtacttcggcggcacagttgtaggtgagcaagccatgaaaagtgaggatgaggtggggtccctgattgagtatgaatttcgagttataaatttaggaaagcctctcaccaatctgggaaccgcaaccctgaacattcaatggcctaaagagatctcaaacgggaagtggctgttgtatctggtgaaggtcgaaagtaagggcttggaaaaggttacctgcgaaccccaaaaagaaattaacagcctgaatctaaccgaatcacacaatagccgaaagaaacgggagattaccgaaaagcaaatcgacgacaacagaaaattttccctctttgccgagcgaaaataccagacgttgaactgcagtgtgaacgtgaattgtgtcaatattaggtgcccactgagaggcctggactccaaggccagcttaattcttcgatcgagattatggaactcgacattcctcgaagagtacagcaagctcaattacctagacatcctgatgagagcttttatagatgttacagctgcagccgagaacattcggttacctaacgctgggacccaggtgcgcgttacagttttcccttccaaaacagtggcccagtacagtggtgtaccttggtggattatccttgtagcgattttggccggaatactgatgctggccttgttagtattcatcctgtggaaatgcggattcttcaagaggagcagatatgacgacagcgtgcctaggtatcacgcggtgaggattcgtaaggaagagagagagattaaagatgagaagtatatagataatctcgagaagaagcagtggatcacaaaatggaatgagaacgagagttatagctag

SEQ ID NO: 35770 - DNA, 3261 bp, Artificial Sequence
  derived and/or modified sequence
atggccgccgccggccagctgtgcctgctgtacctgagcgccggcttgctgagccgtttaggcgccgcctttaacctggatacaagggaggataatgtgatccgcaagtatggggaccctggtagcctgtttggtttcagtctcgccatgcactggcagcttcagcccgaagacaagagactcctgctcgtaggggcccctagggctgaagcactgcctctccagcgggccaacagaacaggtggcctatactcctgcgacattaccgccaggggcccctgcacccggatagagttcgataatgatgcagaccccacatcagagagcaaagaggatcaatggatgggagtcacggtacagagccagggcccaggtggcaaagtggtaacttgcgcacaccgatacgaaaaacgtcagcacgtcaacaccaagcaggagtctagagacatatttggaaggtgttatgtgctaagccaaaatttgagaatcgaagatgatatggatggtggtgactggtcattttgcgacggccggctcagggggcacgaaaagttcggaagctgtcagcagggtgttgcagcaactttcactaaagacttccactacattgtattcggcgccccgggaacgtacaactggaaaggcctcctctttctgacatctgtgtcctataccgatcctgatcaatttgtgtacaaaacccgcccaccccgcgagcaaccagatacctttcctgacgtcatgatgaactcctacttagggtttagcctcgattctggtaagggtatcgttagtaaagacgagatcacattcgtgtcaggggcccctagggcaaatcacagcggggctgtggtcctgctgaagagggacatgaaatccgcccacttgctgccagagcatatttttgacggggaaggcttggcgtcttctttcggctacgatgtcgcagttgtggacctgaataaagatggctggcaagatatcgttatcggcgccccacaatacttcgatcgggacggggaagtgggcggggcggtctacgtctacatgaatcagcagggacgctggaacaatgtcaagcctatccggcttaatggaacgaaggactccatgttcggcatcgccgtcaaaaacataggcgatatcaaccaagacggatacccagatatcgctgtgggtgctccttacgatgacttagggaaggtctttatttatcatgggtccgctaacggcattaacacaaaacccactcaggtactcaaaggcatctccccctatttcgggtatagcatagccggaaacatggatctggacaggaattcatacccagatgttgctgtcggcagcctcagcgactctgttacaattttcagatcccgccccgtgattaatatccagaagacgataaccgtcacgccaaaccggatcgatttacgacagaaaaccgcgtgtggggcaccttcaggaatatgtttgcaggttaaatcctgttttgagtatactgccaacccagccggctacaatcctagtatttccatagtgggcaccctcgaggcagagaaggagcgaaggaaaagcggcctgagctctagggtgcaatttaggaaccaagggtccgaacccaagtacactcaagagctgactctcaagagacagaaacaaaaagtgtgcatggaagaaaccctgtggctacaggataatattagagataagttaagacccattcccattactgcaagtgtcgagatccaggaaccgagttctagaaggcgcgtaaattcgctgccggaagtcctccctatcctaaacagcgatgaacccaagacagcccacatcgatgtgcattttctaaaggagggatgtggcgacgataatgtgtgtaacagcaacctcaaactcgagtacaagttttgcacccgtgaggggaaccaggataaattcagctatctccctatccagaagggcgtgccagaactcgtattaaaggaccagaaggatatagcgcttgaaatcaccgttaccaattccccatctaatcctcggaaccccaccaaggatggggacgacgctcacgaggccaagttgattgccaccttccctgacacactgacctatagcgcgtacagagaactgcgcgcattccctgagaaacaactgagttgtgtagctaaccagaacgggtcccaggcggattgtgagttggggaacccctttaagaggaatagcaatgtcaccttctacctcgtcctctccacaacggaggtaacatttgacactccggatctcgacatcaacttgaagctggagacaacatcaaatcaggacaacctcgcaccaattaccgccaaggctaaggtggttatagagctgttgttgtccgtgtccggagtggccaagccctcccaggtgtatttcggaggcactgtggtgggtgagcaggccatgaagtcggaagacgaagtggggtcgctgatagaatatgagtttcgcgtaattaacctcggcaagccactaacaaatctagggacagccactctgaatattcagtggccgaaggagataagcaacggcaaatggctattatatctcgtgaaagtcgaatctaaaggactggaaaaggtcacctgcgaaccccaaaaggagatcaattcactaaatcttacggagagccacaattccaggaagaagcgcgagataactgaaaaacagattgacgataacagaaaattctcccttttcgctgaacgaaagtaccagacccttaattgctctgtcaatgtgaactgtgtgaacattcgctgccctctgcggggtctggactccaaggctagcctgatccttcgatccaggctgtggaattcaacttttttggaggagtactcaaagctgaactatctggacatcctgatgcgggcctttattgacgtgaccgccgccgccgagaacattagattgcctaatgcaggtactcaggttagagtgactgtattcccctctaaaaccgtggctcagtatagcggtgtgccctggtggatcattctggtggctatcctcgcgggaattctgatgcttgccctgttagtgttcatcctgtggaaatgtggattcttcaaacgtagcaggtatgacgattctgtaccccggtatcacgcggtgcgaattcgcaaggaggaaagagaaatcaaagatgagaagtacatcgacaacctggagaagaaacagtggattactaagtggaatgagaacgagtcctactcctag

SEQ ID NO: 35771 - DNA, 3393 bp, Artificial Sequence
  derived and/or modified sequence
atggctgccgctggacagttatgtctgctgtatctgagtgccggattgctctccagactgggcgcagcgtttaacttggacacgcgggaggataacgtgatcagaaagtatggcgaccccggaagtctattcgggttttcgctcgccatgcactggcaattacagcctgaggacaagcggctattactggtgggcgcacctcgggcagaggccctgcctctacagcgcgctaaccgtacagggggactttattcatgtgacatcactgccagaggtccatgtaccaggatcgagtttgataatgatgccgatccaacatccgagtccaaggaggatcagtggatgggagttactgtgcagagccaggggccaggtgggaaggtagtgacctgtgcccacagatacgaaaagagacaacacgtgaacaccaaacaggagtcgagagacattttcgggaggtgctatgttctatcccaaaacttaagaattgaggatgacatggacggaggagactggtccttttgtgacgggagactgcggggacacgagaaatttggctcatgccagcagggcgttgctgccactttcaccaaagactttcactacattgtttttggggcaccagggacttacaattggaaggggattgttagagtggagcaaaagaacaacacattcttcgacatgaacatttttgaagatggcccttacgaagtcgggggtgaaacagagcatgacgaatctctagttcccgttccagcaaatagttaccttggcctactgtttcttacaagcgtttcctacaccgacccagatcagttcgtgtataagacacgcccacctagagagcaaccagacacatttccagatgtgatgatgaacagctatctgggtttcagcctcgattccggaaagggcatcgtcagtaaggacgagatcactttcgttagcggagcacctagagccaaccatagcggtgcggtggtgttgctgaaacgggacatgaaatcagctcacttgcttccagaacatatcttcgatggcgagggtctggcatcgtcatttggatacgacgttgcagtcgtggacttaaacaaggacggctggcaagacatagtaatcggggcaccacagtacttcgatcgagatggggaagtgggcggtgccgtgtacgtgtatatgaatcagcaagggagatggaataacgtcaaaccgattagactaaatggcacaaaagactctatgtttggaatagccgtgaagaacattggagatatcaatcaagacggatacccagacattgctgttggcgcaccttacgacgatctgggcaaggtgtttatttatcatgggagcgcaaatgggataaatactaagcccacacaggtcctgaaagggatctcaccctatttcggttatagcattgcagggaatatggatttagaccgtaactcttatccagatgtggccgtagggtccctgagcgattctgttacaatctttaggagcagacccgtcatcaatattcaaaaaacaatcactgtgacaccaaaccgcatcgacttacgtcagaagaccgcttgcggcgcaccaagcggcatctgcctccaagtcaaaagctgcttcgaatatacagctaaccccgcagggtataatccatctatctccatcgttgggacactggaggctgaaaaagagaggcgtaagtccggactgtcttccagagtccagtttcgtaatcaggggtccgaaccgaaatacacccaggagctgactctgaaacgtcagaagcagaaagtctgcatggaggaaaccctgtggctacaggacaatatccgcgataaactgagaccgattccaatcactgcctccgttgagatccaggagcccagttctcggagaagggtcaattccctccctgaagtgttgcctattctgaactctgacgaacccaaaactgcccatatagatgtccactttctcaaagaaggttgtggtgacgacaacgtctgcaatagtaatctgaaactggagtataagttttgcaccagggagggaaaccaggacaagttttcctaccttccaatccagaagggtgtgcctgagttagtgttgaaagaccagaaagatattgcgttggaaatcactgtaacaaatagtccgtccaatcctaggaacccgacaaaagatggcgacgatgcccatgaagcgaaactcatcgccacattcccagacactctcacatattcagcttacagggaacttagggccttccctgagaaacaactgagttgtgtggccaatcagaatgggagtcaagccgattgtgagctcggcaaccctttcaagaggaatagtaatgtcaccttttatctggtcctgtctactacggaagtgacatttgatacgcccgatctcgacatcaatctgaagctcgaaacaacttcaaatcaggataacctcgcccctatcacagctaaagcgaaggtggtcatcgagctacttctatctgttagcggcgttgccaagccatcccaggtgtatttcggaggcactgtggtgggagaacaagctatgaagtctgaggacgaggttggctcactgatagaatacgagtttcgcgtgatcaatctcgggaaacctctgaccaacttgggtactgctacactgaatatacagtggccgaaggaaatctccaacgggaagtggctgctctatctggtgaaggtggagagcaagggcctggagaaagttacgtgtgagccccagaaggaaattaattccttaaatctgacagagtcccacaatagtaggaagaagagggagataaccgagaaacagatcgatgacaatcgaaaattctccctgtttgccgagagaaaataccagaccctgaactgtagcgtaaacgtaaactgtgtcaatattaggtgcccgttgcggggactggacagtaaggccagcctcatcctgcggtcgcgcctgtggaacagcacattccttgaggagtattcaaaactcaactacctcgacatactcatgcgtgctttcattgacgtgacagcagccgcagagaatatcaggctgcccaacgccggaacacaggtgcgggtaaccgtttttccaagcaaaactgtagctcagtactctggtgtcccatggtggatcatcctcgtggctattcttgccggaatactgatgctggccctgttagtgttcatactgtggaagtgcggcttcttcaagaggtccagatacgatgactctgttcctagataccacgcagttcgcatacggaaagaggagcgagagatcaaagacgagaagtatattgataatctggagaagaaacagtggattaccaaatggaatgagaacgaatcatatagttag

SEQ ID NO: 35772 - DNA, 3276 bp, Artificial Sequence
  derived and/or modified sequence
atggccgcagctggccaattgtgcttgctgtatttgtcagctggactgctgtcccgattaggtgccgctttcaacctcgacacgagagaggacaatgtaatcaggaagtatggtgatcccggttcccttttcggcttcagcctggccatgcattggcagctccagcctgaagataaacgcttactgctggtgggagcacctcgggcagaagctttgcctctgcagcgagccaatcgtacggggggactctactcttgtgatattacagcacgtggtccgtgtacccggattgaattcgacaacgatgcagatcctactagcgaaagcaaagaggaccagtggatgggtgtgaccgtccagtcacagggtcctggtgggaaggtggtcacttgcgcgcacagatacgagaagagacaacacgtcaatactaagcaggagagcagagacatcttcggtcgatgctatgtcctgagtcaaaatttgcgcatcgaagacgacatggatgggggagactggtcattctgcgacgggaggctgcggggacatgagaaattcgggtcctgtcagcagggcgtagctgccactttcactaaggactttcactatatcgtgtttggcgcaccaggcacctataactggaagggcatcgtgagagtggaacaaaaaaataacacgttttttgatatgaacattttcgaggacggaccttacgaagtcggcggagagaccgagcacgatgagagcttggtcccagtccctgccaatagttatctgggctttagcctggattccggtaaaggcattgtctctaaagatgagatcaccttcgtgtctggcgctcctcgcgctaatcattcaggcgctgtggtcctgctcaaaagagatatgaaatccgcccacctactacctgaacacatctttgatggagagggtctcgcctcctcattcggatacgatgtggctgtggtggaccttaacaaagacgggtggcaagacatagtgataggtgcgccacagtatttcgaccgggatggtgaagtgggtggcgctgtttatgtgtacatgaaccagcaggggagatggaacaatgttaaaccgatcaggctgaatggaacaaaggattccatgtttggcatcgcggttaagaatatcggcgacataaaccaagatggatatcctgacatcgcagtcggggctccttacgatgatctgggcaaggtctttatctaccatggcagcgctaatggcattaacacaaagcccacccaggtgctgaagggtatctccccatattttggctacagcatcgctggaaatatggaccttgacaggaacagttacccggatgtcgcagtcggctccttgtctgatagtgtgacaatattcaggagccggcctgtcatcaacatccagaaaactattacagtgacacctaatcgcattgacttgcgtcagaagacagcctgtggggctccctccgggatttgtctgcaagtgaaatcttgttttgagtacaccgcaaacccggcaggctacaacccatcaatcagcatcgtggggaccctagaggccgaaaaggaacgcagaaagagcggactctcatcacgcgtgcagttccgaaaccagggcagtgaacctaagtatacacaggaactcacattgaagcgacagaaacagaaggtctgcatggaggagaccctgtggttgcaggacaatataagggacaaactgcggccaattcctattaccgcttccgtcgagattcaggagccatcatccagacggagggtaaacagtttacccgaagtgctccctatactgaatagcgatgagccgaagaccgctcatattgacgtgcactttctgaaagaagggtgcggcgatgacaacgtctgcaactccaatcttaagctcgagtataaattttgtactagggagggtaatcaggataagttttcgtatctgccaattcagaagggagtgcctgagctcgtcctcaaagaccagaaggatatcgctctcgagatcaccgtgaccaattcgccaagcaatccgcgtaatcccacaaaggacggcgacgatgcacacgaagccaaactaatcgccacatttcccgatactctgacgtactccgcctatagagaattgagagcgtttcctgagaagcaactgtcttgtgttgcgaatcagaacggctcacaggcagactgcgagctcggaaaccccttcaagcgcaatagcaacgttacattctatttagtgctgtctactacggaggttacgttcgacacacccgacctagatattaacctcaaacttgaaacaacttccaaccaggataacctggctcccattacagctaaggctaaagtggtgatcgagcttttgctgtccgtcagcggcgttgcgaagccatctcaggtttattttggcggtacagtggtcggggagcaggccatgaaatcggaggatgaagtcggatcgctgattgagtacgaatttcgcgtaatcaaccttggcaaaccgctgaccaaccttggtaccgccaccttaaatatacaatggcccaaggaaatctcgaacggaaagtggcttctgtacctcgtgaaagttgagtccaagggcctcgaaaaggtgacgtgcgaaccccaaaaggaaatcaattctctgaacctgactgagtcccacaatagtcgcaagaagcgcgaaataacggaaaaacagatcgatgacaatcgcaagttcagtctctttgcggagagaaaatatcagactctcaattgctcggtcaacgtgaattgtgtgaatatcaggtgccccctcagaggtctggacagcaaagcttccctgatcttgagatctcgcctgtggaactcaacattcttggaggaatactccaagctgaattatttggacatcctgatgcgcgcatttatcgatgtcactgcggctgctgagaacatccggctgcctaatgccggtacccaggtgagagtgactgtctttccgtcaaagacagtggcccagtatagcggagtcccctggtggattatcctggtcgcaatcctcgcgggaatacttatgctggcactccttgtctttatactgtggaaatgtggctttttcaagcggtcccgctatgacgattcagtgccacgataccacgccgtccggattcgtaaagaggaacgcgagatcaaagatgagaagtatatagacaatttggagaagaaacagtggattactaagtggaacgaaaatgagagttattcttag

SEQ ID NO: 35773 - DNA, 3393 bp, Artificial Sequence
  derived and/or modified sequence
atggccgctgccggacagctgtgtctactgtatctttctgccggacttttgtccaggctgggcgcagcttttaacctcgataccagggaggacaatgttattagaaagtatggtgacccgggatccttgttcggtttctcacttgccatgcattggcagctgcagcctgaggacaagagattactgctggtcggtgctccgcgagccgaagcacttccactgcagagagcgaacagaaccgggggtctctatagctgtgacattactgctcgcggaccgtgcaccagaatcgaattcgataacgatgccgaccctacatccgagtccaaggaggatcagtggatgggagtcacagtccaatcccagggaccaggagggaaggttgtgacatgcgcacaccgatacgagaaaagacagcatgtcaataccaagcaagaatccagagacattttcgggagatgttacgttttgtctcaaaacctgcgcatagaggacgatatggatggcggagactggagtttttgtgatggcagactgcgcggtcacgagaaatttggaagttgtcagcagggggtggcagccacttttacgaaagatttccattacattgttttcggcgctcctgggacttacaattggaaggggatcgtgcgagttgagcagaaaaataatacgttttttgacatgaatatcttcgaagacggaccctacgaagtcggtggcgaaaccgagcatgatgagagtctggtacccgttccagccaattcctacttgggacttttattcctcacgagtgtgagttacacggatcccgatcagtttgtttacaagaccaggccaccaagggagcaaccagacaccttccccgatgtcatgatgaacagctatctgggcttctctctggactcaggcaaaggcattgtgagtaaggacgaaataacttttgtatctggggctcccagggctaaccactccggcgctgtggtgctgctgaaacgggacatgaaatctgcccacctactgcccgagcatatcttcgacggagaaggactggcatcatcttttggttatgacgtagccgtggtggatctgaacaaggacggctggcaggatatcgtgattggggcaccccagtactttgatagggatggggaggtcggcggagccgtgtatgtctacatgaaccagcaaggacggtggaacaacgttaaacccatcaggttaaacgggaccaaagattcaatgttcgggatcgccgtaaaaaacatcggcgacatcaaccaagacggctatcccgatatcgccgtaggcgcaccatacgacgatctgggtaaagtcttcatttaccacggtagcgctaatggcatcaacaccaaaccaacccaggtgctgaagggtatcagtccatatttcggctacagcatcgctggcaacatggaccttgaccggaacagttatccagacgttgccgtgggttctttatctgacagcgtgacaattttccgctcacgacccgtcatcaacattcagaaaacaattacagtaaccccaaatcgcattgatttaaggcagaagacagcgtgtggggctcctagcggcatttgtctacaggtgaagagctgttttgagtataccgccaaccccgctgggtacaaccctagcattagtatcgtggggactctggaggccgagaaggagcgcaggaaatccgggttgtcaagtcgggttcagttcaggaaccagggaagcgaacctaagtacacacaggaattgaccctcaaaagacagaagcagaaggtgtgcatggaggaaaccctctggttgcaggacaatattagggataagctgagaccaattcccatcacagcatccgtggagattcaggagcccagcagcaggagacgcgtaaacagcttgccagaggttcttcccatcttaaattccgacgagcctaaaacggcacacattgacgtgcacttcctcaaggagggatgcggagatgacaacgtctgcaactcaaacctgaaacttgaatataaattctgtacgagagaaggaaatcaggataagttcagctatctccccatacaaaaaggagtgccagagcttgtcctcaaagatcagaaggatatcgctcttgagatcaccgttactaacagcccatcaaatcccagaaaccctacaaaagacggcgatgatgctcatgaagccaagctcattgctacgtttccagataccctgacatacagcgcatatagggagctaagagccttccccgaaaagcagctgtcatgcgtcgctaaccaaaatggctcccaagccgactgtgagttaggaaacccatttaaacgcaactcaaatgtcacgttctatctggtgctgtctacaaccgaggtcacattcgacactcctgatctggacatcaatcttaaattggagacaacgagtaatcaggataacttggctcccatcaccgctaaggcaaaagttgtgatcgaactgctcttatctgtgtctggcgtggccaagcccagccaggtatactttggaggcactgtcgttggtgaacaggccatgaaatccgaggacgaagtcggttctctgatcgagtatgaattcagagtgattaaccttggaaaaccccttactaacttaggcacggcaaccctgaatatccaatggcccaaagaaatcagcaatggtaagtggctgctctatttggtgaaggtggagtctaaggggctggagaaagtgacgtgcgaaccacagaaggagattaacagccttaatctaacggaatctcacaacagtaggaaaaaacgcgaaatcaccgagaagcaaatagatgacaaccgcaagttcagcctatttgcggaaagaaaataccagactttgaactgctctgttaacgttaactgcgtaaacatcagatgcccacttcgcggtttggactccaaggcgtcccttattttgaggagtagactgtggaattcgactttcttagaggagtatagcaaactcaattacctcgacattctgatgagggcattcatcgatgtaacagctgctgcggaaaacatcaggctacctaacgccggtacacaagtccgtgtgactgtgttcccgagcaagacagtcgcgcagtactcaggcgtaccctggtggatcatcctggtggctatcctggccggtatcctgatgttagccttgctcgtgttcatcctttggaaatgtgggttctttaagagatcgagatacgatgactcggtgccaaggtaccatgcagtacgaattcgcaaggaggaacgggaaataaaggacgaaaaatacattgacaacctcgagaagaagcagtggattaccaagtggaatgaaaatgagtcttactcatag

SEQ ID NO: 35774 - DNA, 3261 bp, Artificial Sequence
  derived and/or modified sequence
atggcagctgcaggccaactgtgccttctttatctgtcggctggattattaagtcgacttggcgcagcctttaacttggacactcgggaggacaatgttatacggaagtatggagatcccggatccctctttggcttctccctggccatgcactggcagctgcagccagaagataagcggttattgttggttggcgctcctcgggcagaggccctgccactccagcgcgcaaataggactgggggtttgtatagctgtgacataaccgcccgaggcccttgtacacgcatcgagttcgataatgacgccgaccctacctctgagtcgaaagaagaccagtggatgggcgtcacggtgcaaagtcagggccctggaggaaaggtggtcacgtgcgcacatcgttatgaaaagagacaacacgtgaacacaaaacaggagagtagggatatcttcggtagatgttacgtactcagccagaatcttcgcatcgaagacgatatggacggcggagattggagcttttgtgacggaaggttgcggggtcacgagaagttcggatcttgtcagcaaggggtagcggctacctttacgaaggactttcattatattgttttcggcgcacctggtacctataattggaagggacttcttttccttacctccgtctcatatactgaccccgaccagtttgtttacaagacacgcccaccgagagaacagcccgacaccttccccgacgtgatgatgaatagctatctgggattcagcctggatagcggtaaaggtattgtcagcaaagacgagattaccttcgttagtggtgcccctagagctaatcactctggggctgtggtactcttaaaacgtgacatgaaaagcgcccatttgttacccgagcacattttcgatggtgaagggctggccagcagctttggctacgacgtcgccgttgtggatttgaacaaagatggatggcaggacatcgtgattggcgctccgcagtacttcgatcgagatggtgaagtaggcggtgctgtctatgtgtacatgaaccagcaaggcagatggaataatgtcaagccaatcagattgaatggaacgaaggattcgatgtttggaatcgcggttaagaatattggcgatattaatcaggatggctacccggatatagccgtcggtgcaccttatgacgacttgggaaaggtgttcatttaccacggtagtgctaatggtataaacaccaagcctacgcaggtacttaaaggcatctccccttacttcgggtacagcattgccggaaacatggacttagatcgaaacagttaccctgatgtggcagtgggcagcctttcagacagcgtgaccatttttcgatcacgacccgtcattaacatccagaagacgataaccgtgactcccaatagaattgatctgaggcaaaaaaccgcatgcggggctccatctggtatctgcctgcaggtcaagtcctgcttcgagtataccgccaaccctgctggctataacccctctatttcgattgtcggcaccctggaagctgagaaggagcggcgaaagagcggtctgagcagtagagtccagttccgcaatcagggctccgagcccaagtacacacaggagttgactctgaaaaggcagaagcagaaggtctgcatggaggagactctgtggcttcaggataatattagagataagctgcgaccgattcctattacagcctctgttgaaatccaagaacccagtagtagaagaagggtgaactctcttccagaggtcttgcccatcctgaattctgatgagcccaaaaccgctcacattgatgttcattttctcaaagagggttgcggggacgacaatgtgtgcaactcaaacctcaaactggaatacaagttctgcactagagagggcaaccaggacaagttctcgtacttgcccatccagaagggagtgcctgagctggtgcttaaagatcaaaaggatattgctctggaaataactgtgacaaactccccttctaacccacgcaaccccacaaaggacggggatgatgctcatgaggcaaaactgatagccacgtttcccgatactttaacctactctgcctacagggagctgagagctttcccagagaagcagctttcctgcgttgctaaccagaatggttcccaggcggactgtgaactgggaaatcccttcaaacggaattcaaacgtcaccttctatttggttctctccaccactgaggtgacgttcgacacccctgacttggacattaatttgaagttagaaacaacttccaatcaggataaccttgcccctatcaccgccaaagccaaggtggtgatcgagctcctgctcagcgtgtctggtgtggcaaaaccaagccaggtttatttcggtggtacagtcgtcggggaacaggctatgaagagcgaggacgaagtcggtagtcttattgagtacgagttccgggtgatcaacctgggcaaaccactaacaaacctggggaccgctaccctgaacatccaatggcctaaagagatctcaaacggaaagtggctcctttatctcgtcaaggttgagtcgaagggcctggaaaaggtgacctgcgaacctcagaaggagatcaactcacttaatctgaccgaatcccataacagccggaagaagcgggaaatcaccgaaaaacaaatcgacgacaatcgcaagttttcacttttcgccgagcggaagtatcagaccctgaattgcagtgttaatgtgaattgtgtaaacatcaggtgccccctccgaggcctagactccaaagccagccttattcttaggagcagactctggaattccactttcttggaagagtatagcaagctgaattatcttgacattctgatgagagcatttatcgatgtgaccgcagccgcagagaatattaggctgcctaacgccggtacccaggtgcgggtgacggtgttcccctcaaaaacagtcgctcagtactccggcgttccttggtggatcatcttggtggctatcctggccggaattctaatgttggctttgcttgtcttcatactttggaagtgcggcttcttcaaacgctccagatatgatgactctgtacccagatatcacgccgttcgaatccggaaggaagagagagagatcaaggacgaaaagtatatcgataatctggaaaagaagcaatggattactaaatggaatgagaatgagagttatagctag

SEQ ID NO: 35775 - protein, 245 aa, Artificial Sequence
  derived and/or modified sequence
MNGRADFREPNAEVPRPIPHIGPDYIPTEEERRVFAECNDESFWFRSVPLAATSMLITQGLISKGILSSHPKYGSIPKLILACIMGYFAGKLSYVKTCQEKFKKLENSPLGEALRSGQARRSSPPGHYYQKSKYDSSVSGQSSFVTSPAADNIEMLPHYEPIPFSSSMNESAPTGITDHIVQGPDPNLEESPKRKNITYEELRNKNRESYEVSLTQKTDPSVRPMHERVPKKEVKVNKYGDTWDE

SEQ ID NO: 35776 - protein, 97 aa, Artificial Sequence
  derived and/or modified sequence
MNGRADFREPNAEVPRPIPHIGPDYIPTEEERRVFAECNDESFWFRSVPLAATSMLITQGLISKGILSSHPKYGSIPKLILACIMGYFAGKLSYVKT

SEQ ID NO: 35777 - protein, 80 aa, Artificial Sequence
  derived and/or modified sequence
MNGRADFREPNAEVPRPIPHIGPDYIPTEEERRVFAECNDESFWFRSVPLAATSMLITQGLISKGILSSHPKYGSIPKLI

SEQ ID NO: 35778 - protein, 218 aa, Artificial Sequence
  derived and/or modified sequence
MNGRADFREPNAEVPRPIPPVPLAATSMLITQGLISKGILSSHPKYGSIPKLILACIMGYFAGKLSYVKTCQEKFKKLENSPLGEALRSGQARRSSPPGHYYQKSKYDSSVSGQSSFVTSPAADNIEMLPHYEPIPFSSSMNESAPTGITDHIVQGPDPNLEESPKRKNITYEELRNKNRESYEVSLTQKTDPSVRPMHERVPKKEVKVNKYGDTWDE

SEQ ID NO: 35779 - protein, 171 aa, Artificial Sequence
  derived and/or modified sequence
MNGRADFREPNAEVPRPIPHIGPDYIPTEEERRVFAECNDESFWFRSVPLAATSMLITQGLISKGILSSHPKYGSIPKLILACIMGYFAGKLSYVKTCQEKFKKLENSPLGEALRSGQARRSSPPGHYYQKSKYDSSVSGQSSFVTSPAADNIEMLPHYEPIPFSSSMNES

SEQ ID NO: 35780 - protein, 112 aa, Artificial Sequence
  derived and/or modified sequence
MNGRADFREPNAEVPRPIPHIGPDYIPTEEERRVFAECNDESFWFRSVPLAATSMLITQGLISKGILSSHPKYGSIPKLILACIMGYFAGKLSYVKTCQEKFKKLENSPLGE

SEQ ID NO: 35781 - DNA, 657 bp, Artificial Sequence
  derived and/or modified sequence
atgaacggcagagccgacttcagagagcccaacgccgaggtgcccagacccatcccccccgtgcccctggccgccaccagcatgctgatcacccagggcctgatcagcaagggcatcctgagcagccaccccaagtacggcagcatccccaagctgatcctggcctgcatcatgggctacttcgccggcaagctgagctacgtgaagacctgccaggagaagttcaagaagctggagaacagccccctgggcgaggccctgagaagcggccaggccagaagaagcagcccccccggccactactaccagaagagcaagtacgacagcagcgtgagcggccagagcagcttcgtgaccagccccgccgccgacaacatcgagatgctgccccactacgagcccatccccttcagcagcagcatgaacgagagcgcccccaccggcatcaccgaccacatcgtgcagggccccgaccccaacctggaggagagccccaagagaaagaacatcacctacgaggagctgagaaacaagaacagagagagctacgaggtgagcctgacccagaagaccgaccccagcgtgagacccatgcacgagagagtgcccaagaaggaggtgaaggtgaacaagtacggcgacacctgggacgagtag

SEQ ID NO: 35782 - DNA, 738 bp, Artificial Sequence
  derived and/or modified sequence
atgaacggacgcgccgattttagggagcccaacgccgaagttccccggcctattccacatatcggccccgattatatccctactgaggaggagcgccgtgtcttcgctgaatgtaacgacgaaagtttttggtttcgttcagtgcccctggccgcgaccagcatgctaattactcagggccttatctcaaagggtatcctctcttctcatccaaagtatggatccattccaaaactcatccttgcttgcatcatgggctattttgccggcaagctgtcttacgtcaaaacttgccaagagaagttcaagaaactggagaattcccctctgggagaggccctgcggtccggccaggccagacgctcttccccaccagggcactattaccaaaagtcgaaatacgatagctccgtgtctggacagtcttctttcgtcaccagcccagcagccgataatattgagatgcttccccactacgaacctattcctttctcctcttctatgaacgagtccgctcccacgggcattacagaccatatagtacaggggcctgatccaaacctggaagaatcaccaaaacgcaagaatatcacatacgaggagctgaggaacaaaaatagagaaagctacgaggtcagcctgacacagaaaacagaccccagcgtacgaccaatgcacgagagggtgccaaagaaagaagtgaaagttaacaaatacggcgatacatgggacgagtag

SEQ ID NO: 35783 - DNA, 738 bp, Artificial Sequence
  derived and/or modified sequence
atgaacggaagagcagactttcgagagcctaacgcggaggtgccacgcccgatcccccatatcgggcctgattatatcccgaccgaggaagagcggagggtattcgccgagtgcaacgacgagtccttttggttcaggtccgttcctctagcggctacttcgatgttaattacccagggacttatttccaaaggtatcctctccagccatcctaaatacggtagtatccctaaactgattctggcctgtataatgggctatttcgctgggaaactctcttatgtgaaaacctgccaggagaaattcaaaaaacttgagaattctcctttgggcgaggccctgagaagcgggcaagctcgtcgatcaagccctcccggacattattatcaaaaaagcaagtatgactcttctgtgtccggacagagcagctttgtgacaagtcctgcagcagataacatcgaaatgttaccacattacgagccaataccatttagctcttctatgaacgaaagtgctcccacaggaatcacagatcacatcgtgcagggaccagatcctaacttagaagagtcgccaaagagaaaaaacatcacttatgaagaactgcggaataaaaacagagagtcctacgaggtttcccttacgcagaaaaccgatcccagcgtccggcccatgcacgagcgagtaccaaaaaaagaagttaaggtaaacaagtatggcgatacctgggatgaatag

SEQ ID NO: 35784 - DNA, 738 bp, Artificial Sequence
  derived and/or modified sequence
atgaacggacgagccgatttccgggaacctaacgccgaagtgcctagaccgatcccccacataggtcctgactacatcccaacagaggaagagagaagggtcttcgccgagtgcaatgatgagagcttctggttcagatccgtgccgctggcagcgactagtatgttaataacacagggcttgattagcaagggcattctgagttcccatcccaagtatggctctattcctaagttaatactcgcctgtatcatgggctacttcgcagggaagttatcctatgtgaaaacttgccaggagaagtttaagaaacttgagaacagtccattaggagaagcccttaggtccggccaggcacggagaagtagcccacccggacattactaccaaaagtcaaagtatgactcttctgtcagcggccagtcatctttcgtgacctccccagccgcagataatatagaaatgctgccgcattacgaaccgatcccttttagcagtagtatgaatgaaagtgctcccaccggcatcaccgatcacattgttcaaggccctgaccctaacctcgaagagtcccctaagcgtaagaacatcacctacgaagagctcagaaataagaacagagaaagctacgaggtatcactcactcagaagacggatccttcagtcaggccaatgcacgagagggtccccaaaaaggaggtcaaggtcaacaaatacggtgacacatgggatgagtag

SEQ ID NO: 35785 - DNA, 657 bp, Artificial Sequence
  derived and/or modified sequence
atgaacgggcgggcagattttagggagcccaatgccgaggtaccgcgaccgattccccctgtgcctctggctgccacctctatgctgatcacccagggcctgatctcgaaggggatactgtcttcacacccaaagtatggctctatccctaagttaatactagcatgcatcatgggctacttcgcggggaaattgagctatgttaaaacatgccaggagaagtttaaaaagctggagaattccccactgggcgaggccctgcgcagcgggcaggctagacgatctagcccccccggtcattactatcagaagtcgaagtatgactcatccgttagtggccaaagctcttttgtgacatcacctgccgccgacaacatagagatgctgccacactacgagcctattccattttcctccagcatgaacgagtcggccccaactgggattacagatcatatcgtgcagggaccagacccgaatcttgaagagtcccctaaacggaagaacatcacttatgaggagctccgtaataaaaacagagaaagttacgaggtttccctcacccaaaaaactgacccatccgttcgccctatgcatgaacgcgttcctaagaaagaggtcaaggtgaataagtacggtgacacttgggatgagtag

SEQ ID NO: 35786 - DNA, 738 bp, Artificial Sequence
  derived and/or modified sequence
atgaatggcagagccgacttcagggaaccaaacgcagaggtgcccagaccaataccacatattggaccagactatatccccaccgaagaggagaggagagtcttcgccgagtgcaacgatgaatctttctggttccgatctgtgccactcgccgccaccagcatgcttataacccagggacttatttcaaaaggcatcctgtcctcacaccctaagtacggaagtatccctaaacttatcctcgcatgtattatgggatacttcgcaggaaagctcagctatgtgaagacctgtcaggagaaatttaagaagctggaaaacagccctctgggtgaagcattgcgctcagggcaagctcggagatcctcaccacctgggcattattatcaaaaatcaaaatacgacagctctgtatctgggcagtctagtttcgtgaccagtcccgccgccgacaatatcgagatgcttccccactacgagcctatcccattctcgtcaagcatgaacgagtctgctccgacaggtattacagaccatatcgtgcaaggtccggatcccaatctggaggagtcaccgaagaggaagaacattacatacgaagagttgaggaacaaaaacagagagtcttatgaagtgagcctcactcaaaagacagacccttctgtgaggcctatgcatgagagagtccccaaaaaggaagtgaaggttaataaatacggagacacctgggatgagtag

SEQ ID NO: 35787 - DNA, 738 bp, Artificial Sequence
  derived and/or modified sequence
atgaatggccgggctgacttccgggagcccaatgctgaggtgccccggcccatcccccacatcggccctgactacatccccacagaggaggagcggcgggtgtttgctgaatgtaatgatgagagcttctggttccgctctgtgcccctggccgccacctccatgctgatcacccagggcctcatcagcaagggcatcctgagcagccaccccaagtatggcagcatccccaagctgatcctggcctgcatcatgggctactttgctgggaagctgtcctatgtgaagacctgccaggagaagttcaagaagctggagaacagccccctgggggaggccctgcggagcggccaggcccggcgcagcagccccccaggccactactaccagaagagcaaatatgacagctctgtgtctggccagagcagctttgtgaccagccctgctgctgacaacatcgagatgctgccccactatgagcccatccccttcagcagctccatgaatgaaagtgcccccaccggcatcacagaccacatcgtgcagggccctgaccccaacctggaggagagccccaagaggaagaacatcacctatgaggagctgaggaacaagaaccgggagagctatgaggtgtccctgacccagaagacagaccccagcgtgcggcccatgcatgagcgggtgcccaagaaggaggtgaaggtgaacaagtatggagacacctgggatgaatag

SEQ ID NO: 35788 - DNA, 657 bp, Artificial Sequence
  derived and/or modified sequence
atgaatggccgggctgacttccgggagcccaatgctgaggtgccccggcccatcccccctgtgcccctggccgccacctccatgctgatcacccagggcctcatcagcaagggcatcctgagcagccaccccaagtatggcagcatccccaagctgatcctggcctgcatcatgggctactttgctgggaagctgtcctatgtgaagacctgccaggagaagttcaagaagctggagaacagccccctgggggaggccctgcggagcggccaggcccggcgcagcagccccccaggccactactaccagaagagcaaatatgacagctctgtgtctggccagagcagctttgtgaccagccctgctgctgacaacatcgagatgctgccccactatgagcccatccccttcagcagctccatgaatgaaagtgcccccaccggcatcacagaccacatcgtgcagggccctgaccccaacctggaggagagccccaagaggaagaacatcacctatgaggagctgaggaacaagaaccgggagagctatgaggtgtccctgacccagaagacagaccccagcgtgcggcccatgcatgagcgggtgcccaagaaggaggtgaaggtgaacaagtacggggacacctgggatgaatag

SEQ ID NO: 35789 - DNA, 738 bp, Artificial Sequence
  derived and/or modified sequence
atgaacggccgggccgacttccgggagcccaacgccgaggtgccccggcccatcccacatattgggccagattacatcccaaccgaggaggagcgcagagtgttcgcagaatgtaatgacgaatctttctggtttaggtcagttcctctcgccgctacctccatgctcatcacgcagggattgatctcgaaagggatcctgtcatcacatcctaaatacggatctatcccaaagttgattctggcttgcattatgggttacttcgctgggaagttgtcatatgttaagacgtgtcaggagaaatttaagaaactggagaattcaccattaggtgaggctcttcgttctggccaggccagacggagttccccccctggccattactaccagaagagtaagtatgattcttctgtcagtggccaatctagcttcgtcaccagtcccgctgctgacaacatcgagatgcttccccattatgaacctattcccttctcctcatccatgaatgaatcagccccaacaggcataaccgaccacatcgttcagggtcctgacccaaacctggaggagagtcctaaaaggaaaaatatcacttatgaggagttaaggaataaaaatagagaatcctatgaggtcagcctaacccagaaaactgatccttcggtgaggcctatgcacgagcgggtccctaagaaggaagtcaaggtcaacaagtacggagacacatgggacgagtag

SEQ ID NO: 35790 - DNA, 738 bp, Artificial Sequence
  derived and/or modified sequence
atgaacggccgggccgacttccgggagcccaacgccgaggtgccccgaccaataccccatatagggccagactacattcccacggaagaggagaggcgagtttttgccgagtgcaacgacgaatccttctggttcaggtccgtgcccttggcagcaactagcatgctcataacccagggtctgattagcaaagggatactgagctcccacccgaagtacggatcaatccctaaactgatactagcctgtattatggggtacttcgccggtaaattgagttatgtgaaaacctgtcaggagaaattcaaaaagctcgaaaatagtcctctgggcgaggctttaaggagtggtcaggccagacggagctctccccctggccactactatcagaaaagcaagtacgattctagcgtaagcgggcaaagttcctttgttacctcccccgctgccgacaatatcgaaatgctcccccattatgaaccaattccattctctagctcgatgaatgagtcagcacctaccggcattaccgaccacattgtgcaaggtcccgatccgaacttggaagaaagccccaagcgcaagaatatcacatacgaggagctgaggaacaagaatcgggagagctatgaagtgagccttacccagaagactgatcctagcgtccgcccaatgcacgagagggtccctaagaaggaagtgaaagtgaacaaatatggggacacttgggacgaatag

SEQ ID NO: 35791 - DNA, 738 bp, Artificial Sequence
  derived and/or modified sequence
atgaacggccgggccgacttccgggagcccaacgccgaggtgcccaggcctattccacacatcggtccagactatattccaactgaggaggagcgtagggtgtttgccgagtgcaacgacgaatcattttggttcaggtccgtcccactggctgccacatccatgttgataacacagggactgatttcaaagggtattctttcttcacacccaaagtatggttccatccccaaacttattcttgcctgcataatggggtactttgcaggcaagctgagctacgtaaagacatgccaagagaaatttaaaaagctagagaacagccccttgggcgaggcgctacgttcgggtcaggcccgcaggtcatcaccccctgggcactactatcagaaatcaaagtacgattcttccgttagtggccagtcctccttcgttacatctccagccgctgataatatagagatgttgccccactacgagccgatccctttctcaagctctatgaacgaaagcgctccaaccggcataacggaccacattgtgcagggtcccgatcctaacttggaggagagtcctaaacgcaagaatatcacatatgaagagctcaggaacaagaaccgggaaagttatgaggtgagcttgacacagaaaacagatccgagcgtgcgccctatgcacgaaagggtcccaaagaaagaagtcaaagtaaataagtacggcgatacctgggatgagtag

SEQ ID NO: 35792 - DNA, 657 bp, Artificial Sequence
  derived and/or modified sequence
atgaacggccgggccgacttccgggagcccaacgccgaggtgccccgacccatcccccccgtacctttggctgcgacgtctatgcttattacacagggactcatctccaagggcatactctcctcccatcccaaatatggatcgataccaaaactgatacttgcttgcattatgggatactttgctggaaaactaagctacgtcaaaacctgccaagagaaatttaagaaactcgagaattcacccctgggagaggcgctgagatccggacaggcccgtcgatcatccccccctggtcattattaccagaagagtaagtacgattctagtgtatccggacagtcaagctttgttactagtccagccgctgacaacattgagatgctgcctcactatgaacctatacccttttcatcaagtatgaacgagagcgcaccaaccggaattacagaccacatagttcaagggccagaccccaacctcgaagagtctcccaaaagaaaaaatataacatacgaggagctgcgtaacaagaatcgagaatcatatgaggtctctctcactcagaaaaccgacccatctgtgagacccatgcacgaaagggtgcccaagaaagaggtcaaagttaataagtatggagacacttgggacgaatag

SEQ ID NO: 35793 - DNA, 738 bp, Artificial Sequence
  derived and/or modified sequence
atgaacggccgggccgacttccgggagcccaacgccgaggtgccccggcctatcccccacataggacccgactatatccccacagaagaagaaagaagagtcttcgccgagtgcaatgacgagagtttttggttccgatctgtgccactcgctgccacaagtatgctgatcacgcaggggctgatcagcaaaggtatactgtccagccaccccaagtacggtagcattcctaagcttattctggcatgcatcatgggatatttcgcaggtaaactttcatacgtaaagacatgtcaggagaagttcaagaagctggagaattccccattgggggaagccctgcgcagtggacaggcaaggcggtcaagtcctccaggacactattatcaaaagagcaagtatgatagttccgtgagcggccagtcttccttcgtgaccagccccgcggcagacaatatcgagatgctcccccattacgaacctattccattctcatcatcaatgaacgagtccgcccctaccgggatcaccgatcacattgtccaaggcccagaccccaatcttgaggagagccccaaacgtaagaatatcacttatgaagaactgagaaataagaaccgagaaagctacgaagtatcactgacccagaaaacagacccttcggtgcgcccaatgcacgagagagtccccaagaaggaggttaaggtaaataagtatggcgatacttgggacgagtag

SEQ ID NO: 35794 - DNA, 738 bp, Artificial Sequence
  derived and/or modified sequence
atgaacgggagagctgattttcgcgagccaaatgctgaagtcccaagacccatcccccatattggtcccgactacatccccaccgaagaggaaaggagggtttttgcggaatgcaacgacgagtcattctggttcaggagtgttcctctggccgcaacatcgatgctcattacccagggcttaatatccaagggcatacttagttctcacccaaagtatggaagcatacctaagttgattctggcatgtatcatggggtactttgcaggaaagctttcatacgtcaaaacctgccaagaaaagtttaaaaagctggagaatagtcccctgggtgaagccctcagaagcggccaagcaagaaggtcttcccccccaggtcattactaccagaaatcaaagtatgacagctctgtctccggacaatctagcttcgtcacatctccagctgccgacaatatcgagatgctaccacactatgagcctattcccttttctagttccatgaatgaatctgcccctaccggcataacagatcatatcgtgcagggcccagacccgaatttggaggaaagcccgaaaaggaagaatataacttacgaagaactgaggaataagaatcgggagagttatgaagtgtcactgactcagaagactgatccaagcgtgcgccctatgcacgagagggtacctaagaaggaagtgaaggtcaacaagtacggcgacacttgggacgaatag

SEQ ID NO: 35795 - DNA, 738 bp, Artificial Sequence
  derived and/or modified sequence
atgaacggtagggccgactttagggagcctaatgcagaggtgcccagacccattccgcacattgggcctgactacattcctacagaagaagagaggagagttttcgccgagtgtaacgatgagagcttctggttccggtcagtccccctggcagcaacaagtatgctgattacacagggcctcataagtaaaggaattctcagttcccatccgaagtacggctctataccaaagctgatcctcgcgtgtataatggggtacttcgccggaaagttgtcatatgtgaaaacgtgccaggagaagttcaaaaagctagagaacagtcccctcggtgaggccctacgcagcggacaggctcgaaggtcgtctccaccaggacactattaccagaaaagcaagtacgatagtagcgtatctggccagtcctcttttgtaacgagcccagccgctgacaatattgaaatgcttccgcattacgagcctattccatttagttcgtctatgaatgagtccgctccaaccggaattactgatcatattgtgcagggcccagatcccaacctggaggagagcccaaagcggaagaatattacctacgaagagctgagaaacaaaaatcgggaatcctatgaagttagcctcacacaaaagactgatccatccgtcagaccgatgcacgaacgagttcctaaaaaggaggtgaaagtgaacaagtacggggatacatgggatgagtag

SEQ ID NO: 35796 - DNA, 738 bp, Artificial Sequence
  derived and/or modified sequence
atgaacggacgggcagattttagggagccaaacgctgaggtcccaagaccaatccctcatattggcccagactatattccgacagaggaggagaggagggttttcgcagagtgcaatgatgagtctttctggtttcgatccgtgcctctggctgctacttcaatgttgatcacccagggcctcatctccaagggaatccttagcagtcatcctaagtatggcagcattcccaagctgatactggcgtgtattatggggtactttgcaggcaagttgagctacgtgaagacttgccaggagaaatttaaaaagcttgaaaacagcccacttggggaggcactcaggtcagggcaggccaggcgaagctcccctcctgggcactactatcagaagtctaagtatgactcttctgtgtccggacagtcgtccttcgtaacttcgcctgccgcagacaatatcgaaatgctcccacactacgagccaattcccttctcaagctctatgaacgaaagcgcacctaccggcatcaccgaccacattgtgcaaggccctgacccaaatcttgaagagagtcctaagaggaagaacattacatatgaggagcttagaaataaaaatagggagtcgtatgaggttagcctcactcagaaaactgatccatctgtgaggccaatgcatgaaagagtgcccaaaaaagaagtcaaagtgaataaatatggcgacacttgggacgagtag

SEQ ID NO: 35797 - DNA, 657 bp, Artificial Sequence
  derived and/or modified sequence
atgaatggacgagctgacttccgcgagccaaacgccgaggttcctcggcctatccctcctgttcctcttgcagcgaccagcatgctcataactcagggcttaatctctaaaggcatcctgtcatcccaccccaaatacggttccataccaaaactgatactggcttgcatcatggggtattttgccggtaagttgtcctatgtcaaaacctgtcaggaaaagttcaaaaagctggagaatagccctctgggagaagctctaaggtccggacaagctcgcagaagttcgccaccagggcattattatcaaaaatccaagtatgactcttctgtgtctggtcaatcatcttttgttactagtccagctgccgataacattgagatgcttccccattatgagcccattccattcagcagcagcatgaatgagtccgccccaaccggcatcacggatcacatcgttcaaggtccagatcccaatctcgaggaatccccaaagaggaagaatattacctatgaggagctcaggaataaaaatcgagagtcatacgaagtttcgcttacacagaaaaccgacccaagcgtgaggcccatgcatgagcgggtgccaaaaaaggaggtcaaggtgaataagtacggggacacttgggacgagtag

SEQ ID NO: 35798 - DNA, 738 bp, Artificial Sequence
  derived and/or modified sequence
atgaacggacgtgcagatttccgcgagcccaacgctgaggttccaagacccataccacacattgggcctgactatatcccaaccgaggaggaacgccgagtgttcgccgaatgtaatgacgagtccttctggtttaggtccgtaccactcgcagctacttcaatgctcattacacaaggccttatctccaaaggaatcctgagttcccatccgaaatatggctcaattcctaagctgattctcgcatgcatcatggggtacttcgctgggaaactgtcatacgtcaaaacttgccaggagaaattcaagaagttggaaaacagccccctaggggaggctctgagaagcgggcaagcccgaaggagttctccaccaggacactactatcagaaatcgaaatatgacagcagcgtgagcggtcaatcatctttcgtgacctcgcctgccgctgataatatcgagatgttgccccactatgaacctattcccttctccagctctatgaacgagtcagccccaacaggtatcacggaccacatcgtacagggacctgatccaaatttagaggaaagtccaaagaggaagaatattacatacgaggaattgcgcaataagaacagagagtcttatgaagtgagtttgacccaaaaaaccgatccttccgtaaggcctatgcacgagcgggtgcctaaaaaggaggtgaaggtaaacaaatatggtgacacatgggatgagtag

SEQ ID NO: 35799 - DNA, 738 bp, Artificial Sequence
  derived and/or modified sequence
atgaacggcagagccgacttcagagagcccaacgccgaggtgcccagacccatcccccacatcggccccgactacatccccaccgaggaggagagaagagtgttcgccgagtgcaacgacgagagcttctggttcagaagcgtgcccctggccgccaccagcatgctgatcacccagggcctgatcagcaagggcatcctgagcagccaccccaagtacggcagcatccccaagctgatcctggcctgcatcatgggctacttcgccggcaagctgagctacgtgaagacctgccaggagaagttcaagaagctggagaacagccccctgggcgaggccctgagaagcggccaggccagaagaagcagcccccccggccactactaccagaagagcaagtacgacagcagcgtgagcggccagagcagcttcgtgaccagccccgccgccgacaacatcgagatgctgccccactacgagcccatccccttcagcagcagcatgaacgagagcgcccccaccggcatcaccgaccacatcgtgcagggccccgaccccaacctggaggagagccccaagagaaagaacatcacctacgaggagctgagaaacaagaacagagagagctacgaggtgagcctgacccagaagaccgaccccagcgtgagacccatgcacgagagagtgcccaagaaggaggtgaaggtgaacaagtacggcgacacctgggacgagtag

SEQ ID NO: 35800 - protein, 187 aa, Artificial Sequence
  derived and/or modified sequence
MNGRADFREPNAEVPRPIPHIGPDYIPTEEERRVFAECNDESFWFRSVPLAATSMLITQGLISKGILSSHPKYGSIPKLILACIMGYFAGKLSYVKTCQEKFKKLENSPLGEALRSGQARRSSPPGHYYQKSKYDSSVSGQSSFVTSPAADNIEMLPHYEPIPFSSSMNESAPTGITDHIVQGRNFS

SEQ ID NO: 35801 - DNA, 564 bp, Artificial Sequence
  derived and/or modified sequence
atgaacggcagagccgacttcagagagcccaacgccgaggtgcccagacccatcccccacatcggccccgactacatccccaccgaggaggagagaagagtgttcgccgagtgcaacgacgagagcttctggttcagaagcgtgcccctggccgccaccagcatgctgatcacccagggcctgatcagcaagggcatcctgagcagccaccccaagtacggcagcatccccaagctgatcctggcctgcatcatgggctacttcgccggcaagctgagctacgtgaagacctgccaggagaagttcaagaagctggagaacagccccctgggcgaggccctgagaagcggccaggccagaagaagcagcccccccggccactactaccagaagagcaagtacgacagcagcgtgagcggccagagcagcttcgtgaccagccccgccgccgacaacatcgagatgctgccccactacgagcccatccccttcagcagcagcatgaacgagagcgcccccaccggcatcaccgaccacatcgtgcagggcagaaacttcagctag

SEQ ID NO: 35802 - DNA, 294 bp, Artificial Sequence
  derived and/or modified sequence
atgaacggcagagccgacttcagagagcccaacgccgaggtgcccagacccatcccccacatcggccccgactacatccccaccgaggaggagagaagagtgttcgccgagtgcaacgacgagagcttctggttcagaagcgtgcccctggccgccaccagcatgctgatcacccagggcctgatcagcaagggcatcctgagcagccaccccaagtacggcagcatccccaagctgatcctggcctgcatcatgggctacttcgccggcaagctgagctacgtgaagacctag

SEQ ID NO: 35803 - DNA, 243 bp, Artificial Sequence
  derived and/or modified sequence
atgaacggcagagccgacttcagagagcccaacgccgaggtgcccagacccatcccccacatcggccccgactacatccccaccgaggaggagagaagagtgttcgccgagtgcaacgacgagagcttctggttcagaagcgtgcccctggccgccaccagcatgctgatcacccagggcctgatcagcaagggcatcctgagcagccaccccaagtacggcagcatccccaagctgatctag

SEQ ID NO: 35804 - DNA, 90 bp, Artificial Sequence
  derived and/or modified sequence
atgaacggcagagccgacttcagagagcccaacgccgaggtgcccagacccatcccccacatcggccccgactacatccccaccgagtag

SEQ ID NO: 35805 - DNA, 516 bp, Artificial Sequence
  derived and/or modified sequence
atgaacggcagagccgacttcagagagcccaacgccgaggtgcccagacccatcccccacatcggccccgactacatccccaccgaggaggagagaagagtgttcgccgagtgcaacgacgagagcttctggttcagaagcgtgcccctggccgccaccagcatgctgatcacccagggcctgatcagcaagggcatcctgagcagccaccccaagtacggcagcatccccaagctgatcctggcctgcatcatgggctacttcgccggcaagctgagctacgtgaagacctgccaggagaagttcaagaagctggagaacagccccctgggcgaggccctgagaagcggccaggccagaagaagcagcccccccggccactactaccagaagagcaagtacgacagcagcgtgagcggccagagcagcttcgtgaccagccccgccgccgacaacatcgagatgctgccccactacgagcccatccccttcagcagcagcatgaacgagagctag

SEQ ID NO: 35806 - DNA, 339 bp, Artificial Sequence
  derived and/or modified sequence
atgaacggcagagccgacttcagagagcccaacgccgaggtgcccagacccatcccccacatcggccccgactacatccccaccgaggaggagagaagagtgttcgccgagtgcaacgacgagagcttctggttcagaagcgtgcccctggccgccaccagcatgctgatcacccagggcctgatcagcaagggcatcctgagcagccaccccaagtacggcagcatccccaagctgatcctggcctgcatcatgggctacttcgccggcaagctgagctacgtgaagacctgccaggagaagttcaagaagctggagaacagccccctgggcgagtag

SEQ ID NO: 35807 - DNA, 564 bp, Artificial Sequence
  derived and/or modified sequence
atgaatggacgagctgactttagagaaccaaacgcagaagtgccccggcctataccccacatcgggcccgactatatccctaccgaagaggagaggagagtgttcgccgagtgcaatgacgagtccttttggttccgctccgtccctttggccgcgacttctatgctgatcactcaaggcctcattagcaagggaattttgtccagtcaccccaaatatggatctatcccaaagctcattctggcttgcatcatgggctactttgctgggaagctcagctatgtgaagacatgccaggagaagttcaagaagcttgaaaattcgccactgggcgaagccttaagatcgggacaggcccggcgcagttcccctcccggtcactactatcagaaatccaagtatgactcttccgtgtctgggcaatctagcttcgtgaccagccccgctgccgataacattgaaatgctgccacattacgagccaatacctttctctagtagtatgaacgagtctgcccccacaggaattacggatcacatcgttcaagggcggaacttctcttag

SEQ ID NO: 35808 - DNA, 294 bp, Artificial Sequence
  derived and/or modified sequence
atgaatggacgagccgacttccgagagcccaatgccgaggtccccagaccaatcccacacattggacccgactacataccaaccgaagaggagcggagggtgtttgcggagtgtaacgatgagtccttttggttcaggagtgttcctctggcggcaacctctatgctcattacccagggacttatctcaaaaggcattctgtcatcacacccaaagtatggaagtatacccaaactaattctggcctgcatcatggggtattttgctgggaaactgagctatgtaaagacttag

SEQ ID NO: 35809 - DNA, 243 bp, Artificial Sequence
  derived and/or modified sequence
atgaatggacgtgctgactttcgcgagcccaacgccgaagtgcctcgcccgattcctcatatcggacccgactacatcccaacagaggaagagcgaagagtattcgctgaatgcaatgacgagtctttctggtttagaagcgtccccctggccgcaacatcaatgctcatcacacagggactcatatctaagggcatcctgtcgtcccatcctaagtatggaagcattcctaaactgatatag

SEQ ID NO: 35810 - DNA, 243 bp, Artificial Sequence
  derived and/or modified sequence
atgaatggtcgggccgatttcagggaaccaaatgccgaggtgcctaggcctatcccgcatataggacccgattatattcccacagaggaggagcgaagggtgttcgctgaatgcaacgatgagagcttttggttcaggtctgtgccgcttgccgcaaccagcatgctgattacgcagggtctgatcagcaagggcatcttatcgagccacccaaagtatggatctattcctaaacttatatag

SEQ ID NO: 35811 - DNA, 90 bp, Artificial Sequence
  derived and/or modified sequence
atgaacggaagagctgatttccgagagcctaatgccgaggtcccacggcccattccgcatataggccccgattacattcccaccgaatag

SEQ ID NO: 35812 - DNA, 516 bp, Artificial Sequence
  derived and/or modified sequence
atgaacggccgcgcagactttagagagcccaatgccgaggtaccgcgtccaattccacatatcggacccgactacattcctaccgaggaggagcgaagagtctttgccgaatgcaacgacgagtctttttggttccgctcagtgccattggcagctacttccatgctgatcactcaaggcctcatttccaagggcatcctgtcttcacatccaaaatacggcagcattcccaagctgattttagcctgtataatgggctatttcgcagggaagctttcctacgtcaaaacctgtcaggagaagttcaaaaagctcgaaaactcccctctcggagaagccctccggtcgggtcaggcacggcgaagttcccccccaggccactactatcaaaagagcaaatacgattcttcggtgagcggacagtcatccttcgtgacctcccctgccgctgacaatatcgagatgctgccgcattatgagccaatacctttttcaagctcaatgaacgaatcgtag

SEQ ID NO: 35813 - DNA, 339 bp, Artificial Sequence
  derived and/or modified sequence
atgaatggaagagccgattttcgtgaaccgaacgcagaggttccaagacccatcccacacatcggaccagattacattccgacagaagaagagcggagggtgttcgccgaatgcaacgatgagagcttctggtttaggtctgttcctcttgcagcaacttctatgctgataacccagggcttaatttctaaaggtattctgagctcccacccgaagtatgggtctattcctaagttaatcctggcttgcattatggggtatttcgccggaaaactcagctatgtgaaaacatgccaagaaaaatttaaaaaactggagaactctccgctgggcgaatag

SEQ ID NO: 35814 - DNA, 564 bp, Artificial Sequence
  derived and/or modified sequence
atgaatggccgggctgacttccgggagcccaatgctgaggtgccccggcccatcccccacatcggccctgactacatccccacagaggaggagcggcgggtgtttgctgaatgtaatgatgagagcttctggttccgctctgtgcccctggccgccacctccatgctgatcacccagggcctcatcagcaagggcatcctgagcagccaccccaagtatggcagcatccccaagctgatcctggcctgcatcatgggctactttgctgggaagctgtcctatgtgaagacctgccaggagaagttcaagaagctggagaacagccccctgggggaggccctgcggagcggccaggcccggcgcagcagccccccaggccactactaccagaagagcaaatatgacagctctgtgtctggccagagcagctttgtgaccagccctgctgctgacaacatcgagatgctgccccactatgagcccatccccttcagcagctccatgaatgaaagtgcccccaccggcatcacagaccacatcgtgcagggcaggaacttctcctag

SEQ ID NO: 35815 - DNA, 294 bp, Artificial Sequence
  derived and/or modified sequence
atgaatggccgggctgacttccgggagcccaatgctgaggtgccccggcccatcccccacatcggccctgactacatccccacagaggaggagcggcgggtgtttgctgaatgtaatgatgagagcttctggttccgctctgtgcccctggccgccacctccatgctgatcacccagggcctcatcagcaagggcatcctgagcagccaccccaagtatggcagcatccccaagctgatcctggcctgcatcatgggctactttgctgggaagctgtcctatgtgaagacctag

SEQ ID NO: 35816 - DNA, 243 bp, Artificial Sequence
  derived and/or modified sequence
atgaatggccgggctgacttccgggagcccaatgctgaggtgccccggcccatcccccacatcggccctgactacatccccacagaggaggagcggcgggtgtttgctgaatgtaatgatgagagcttctggttccgctctgtgcccctggccgccacctccatgctgatcacccagggcctcatcagcaagggcatcctgagcagccaccccaagtatggcagcatccccaagctgatctag

SEQ ID NO: 35817 - DNA, 90 bp, Artificial Sequence
  derived and/or modified sequence
atgaatggccgggctgacttccgggagcccaatgctgaggtgccccggcccatcccccacatcggccctgactacatccccacagaatag

SEQ ID NO: 35818 - DNA, 516 bp, Artificial Sequence
  derived and/or modified sequence
atgaatggccgggctgacttccgggagcccaatgctgaggtgccccggcccatcccccacatcggccctgactacatccccacagaggaggagcggcgggtgtttgctgaatgtaatgatgagagcttctggttccgctctgtgcccctggccgccacctccatgctgatcacccagggcctcatcagcaagggcatcctgagcagccaccccaagtatggcagcatccccaagctgatcctggcctgcatcatgggctactttgctgggaagctgtcctatgtgaagacctgccaggagaagttcaagaagctggagaacagccccctgggggaggccctgcggagcggccaggcccggcgcagcagccccccaggccactactaccagaagagcaaatatgacagctctgtgtctggccagagcagctttgtgaccagccctgctgctgacaacatcgagatgctgccccactatgagcccatccccttcagcagctccatgaatgaaagctag

SEQ ID NO: 35819 - DNA, 339 bp, Artificial Sequence
  derived and/or modified sequence
atgaatggccgggctgacttccgggagcccaatgctgaggtgccccggcccatcccccacatcggccctgactacatccccacagaggaggagcggcgggtgtttgctgaatgtaatgatgagagcttctggttccgctctgtgcccctggccgccacctccatgctgatcacccagggcctcatcagcaagggcatcctgagcagccaccccaagtatggcagcatccccaagctgatcctggcctgcatcatgggctactttgctgggaagctgtcctatgtgaagacctgccaggagaagttcaagaagctggagaacagccccctgggggagtag

SEQ ID NO: 35820 - DNA, 564 bp, Artificial Sequence
  derived and/or modified sequence
atgaacggccgggccgacttccgggagcccaacgccgaggtgccccgcccaattccccatatcggcccagactatatcccgacagaagaggaacgccgcgtattcgcggagtgtaacgacgagtccttctggtttcgctcagtgcctctggccgccacaagcatgcttatcacccaggggcttattagtaagggaattctttcctcacaccctaaatatggatcgattccaaagctgatcttggcctgtatcatgggttatttcgctggtaaactgtcatatgtaaagacttgtcaggaaaaatttaagaaactggaaaacagccctctaggtgaggccttgcgcagcggccaggcaagacgtagttcaccgcccggacactactatcagaaatccaaatacgactcttccgtctcaggacaatcaagtttcgtgacatcaccagccgcagacaatatcgaaatgctgccgcactatgaacctatccctttctcaagctccatgaacgaatcagctccgaccggtattaccgaccacatcgtgcaagggcgcaacttcagttag

SEQ ID NO: 35821 - DNA, 294 bp, Artificial Sequence
  derived and/or modified sequence
atgaacggccgggccgacttccgggagcccaacgccgaggtgcccaggcctattccccacatcggacccgattatattcccaccgaggaagagcggagggtttttgccgaatgcaatgacgagtccttctggtttagatccgtgcccctcgccgcaacaagcatgctgataacacaggggcttataagcaagggcattctgtccagtcatccaaagtatggtagcattcccaaactcattttggcatgtattatggggtacttcgcaggaaaactgtcctacgtgaaaacctag

SEQ ID NO: 35822 - DNA, 243 bp, Artificial Sequence
  derived and/or modified sequence
atgaacggccgggccgacttccgggagcccaacgccgaggtgccccggcctattcctcacatcggtcctgactatattccgaccgaggaggaaagaagagtgttcgcagagtgcaatgacgaaagcttttggttcaggtcagtgcctctcgcggctactagtatgcttatcacacagggactcatcagcaaagggatactgagttcccatcctaagtacgggagcattccgaaattaatttag

SEQ ID NO: 35823 - DNA, 243 bp, Artificial Sequence
  derived and/or modified sequence
atgaacggccgggccgacttccgggagcccaacgccgaggtgccccgacccattcctcatatcggacctgattacatccctacggaggaggagagaagggttttcgctgagtgcaacgatgagagtttctggttcaggagcgtcccgctggcggccacctctatgctgatcactcaggggctgatttctaaagggattttgagctcccacccaaaatatgggagcatcccaaagctaatttag

SEQ ID NO: 35824 - DNA, 90 bp, Artificial Sequence
  derived and/or modified sequence
atgaacggccgggccgacttccgggagcccaacgccgaggtgcccaggcccataccacatatcggacccgattacatccccacagaatag

SEQ ID NO: 35825 - DNA, 516 bp, Artificial Sequence
  derived and/or modified sequence
atgaacggccgggccgacttccgggagcccaacgccgaggtgccccgacctatcccccatatcggcccggactacatcccaaccgaggaggaacgcagagtgtttgcggagtgtaatgatgagtcgttctggttcaggtctgtgcccctggctgcaacttcaatgttaattacccagggcctgatttccaaaggaattttgtccagccaccctaagtacggctcaattccaaagttaatccttgcgtgtatcatgggctattttgctggaaagttgtcctacgtgaagacatgtcaggagaaattcaagaagcttgagaactccccactcggcgaggccctgagatccggtcaagcacggcggagcagtccgcctggacactattatcagaagagtaagtatgattctagcgtgtctggacaatcatcctttgtgacttctcccgctgctgacaacatcgaaatgctgcctcactatgagcctattccattctcctcttctatgaatgagtcgtag

SEQ ID NO: 35826 - DNA, 339 bp, Artificial Sequence
  derived and/or modified sequence
atgaacggccgggccgacttccgggagcccaacgccgaggtgcccaggcctattccacatattggaccagattacatccctaccgaggaagaaaggagggtatttgctgaatgcaatgacgaatccttctggtttcgttcagttccactggctgccacaagcatgctcatcacgcaaggtttgatatccaaagggatcctcagcagtcaccctaaatatggctctatccctaagttgatcctcgcatgcatcatgggttacttcgcagggaagctgtcatatgttaagacatgtcaggagaaattcaagaagttagaaaactctccactaggggaatag

SEQ ID NO: 35827 - DNA, 564 bp, Artificial Sequence
  derived and/or modified sequence
atgaacggacgcgcagacttcagagaacctaatgcagaagtgccacgtcccattcctcacatcggcccagactacatcccaaccgaggaggaacggagagttttcgctgagtgcaatgatgagtccttctggtttcgttctgttcctcttgctgcgacatctatgctgattacccaaggactgatttcaaaggggatcctttcaagtcatcccaagtacgggtctatccctaaattgatacttgcgtgtattatgggctattttgcaggcaagctctcatacgttaaaacttgccaagagaaattcaaaaaattagagaactctccattaggcgaggcattacgctcaggacaggcacggcgttcctcaccgccaggccattattatcagaaatctaagtacgattcatccgtaagcggacagagctcctttgtgacctcgcctgctgccgataatatagagatgcttcctcactatgaacctattccattttcaagctcgatgaacgagtctgcccctacaggtatcacagatcatatcgtacagggacgaaatttcagttag

SEQ ID NO: 35828 - DNA, 294 bp, Artificial Sequence
  derived and/or modified sequence
atgaacgggagggcagatttccgcgaacctaacgctgaggttccccgaccgattccccatatcggacctgattacatcccgaccgaagaagagagaagggtcttcgcagagtgcaatgacgagtcattttggtttcggagtgtgcctctggccgctacctccatgctgatcacacagggactgatctccaagggtattctgtcgtcccatcctaaatacggttcaattcccaagctcatactggcttgtatcatggggtatttcgctggtaagctctcatatgtcaaaacatag

SEQ ID NO: 35829 - DNA, 243 bp, Artificial Sequence
  derived and/or modified sequence
atgaacggtcgagctgacttccgggagccaaacgccgaggtgccgagacccattccacacattggacctgattatattccaactgaggaggaacggagggtatttgccgaatgtaacgacgaaagcttctggttccgctctgtgccactcgctgccacttctatgttaattacccagggcctgatcagcaaaggcatcctgtctagccatcccaagtacggctctatccccaaactgatctag

SEQ ID NO: 35830 - DNA, 243 bp, Artificial Sequence
  derived and/or modified sequence
atgaatgggagggccgattttagggaacccaatgccgaggtgcctcgaccaataccacacatcggaccagattacattccaacagaggaggaaagaagggtctttgctgaatgtaatgatgagtccttctggtttcggtctgtgcctctggcagcaacgagcatgctgatcacacaaggcctgataagcaaggggatcctgtctagccacccaaagtacgggagcatccctaagctgatctag

SEQ ID NO: 35831 - DNA, 90 bp, Artificial Sequence
  derived and/or modified sequence
atgaacggcagagccgattttcgcgagccaaatgccgaggttcctaggccgatcccccatatcggccctgattacattcccaccgaatag

SEQ ID NO: 35832 - DNA, 516 bp, Artificial Sequence
  derived and/or modified sequence
atgaatggcagggctgacttccgcgagcctaacgccgaggtcccaaggcccatcccgcatattggcccagattacattccaacagaagaagagaggcgggtcttcgccgagtgtaacgacgaaagcttctggtttaggtcagtgccgctggccgctacaagcatgctgatcacccagggactcatttctaaaggaatcctaagcagtcatcccaaatatggcagcattccaaagctgatcctagcctgcattatgggttatttcgccggtaagttgtcgtacgtgaaaacctgccaggagaagttcaaaaagctcgagaactcacctcttggcgaggcactgcgaagtggtcaagcacgcagatccagcccacccggtcactattaccagaaatcgaagtacgatagctcagttagcggccagagcagctttgttaccagccccgctgccgacaatatcgagatgcttccccattacgagccaattcctttttcgagctctatgaacgaaagttag

SEQ ID NO: 35833 - DNA, 339 bp, Artificial Sequence
  derived and/or modified sequence
atgaacgggagggcagacttcagggagcccaatgccgaggtccctcgcccaatcccccatataggacctgattacatccccactgaggaggagaggcgggtcttcgccgaatgcaatgatgagtccttttggttcaggtctgtacctctcgccgcaaccagcatgctcattacgcaggggctcatctctaagggcatcctatcttcgcacccaaaatacggctccatcccgaagctgattctggcgtgcattatggggtattttgcgggaaagctcagttatgtgaaaacatgccaggagaagttcaagaagctggagaacagtccattaggggagtag

SEQ ID NO: 35834 - DNA, 582 bp, Artificial Sequence
  derived and/or modified sequence
agtgcctccgggtcgcggtcattttgagcccctgtctggatgacttcttgcggctgttctacccctccccctccccgcgtcgcctgctgctgtcgtcgggaggtgggtgaggtgacgcaaacagccccgttgttgccctccgcgtatcccctcaccacctttgcggccatccacgactttcgcaccttccgccattttcctgcctgtgagggtggacagatcgcgctcgggtctcggcctcctgagtgccggtgactgcgggaggcgacggagtgcttctgggggtgaaagatgaatgggagggctgattttcgagagccgaatgcagaggttccaagaccaattccccacatagggcctgattacattccaacagaggaagaaaggagagtcttcgcagaatgcaatgatgaaagcttctggttcagatctgtgcctttggctgcaacaagtatgttgattactcaaggattaattagtaaaggaatactttcaagtcatcccaaatatggttccatccctaaacttatacttgcttgtatcatgggatactttgctggaaaactttcttatgtgaaaact

SEQ ID NO: 35835 - protein, 194 aa, Artificial Sequence
  derived and/or modified sequence
MNGRADFREPNAEVPRPIPHIGPDYIPTEEERRVFAECNDESFWFRSVPLAATSMLITQGLISKGILSSHPKYGSIPKLILACIMGYFAGKLSYVKTCQEKFKKLENSPLGEALRSGQARRSSPPGHYYQKSKYDSSVSGQSSFVTSPAADNIEMLPHYEPIPFSSSMNESAPTGITDHIVQVKVNKYGDTWDE

SEQ ID NO: 35836 - protein, 29 aa, Artificial Sequence
  derived and/or modified sequence
MNGRADFREPNAEVPRPIPHIGPDYIPTE

SEQ ID NO: 35837 - DNA, 585 bp, Artificial Sequence
  derived and/or modified sequence
atgaacggcagagccgacttcagagagcccaacgccgaggtgcccagacccatcccccacatcggccccgactacatccccaccgaggaggagagaagagtgttcgccgagtgcaacgacgagagcttctggttcagaagcgtgcccctggccgccaccagcatgctgatcacccagggcctgatcagcaagggcatcctgagcagccaccccaagtacggcagcatccccaagctgatcctggcctgcatcatgggctacttcgccggcaagctgagctacgtgaagacctgccaggagaagttcaagaagctggagaacagccccctgggcgaggccctgagaagcggccaggccagaagaagcagcccccccggccactactaccagaagagcaagtacgacagcagcgtgagcggccagagcagcttcgtgaccagccccgccgccgacaacatcgagatgctgccccactacgagcccatccccttcagcagcagcatgaacgagagcgcccccaccggcatcaccgaccacatcgtgcaggtgaaggtgaacaagtacggcgacacctgggacgagtag

SEQ ID NO: 35838 - DNA, 585 bp, Artificial Sequence
  derived and/or modified sequence
atgaatggacgcgccgactttcgggaacccaacgctgaggtgccccggccaatcccacacattggaccagattacatccctaccgaagaagaaagaagagtttttgccgagtgcaatgatgaatccttttggtttcggagcgtgccgctggcggctaccagcatgctgattacacagggcctcatatccaaaggcatcctgtcatcacacccaaaatacgggtccattcctaagctcatcctggcctgcatcatggggtattttgccggcaagctgtcctatgtaaagacctgtcaggagaagtttaaaaagctagagaactcaccgctgggggaggctctacgcagtggacaggcacgcagatcatcacctcccggccactactaccagaaatcaaagtacgattcaagtgtgtccggacaatcctcctttgtgacctcgcctgcggccgataacatcgaaatgctgcctcactatgagcccattccgttctcctcaagtatgaatgaatcagcccccaccggcatcaccgatcacatcgtgcaggtgaaagttaacaaatacggggatacctgggacgaatag

SEQ ID NO: 35839 - DNA, 585 bp, Artificial Sequence
  derived and/or modified sequence
atgaatggccgggctgacttccgggagcccaatgctgaggtgccccggcccatcccccacatcggccctgactacatccccacagaggaggagcggcgggtgtttgctgaatgtaatgatgagagcttctggttccgctctgtgcccctggccgccacctccatgctgatcacccagggcctcatcagcaagggcatcctgagcagccaccccaagtatggcagcatccccaagctgatcctggcctgcatcatgggctactttgctgggaagctgtcctatgtgaagacctgccaggagaagttcaagaagctggagaacagccccctgggggaggccctgcggagcggccaggcccggcgcagcagccccccaggccactactaccagaagagcaaatatgacagctctgtgtctggccagagcagctttgtgaccagccctgctgctgacaacatcgagatgctgccccactatgagcccatccccttcagcagctccatgaatgaaagtgcccccaccggcatcacagaccacatcgtgcaggtgaaggtgaacaagtacggggacacctgggatgaatag

SEQ ID NO: 35840 - DNA, 1306 bp, Artificial Sequence
  derived and/or modified sequence
tgcctccgggtcgcggtcattttgagcccctgtctggatgacttcttgcggctgttctacccctccccctccccgcggtaccttgcacttttctccctccctgccccctctcgagtccaccctccgggccttctgcccctgatcgcttggttttccttgcagtcgcctgctgctgtcgtcgggaggaaagatgaatgggagggctgattttcgagagccgaatgcagaggttccaagaccaattccccacatagggcctgattacattccaacagaggaagaaaggagagtcttcgcagaatgcaatgatgaaagcttctggttcagatctgtgcctttggctgcaacaagtatgttgattactcaaggattaattagtaaaggaatactttcaagtcatcccaaatatggttccatccctaaacttatacttgcttgtatcatgggatactttgctggaaaactttcttatgtgaaaacttgccaagagaaattcaagaaacttgaaaattccccccttggagaagctttacgatcaggacaagcacgacgatcttcaccacctgggcactattatcaaaagtcaaaatatgactcaagtgtgagtggtcaatcatcttttgtgacatccccagcagcagacaacatagaaatgcttcctcattatgagccaattccattcagttcttctatgaatgaatctgctcccactggtattactgatcatattgtccaaggtagaaacttctcttgaaatgaatttcaacattttatggtccaactcaaagtaaacaagtatggagatacttgggatgagtgaaaaattacatcattggacatgaaggagtttcaacatccagcttcatctaggtggtcatgattacctgcatgctttgagctcagcagcagtcttcataaacacatttaaaacaagatcctgggtttttgtggtttgacttctatggtgttttaaaaaaacacagatttttagtgttaatattgtgtaaatgtactcaccttagggattcatttgaatgatggtattataccatgattgtatacagtttgtgaaattgttgcaagggcaaagataactcttaaaaaaccgtcgagattacaatgctctagaatcagcatataagaaaataaatgatatctgcatgttgaattggggtggatggggggagcaagcataatttttaagtgtgaagctttgcatcaagaaattattaaaaagctttttttctccagtattttctgtattatcttaatgtttatggcaaataaaatgtaaaggaacatgcaa

SEQ ID NO: 35841 - DNA, 585 bp, Artificial Sequence
  derived and/or modified sequence
atgaacggccgggccgacttccgggagcccaacgccgaggtgccccggcccataccccatatcggcccggattacattcccacggaggaagagagacgagtcttcgcagagtgtaacgacgagtctttctggttccggtcagtacctctggccgctactagcatgctgatcactcaaggcctaatctctaaaggaatcctatcgtctcaccctaaatatggtagtatacccaaactcattctggcttgtattatgggatacttcgccggtaagctgtcttatgtgaagacgtgtcaggagaagttcaaaaaactcgagaattcaccgctgggcgaagctttgaggagcgggcaggcacggcggtcttctcctccgggccactactaccagaagagtaagtacgattcatcagtcagcggtcagagcagttttgtcacaagtcctgccgctgataacatcgagatgctcccacattacgagccaattcctttctcctcgagcatgaacgaatctgcaccaacaggcatcaccgaccatattgttcaggtcaaggtaaataagtacggcgacacttgggacgagtag

SEQ ID NO: 35842 - DNA, 585 bp, Artificial Sequence
  derived and/or modified sequence
atgaatgggcgagccgacttccgggagcccaacgcggaagtgcctcgcccaatcccccatataggaccagactacattccgacagaggaagaacggagggtattcgctgagtgtaatgatgagtctttttggttccggagcgtgccgctagctgcaacctccatgctgatcactcaaggcttgatctctaaagggatcctgtcaagtcatcctaaatatggttccattccgaaactgatattggcatgcattatggggtactttgcaggaaagttgtcatacgtgaagacatgccaggaaaaattcaagaaactggagaactcaccgcttggtgaggcactgaggagtggacaggccagacggtcctccccacccggacactactaccagaagagtaagtatgattcaagcgtgtcaggccagtccagctttgtaaccagcccagcagctgataacatcgaaatgctgcctcattacgagccaatcccatttagctcaagcatgaacgagagcgcacccaccgggatcacagatcacatcgttcaggtcaaggtgaataagtatggagatacctgggacgagtag

SEQ ID NO: 35843 - DNA, 1756 bp, Artificial Sequence
  derived and/or modified sequence
tcttgcggctgttctacccctccccctccccgcggtaccttgcacttttctccctccctgccccctctcgagtccaccctccgggccttctgcccctgatcgcttggttttccttgcagtcgcctgctgctgtcgtcgggaggaaagatgaatgggagggctgattttcgagagccgaatgcagaggttccaagaccaattccccacatagggcctgattacattccaacagaggaagaaaggagagtcttcgcagaatgcaatgatgaaagcttctggttcagatctgtgcctttggctgcaacaagtatgttgattactcaaggattaattagtaaaggaatactttcaagtcatcccaaatatggttccatccctaaacttatacttgcttgtatcatgggatactttgctggaaaactttcttatgtgaaaacttgccaagagaaattcaagaaacttgaaaattccccccttggagaagctttacgatcaggacaagcacgacgatcttcaccacctgggcactattatcaaaagtcaaaatatgactcaagtgtgagtggtcaatcatcttttgtgacatccccagcagcagacaacatagaaatgcttcctcattatgagccaattccattcagttcttctatgaatgaatctgctcccactggtattactgatcatattgtccaagtcaaagtaaacaagtatggagatacttgggatgagtgaaaaattacatcattggacatgaaggagtttcaacatccagcttcatctaggtggtcatgattacctgcatgctttgagctcagcagcagtcttcataaacacatttaaaacaagatcctgggtttttgtggtttgacttctatggtgttttaaaaaaacacagatttttagtgttaatattgtgtaaatgtactcaccttagggattcatttgaatgatggtattataccatgattgtatacagtttgtgaaattgttgcaagggcaaagataactcttaaaaaaccgtcgagattacaatgctctagaatcagcatataagaaaataaatgatatctgcatgttgaattggggtggatggggggagcaagcataatttttaagtgtgaagctttgcatcaagaaattattaaaaagctttttttctccagtattttctgtattatcttaatgtttatggcaaataaaatgtaaaggaacatgcaacagccctcatcttccttgattttatggttttattgtttgtaatttattgatttatttttaagctagttataatcatgtaggtataggaaataaagtcatctataatatttctataatatggctataatatggctataaatctataatatggctggaggcagtgggcagtggttcatgcctgtaatcccagcactttgggaggccgaagtgggaggattgcatgagtccaggagtttgagaccagcctgggcaacaaagcgagaccctgtctttacaaaaaaataaaaattagctggcgatggtgtcgtgtgcctgtagtcctagttacttaagaggctgagttgggaggatcagttgaacccagtggttctgggttgcagtgagctgtggtcacaccactgaactccagcctgtgcgactgagtgagaccctgtgtctaaaaaaataaaaatataatgaatgtgatttatgtagataaattgataatatagtaaataggtaaatgccttaaaaagcatttttaaagaatttgtaaatt

SEQ ID NO: 35844 - protein, 2404 aa, Artificial Sequence
  derived and/or modified sequence
MAENLLDGPPNPKRAKLSSPGFSANDSTDFGSLFDLENDLPDELIPNGGELGLLNSGNLVPDAASKHKQLSELLRGGSGSSINPGIGNVSASSPVQQGLGGQAQGQPNSANMASLSAMGKSPLSQGDSSAPSLPKQAASTSGPTPAASQALNPQAQKQVGLATSSPATSQTGPGICMNANFNQTHPGLLNSNSGHSLINQASQGQAQVMNGSLGAAGRGRGAGMPYPTPAMQGASSSVLAETLTQVSPQMTGHAGLNTAQAGGMAKMGITGNTSPFGQPFSQAGGQPMGATGVNPQLASKQSMVNSLPTFPTDIKNTSVTNVPNMSQMQTSVGIVPTQAIATGPTADPEKRKLIQQQLVLLLHAHKCQRREQANGEVRACSLPHCRTMKNVLNHMTHCQAGKACQAILGSPASGIQNTIGSVGTGQQNATSLSNPNPIDPSSMQRAYAALGLPYMNQPQTQLQPQVPGQQPAQPQTHQQMRTLNPLGNNPMNIPAGGITTDQQPPNLISESALPTSLGATNPLMNDGSNSGNIGTLSTIPTAAPPSSTGVRKGWHEHVTQDLRSHLVHKLVQAIFPTPDPAALKDRRMENLVAYAKKVEGDMYESANSRDEYYHLLAEKIYKIQKELEEKRRSRLHKQGILGNQPALPAPGAQPPVIPQAQPVRPPNGPLSLPVNRMQVSQGMNSFNPMSLGNVQLPQAPMGPRAASPMNHSVQMNSMGSVPGMAISPSRMPQPPNMMGAHTNNMMAQAPAQSQFLPQNQFPSSSGAMSVGMGQPPAQTGVSQGQVPGAALPNPLNMLGPQASQLPCPPVTQSPLHPTPPPASTAAGMPSLQHTTPPGMTPPQPAAPTQPSTPVSSSGQTPTPTPGSVPSATQTQSTPTVQAAAQAQVTPQPQTPVQPPSVATPQSSQQQPTPVHAQPPGTPLSQAAASIDNRVPTPSSVASAETNSQQPGPDVPVLEMKTETQAEDTEPDPGESKGEPRSEMMEEDLQGASQVKEETDIAEQKSEPMEVDEKKPEVKVEVKEEEESSSNGTASQSTSPSQPRKKIFKPEELRQALMPTLEALYRQDPESLPFRQPVDPQLLGIPDYFDIVKNPMDLSTIKRKLDTGQYQEPWQYVDDVWLMFNNAWLYNRKTSRVYKFCSKLAEVFEQEIDPVMQSLGYCCGRKYEFSPQTLCCYGKQLCTIPRDAAYYSYQNRYHFCEKCFTEIQGENVTLGDDPSQPQTTISKDQFEKKKNDTLDPEPFVDCKECGRKMHQICVLHYDIIWPSGFVCDNCLKKTGRPRKENKFSAKRLQTTRLGNHLEDRVNKFLRRQNHPEAGEVFVRVVASSDKTVEVKPGMKSRFVDSGEMSESFPYRTKALFAFEEIDGVDVCFFGMHVQEYGSDCPPPNTRRVYISYLDSIHFFRPRCLRTAVYHEILIGYLEYVKKLGYVTGHIWACPPSEGDDYIFHCHPPDQKIPKPKRLQEWYKKMLDKAFAERIIHDYKDIFKQATEDRLTSAKELPYFEGDFWPNVLEESIKELEQEEEERKKEESTAASETTEGSQGDSKNAKKKNNKKTNKNKSSISRANKKKPSMPNVSNDLSQKLYATMEKHKEVFFVIHLHAGPVINTLPPIVDPDPLLSCDLMDGRDAFLTLARDKHWEFSSLRRSKWSTLCMLVELHTQGQDRFVYTCNECKHHVETRWHCTVCEDYDLCINCYNTKSHAHKMVKWGLGLDDEGSSQGEPQSKSPQESRRLSIQRCIQSLVHACQCRNANCSLPSCQKMKRVVQHTKGCKRKTNGGCPVCKQLIALCCYHAKHCQENKCPVPFCLNIKHKLRQQQIQHRLQQAQLMRRRMATMNTRNVPQQSLPSPTSAPPGTPTQQPSTPQTPQPPAQPQPSPVSMSPAGFPSVARTQPPTTVSTGKPTSQVPAPPPPAQPPPAAVEAARQIEREAQQQQHLYRVNINNSMPPGRTGMGTPGSQMAPVSLNVPRPNQVSGPVMPSMPPGQWQQAPLPQQQPMPGLPRPVISMQAQAAVAGPRMPSVQPPRSISPSALQDLLRTLKSPSSPQQQQQVLNILKSNPQLMAAFIKQRTAKYVANQPGMQPQPGLQSQPGMQPQPGMHQQPSLQNLNAMQAGVPRPGVPPQQQAMGGLNPQGQALNIMNPGHNPNMASMNPQYREMLRRQLLQQQQQQQQQQQQQQQQQQGSAGMAGGMAGHGQFQQPQGPGGYPPAMQQQQRMQQHLPLQGSSMGQMAAQMGQLGQMGQPGLGADSTPNIQQALQQRILQQQQMKQQIGSPGQPNPMSPQQHMLSGQPQASHLPGQQIATSLSNQVRSPAPVQSPRPQSQPPHSSPSPRIQPQPSPHHVSPQTGSPHPGLAVTMASSIDQGHLGNPEQSAMLPQLNTPSRSALSSELSLVGDTTGDTLEKFVEGL

SEQ ID NO: 35845 - protein, 2472 aa, Artificial Sequence
  derived and/or modified sequence
LRGAVAVAEIWPPPPPPGLRPPSPSAPARPLAARARSSPSQPAGPPTPVRALAGPAARARGCFREQVKMAENLLDGPPNPKRAKLSSPGFSANDSTDFGSLFDLENDLPDELIPNGGELGLLNSGNLVPDAASKHKQLSELLRGGSGSSINPGIGNVSASSPVQQGLGGQAQGQPNSANMASLSAMGKSPLSQGDSSAPSLPKQAASTSGPTPAASQALNPQAQKQVGLATSSPATSQTGPGICMNANFNQTHPGLLNSNSGHSLINQASQGQAQVMNGSLGAAGRGRGAGMPYPTPAMQGASSSVLAETLTQVSPQMTGHAGLNTAQAGGMAKMGITGNTSPFGQPFSQAGGQPMGATGVNPQLASKQSMVNSLPTFPTDIKNTSVTNVPNMSQMQTSVGIVPTQAIATGPTADPEKRKLIQQQLVLLLHAHKCQRREQANGEVRACSLPHCRTMKNVLNHMTHCQAGKACQAILGSPASGIQNTIGSVGTGQQNATSLSNPNPIDPSSMQRAYAALGLPYMNQPQTQLQPQVPGQQPAQPQTHQQMRTLNPLGNNPMNIPAGGITTDQQPPNLISESALPTSLGATNPLMNDGSNSGNIGTLSTIPTAAPPSSTGVRKGWHEHVTQDLRSHLVHKLVQAIFPTPDPAALKDRRMENLVAYAKKVEGDMYESANSRDEYYHLLAEKIYKIQKELEEKRRSRLHKQGILGNQPALPAPGAQPPVIPQAQPVRPPNGPLSLPVNRMQVSQGMNSFNPMSLGNVQLPQAPMGPRAASPMNHSVQMNSMGSVPGMAISPSRMPQPPNMMGAHTNNMMAQAPAQSQFLPQNQFPSSSGAMSVGMGQPPAQTGVSQGQVPGAALPNPLNMLGPQASQLPCPPVTQSPLHPTPPPASTAAGMPSLQHTTPPGMTPPQPAAPTQPSTPVSSSGQTPTPTPGSVPSATQTQSTPTVQAAAQAQVTPQPQTPVQPPSVATPQSSQQQPTPVHAQPPGTPLSQAAASIDNRVPTPSSVASAETNSQQPGPDVPVLEMKTETQAEDTEPDPGESKGEPRSEMMEEDLQGASQVKEETDIAEQKSEPMEVDEKKPEVKVEVKEEEESSSNGTASQSTSPSQPRKKIFKPEELRQALMPTLEALYRQDPESLPFRQPVDPQLLGIPDYFDIVKNPMDLSTIKRKLDTGQYQEPWQYVDDVWLMFNNAWLYNRKTSRVYKFCSKLAEVFEQEIDPVMQSLGYCCGRKYEFSPQTLCCYGKQLCTIPRDAAYYSYQNRYHFCEKCFTEIQGENVTLGDDPSQPQTTISKDQFEKKKNDTLDPEPFVDCKECGRKMHQICVLHYDIIWPSGFVCDNCLKKTGRPRKENKFSAKRLQTTRLGNHLEDRVNKFLRRQNHPEAGEVFVRVVASSDKTVEVKPGMKSRFVDSGEMSESFPYRTKALFAFEEIDGVDVCFFGMHVQEYGSDCPPPNTRRVYISYLDSIHFFRPRCLRTAVYHEILIGYLEYVKKLGYVTGHIWACPPSEGDDYIFHCHPPDQKIPKPKRLQEWYKKMLDKAFAERIIHDYKDIFKQATEDRLTSAKELPYFEGDFWPNVLEESIKELEQEEEERKKEESTAASETTEGSQGDSKNAKKKNNKKTNKNKSSISRANKKKPSMPNVSNDLSQKLYATMEKHKEVFFVIHLHAGPVINTLPPIVDPDPLLSCDLMDGRDAFLTLARDKHWEFSSLRRSKWSTLCMLVELHTQGQDRFVYTCNECKHHVETRWHCTVCEDYDLCINCYNTKSHAHKMVKWGLGLDDEGSSQGEPQSKSPQESRRLSIQRCIQSLVHACQCRNANCSLPSCQKMKRVVQHTKGCKRKTNGGCPVCKQLIALCCYHAKHCQENKCPVPFCLNIKHKLRQQQIQHRLQQAQLMRRRMATMNTRNVPQQSLPSPTSAPPGTPTQQPSTPQTPQPPAQPQPSPVSMSPAGFPSVARTQPPTTVSTGKPTSQVPAPPPPAQPPPAAVEAARQIEREAQQQQHLYRVNINNSMPPGRTGMGTPGSQMAPVSLNVPRPNQVSGPVMPSMPPGQWQQAPLPQQQPMPGLPRPVISMQAQAAVAGPRMPSVQPPRSISPSALQDLLRTLKSPSSPQQQQQVLNILKSNPQLMAAFIKQRTAKYVANQPGMQPQPGLQSQPGMQPQPGMHQQPSLQNLNAMQAGVPRPGVPPQQQAMGGLNPQGQALNIMNPGHNPNMASMNPQYREMLRRQLLQQQQQQQQQQQQQQQQQQGSAGMAGGMAGHGQFQQPQGPGGYPPAMQQQQRMQQHLPLQGSSMGQMAAQMGQLGQMGQPGLGADSTPNIQQALQQRILQQQQMKQQIGSPGQPNPMSPQQHMLSGQPQASHLPGQQIATSLSNQVRSPAPVQSPRPQSQPPHSSPSPRIQPQPSPHHVSPQTGSPHPGLAVTMASSIDQGHLGNPEQSAMLPQLNTPSRSALSSELSLVGDTTGDTLEKFVEGL

SEQ ID NO: 35846 - DNA, 1413 bp, Artificial Sequence
  derived and/or modified sequence
atgtcagttaccgatcaggctttcgttaccctggccaccaacgacatctactgtcaaggcgccctggttctgggtcagtcactgcgccgacatcgactaacgaggaagctggtcgttttaatcactccacaggtaagtagcctgctccgcgtaattctctccaaggtgttcgacgaggtgatcgaagttaatctgatcgactcagctgactacatccatttggcttttcttaagcgacctgagctcggccttacccttaccaagctgcattgttggaccttaacgcactatagcaagtgcgtctttctggatgcagatacactggtcctgtccaacgttgatgagctgtttgatcgaggagaatttagcgctgcccccgatccaggatggcccgactgcttcaactccggagttttcgtgttccaacccagcctgcacacgcataaattactgttgcagcacgctatggaacatggatcatttgacggcgcagatcagggcttgctgaattcattctttaggaattggtcaactacggatattcataagcacctaccgttcatctacaacctgagcagcaataccatgtatacttattctccagcctttaagcagtttggttcatccgccaaagttgtccatttcctaggaagcatgaagccttggaactacaagtataacccacagtccggcagtgttctggagcagggctctgccagctccagtcagcaccaggcagcctttctgcatttgtggtggacggtgtaccaaaacaatgtgctgcctctctacaagtctgttcaggccggggaagcacgggccagcccgggtcacacactgtgtcacagtgatgtcggtgggccttgtgccgactccgctagcggcgtgggcgagccctgtgagaactccaccccctcagctggagtgccctgcgctaatagtcctttaggatcaaatcagcccgcgcaaggcctgcctgagccaacacagatcgttgatgaaaccttatccctgccggagggcagacgttctgaggacatgatcgcctgtcccgaaactgagactcctgccgttatcacctgcgacccgttgtcgcagccttcgccacaaccagcggatttcaccgaaacagagacaattctccagccagctaataaggtcgaatccgttagctctgaggagacttttgaaccttctcaggagttgccagcagaggccttgcgagatccttccttacaggacgccctggaggtggacctcgccgtctcagtgtctcaaatctctattgaggaaaaagtaaaagaactcagccctgaggaagagcggagaaagtgggaagagggtagaattgactatatggggaaagatgctttcgcccgaattcaggagaaactggaccgctttctgcagtag

SEQ ID NO: 35847 - DNA, 1956 bp, Artificial Sequence
  derived and/or modified sequence
cttcccggcagccggggctgggcaccaggcggcgcgcgggcttgcgggcaggggctgcagggaggaggagaggacccgcgcccgcgggggctggcggaggcggggccgggcttccggacagaggccaatcgctgccctcggggcctccagcgccggctctgggccgaggcagccagagcgcggaagaggcctggaaatccacgcggattcccggagacggcgcctctgctctgcgggttcgtggcgaggaagtccacccactgctcccgggcgcaggtctgcaggtccgcgcccactgcccgcggcgccactgaccatgtcggtgactgatcaggcttttgtcacactagccaccaatgacatctactgccagggcgccctggtcctggggcagtcactgaggagacacaggctgacgaggaagctggtggtgttgatcactcctcaggtgtccagcctgctcagggtcatcctctcgaaggtgttcgatgaagtcattgaagtgaatctaatcgatagtgccgactacatccacctggcctttctgaagagacctgagctcgggctcaccctcaccaagcttcactgttggactctcactcactacagcaagtgtgtcttcctggatgcagacactctggtgctgtccaatgtcgatgagctgtttgacaggggagagttttctgcggccccggaccccggatggccggattgcttcaatagcggggtgtttgtcttccagccttctctccacacgcataaactcctgctacagcacgccatggaacacggcagctttgacggggcagaccaaggcttactgaatagtttcttcaggaactggtcgaccacagacatccacaagcacctgccgttcatctataacttgagtagtaacacgatgtacacttacagccctgccttcaagcaattcggttccagtgcaaaggtcgtccactttttggggtccatgaaaccttggaactacaagtacaatccacagagtggctcggtgttggagcaaggctcagcgtccagcagccagcaccaggcggcattccttcatctctggtggacggtctaccagaacaacgtgctgcccctttataaaagcgtccaagcgggggaagcacgcgcgtctcctggtcacacactttgccacagtgatgtgggggggccgtgtgcggattcagcctctggtgttggagagccgtgtgaaaattcaacacccagtgcgggcgtgccgtgtgcaaattcaccactgggttctaaccagcctgctcagggccttccggagccgacccagatagtggatgagaccctgtccctacctgaaggacgccgttcagaagatatgatagcttgtcctgaaactgagactcctgccgtgataacgtgtgacccactgtcccagccttcccctcagcctgcagacttcacagagactgaaaccatcttgcagccagcaaataaagtcgaaagtgtctcatccgaggaaaccttcgaaccaagccaggaactccctgctgaggctctcagggaccccagtctgcaggatgcactggaggtcgacctggccgtctctgtttcccagatctccatcgaagagaaggtgaaggaattgagccccgaggaagagaggaggaagtgggaggaaggccgtatcgactacatggggaaggacgcgtttgctcgcatccaggagaagctggaccggttcctgcagtaatccggcagctggtgggcgttgtgtgtagttagacaatgtcctgttgggtggtcctgttgcgtggagatctcctctggtcctttcaaagggaaacgctgttgaaccttgtgcctctatttatgcttaatccatttgagtgcctcacacaaaaaacgtagagtatagaaatccaccttaaagcccctcgccccaacttctccaccaacgccttctgggctttcttcaga

SEQ ID NO: 35848 - DNA, 1413 bp, Artificial Sequence
  derived and/or modified sequence
atgtctgtgacagaccaggcctttgtgaccctggccaccaatgacatctactgccagggcgccctggtgctgggccagagcctgcggcggcaccggctgaccaggaagctggtggtgctgatcaccccccaggtgagcagcctgctgcgggtcatcctgagcaaggtgtttgatgaggtgattgaggtgaacctgattgacagcgctgactacatccacctggccttcctgaagaggcctgagctgggcctgaccctgaccaagctgcactgctggaccctgacccactacagcaaatgtgtgttcctggatgctgacaccctggtgctgagcaatgtggatgagctgtttgacagaggagagttctctgctgccccagaccccggctggccagactgcttcaacagcggcgtgtttgtgttccagcccagcctgcacacccacaagctgctgctgcagcacgccatggagcacggcagctttgatggagctgaccagggcctgctgaacagcttcttcaggaactggagcaccacagacatccacaagcacctgcccttcatctacaacctgagcagcaacaccatgtacacctacagccctgccttcaagcagtttggcagcagcgccaaggtggtgcacttcctgggctccatgaagccctggaactacaagtacaacccccagagcggctctgtgctggagcagggcagcgccagcagcagccagcaccaggccgccttcctgcacctgtggtggacagtgtaccagaacaacgtgctgcccctgtacaagtctgtgcaggccggggaggcccgggccagccctggccacaccctgtgccacagtgatgtgggcggcccctgtgccgacagcgccagcggcgtgggggagccctgtgagaacagcacccccagcgctggggtgccctgtgccaacagccccctgggcagcaaccagcctgcccagggcctgcctgagcccacccagatcgtggatgagaccctgagcctgcctgagggccgccgctctgaggacatgattgcctgcccagagacagagaccccagctgtgatcacctgtgaccccctgagccagcccagcccccagcctgctgacttcacagaaacagagaccatcctgcagcctgccaacaaggtggagagcgtgagcagcgaggagacctttgagcccagccaggagctgcctgctgaggccctgcgggaccccagcctgcaggatgccctggaggtggacctggccgtgtctgtgtcccagatcagcattgaggagaaggtgaaggagctgagccctgaggaggagaggaggaagtgggaggagggcagaattgactacatgggcaaggatgcctttgcccgcatccaggagaagctggaccgcttcctgcagtag

SEQ ID NO: 35849 - DNA, 1413 bp, Artificial Sequence
  derived and/or modified sequence
atgagcgtgaccgaccaggccttcgtgaccctggccaccaacgacatctattgccaaggcgctctggtactaggtcagtccctgcgccggcaccgactgacaaggaagttggtggtactgattacaccacaagtctcaagccttctgcgggtcatactgtctaaggtttttgatgaagtgatagaagtgaatcttatcgactcggccgattacatccatctggccttccttaaaagaccagaattagggcttactctgaccaagctgcactgctggacactgactcactattcaaaatgtgtttttctggacgctgatacattggttctgtcaaacgttgatgaattgttcgatagaggcgaattctctgccgcgccggaccccggatggcctgactgcttcaattccggggtgttcgtttttcagccttcgcttcatacacataaacttcttctgcagcatgccatggaacacggctcctttgacggcgcggatcaagggctcctcaatagtttcttccggaactggtccacgacagatatccacaagcacttaccgttcatttacaatttgtcgtcaaacacaatgtacacctactcgcccgccttcaagcagtttggttcatcggcgaaggttgtacactttctgggatccatgaagccttggaattacaaatataatccacagtctggctccgtgctggagcaaggcagcgcctctagtagccaacatcaagcagcttttttgcatctttggtggactgtgtatcagaataacgtgctcccactgtacaagtcagtgcaggccggagaggcccgcgcttcccctggccatactctctgccattctgacgtgggaggaccgtgtgccgatagtgccagcggggtaggagagccttgcgagaattcaacacccagcgcaggtgtgccttgtgctaacagccccctgggctccaatcaaccagcccagggactgcccgagccgacacagattgtcgatgaaactctaagccttcccgaaggtcgcagatccgaggatatgattgcatgccctgagactgaaactcctgcagtgatcacgtgcgacccgctgtctcagccttccccacaacccgcagattttacagagacggagaccattctgcagcctgccaacaaggtggagagtgtctcttctgaagaaaccttcgagccctcccaggaactccctgccgaagccttacgagacccctcactgcaggacgcgctggaggtggacttggcggtgtcggtatctcaaatcagcatcgaggagaaggttaaggagctgagccctgaagaggagcgacggaagtgggaggaggggcgcattgattacatggggaaggatgctttcgctcgcattcaggaaaagctggacaggtttttacagtag

SEQ ID NO: 35850 - DNA, 1413 bp, Artificial Sequence
  derived and/or modified sequence
atgtctgtcactgaccaggctttcgtcactctggcaacaaatgacatatattgccaaggagccctcgtcctcggtcagagccttagacgacacagactgactaggaagctcgtagtgctaatcacacctcaggtctcttcactgctgcgtgtgattctatccaaggtgttcgacgaggtcatcgaagtgaatctgatcgacagcgctgactacatccatcttgcattcctcaaacgtcccgagctcggtctcaccctcactaagctgcactgctggacccttacccattacagcaagtgtgtctttctggatgcagatacactggtgctatccaacgtagacgagctctttgatcgaggagaattcagcgcagccccagatcccggatggcccgattgcttcaacagcggtgtcttcgtgtttcaaccttcactccatacccacaaattgcttctgcaacatgctatggagcatggctcatttgatggagctgaccaaggactgctaaactcattctttcgaaactggtccaccacggatatccacaagcacctcccattcatttacaacctgagttctaacacaatgtatacttattctccagcctttaagcagttcggctcgagcgcaaaggtcgtgcatttcctaggcagcatgaagccctggaattataagtataaccctcagtcaggatctgttttagagcaaggttctgcctcttccagtcagcatcaagcggcatttctacatctgtggtggaccgtgtaccagaataacgttctgcccctatacaaatcagtccaggcaggcgaagcaagagccagtcccggacatacactgtgtcattcagacgtaggcggaccatgtgccgattcggcctctggtgtgggcgagccctgcgaaaattccacccccagcgcaggagtgccttgcgcaaactcccccttgggaagcaatcagcccgctcagggcctgccagagcctacgcagatcgtggatgaaacattaagcctgcccgaggggaggagaagtgaggatatgatcgcgtgccccgaaaccgaaacccccgctgtcattacttgcgatccgctgagtcagccctcaccccagcctgcagactttactgagactgagaccatccttcagcccgcaaacaaagtagaatctgtttccagtgaggagacatttgagccgtctcaggagctccctgccgaggcgctgcgcgatccaagccttcaggacgccctggaggtcgacttggcagtgtctgtaagccagatctccatcgaggagaaggtaaaggagctttcacccgaagaagagaggagaaaatgggaggagggcaggatagattatatggggaaagacgccttcgcacggatccaggagaagttagatcgctttctgcagtag

SEQ ID NO: 35851 - DNA, 1413 bp, Artificial Sequence
  derived and/or modified sequence
atgagcgtgaccgaccaggccttcgtgaccctggccaccaacgacatctactgccagggcgccctggtgctgggccagagcctgagaagacacagactgaccagaaagctggtggtgctgatcaccccccaggtgagcagcctgctgagagtgatcctgagcaaggtgttcgacgaggtgatcgaggtgaacctgatcgacagcgccgactacatccacctggccttcctgaagagacccgagctgggcctgaccctgaccaagctgcactgctggaccctgacccactacagcaagtgcgtgttcctggacgccgacaccctggtgctgagcaacgtggacgagctgttcgacagaggcgagttcagcgccgcccccgaccccggctggcccgactgcttcaacagcggcgtgttcgtgttccagcccagcctgcacacccacaagctgctgctgcagcacgccatggagcacggcagcttcgacggcgccgaccagggcctgctgaacagcttcttcagaaactggagcaccaccgacatccacaagcacctgcccttcatctacaacctgagcagcaacaccatgtacacctacagccccgccttcaagcagttcggcagcagcgccaaggtggtgcacttcctgggcagcatgaagccctggaactacaagtacaacccccagagcggcagcgtgctggagcagggcagcgccagcagcagccagcaccaggccgccttcctgcacctgtggtggaccgtgtaccagaacaacgtgctgcccctgtacaagagcgtgcaggccggcgaggccagagccagccccggccacaccctgtgccacagcgacgtgggcggcccctgcgccgacagcgccagcggcgtgggcgagccctgcgagaacagcacccccagcgccggcgtgccctgcgccaacagccccctgggcagcaaccagcccgcccagggcctgcccgagcccacccagatcgtggacgagaccctgagcctgcccgagggcagaagaagcgaggacatgatcgcctgccccgagaccgagacccccgccgtgatcacctgcgaccccctgagccagcccagcccccagcccgccgacttcaccgagaccgagaccatcctgcagcccgccaacaaggtggagagcgtgagcagcgaggagaccttcgagcccagccaggagctgcccgccgaggccctgagagaccccagcctgcaggacgccctggaggtggacctggccgtgagcgtgagccagatcagcatcgaggagaaggtgaaggagctgagccccgaggaggagagaagaaagtgggaggagggcagaatcgactacatgggcaaggacgccttcgccagaatccaggagaagctggacagattcctgcagtag

SEQ ID NO: 35852 - protein, 1017 aa, Artificial Sequence
  derived and/or modified sequence
MVFSVRQCGHVGRTEEVLLTFKIFLVIICLHVVLVTSLEEDTDNSSLSPPPAKLSVVSFAPSSNGTPEVETTSLNDVTLSLLPSNETEKTKITIVKTFNASGVKPQRNICNLSSICNDSAFFRGEIMFQYDKESTVPQNQHITNGTLTGVLSLSELKRSELNKTLQTLSETYFIMCATAEAQSTLNCTFTIKLNNTMNACAVIAALERVKIRPMEHCCCSVRIPCPSSPEELEKLQCDLQDPIVCLADHPRGPPFSSSQSIPVVPRATVLSQVPKATSFAEPPDYSPVTHNVPSPIGEIQPLSPQPSAPIASSPAIDMPPQSETISSPMPQTHVSGTPPPVKASFSSPTVSAPANVNTTSAPPVQTDIVNTSSISDLENQVLQMEKALSLGSLEPNLAGEMINQVSRLLHSPPDMLAPLAQRLLKVVDDIGLQLNFSNTTISLTSPSLALAVIRVNASSFNTTTFVAQDPANLQVSLETQAPENSIGTITLPSSLMNNLPAHDMELASRVQFNFFETPALFQDPSLENLSLISYVISSSVANLTVRNLTRNVTVTLKHINPSQDELTVRCVFWDLGRNGGRGGWSDNGCSVKDRRLNETICTCSHLTSFGVLLDLSRTSVLPAQMMALTFITYIGCGLSSIFLSVTLVTYIAFEKIRRDYPSKILIQLCAALLLLNLVFLLDSWIALYKMQGLCISVAVFLHYFLLVSFTWMGLEAFHMYLALVKVFNTYIRKYILKFCIVGWGVPAVVVTIILTISPDNYGLGSYGKFPNGSPDDFCWINNNAVFYITVVGYFCVIFLLNVSMFIVVLVQLCRIKKKKQLGAQRKTSIQDLRSIAGLTFLLGITWGFAFFAWGPVNVTFMYLFAIFNTLQGFFIFIFYCVAKENVRKQWRRYLCCGKLRLAENSDWSKTATNGLKKQTVNQGVSSSSNSLQSSSNSTNSTTLLVNNDCSVHASGNGNASTERNGVSFSVQNGDVCLHDFTGKQHMFNEKEDSCNGKGRMALRRTSKRGSLHFIEQM

SEQ ID NO: 35853 - protein, 117 aa, Artificial Sequence
  derived and/or modified sequence
ILLTMQHINTGIDMLNQLGCVFFAGVKPQRNICNLSSICNDSAFFRGEIMFQYDKESTVPQNQHITNGTLTGVLSLSELKRSELNKTLQTLSETYFIMCATAEAQRHIKLYIHNKTE

SEQ ID NO: 35854 - DNA, 3054 bp, Artificial Sequence
  derived and/or modified sequence
atggttttctctgttaggcagtgtggccatgtaggtcggactgaggaggtcttactgacattcaaaatattcctcgttattatttgtctgcacgtcgttctggtgacctcgctcgaggaagacactgataactccagcctgagtccaccacccgccaagctatcggtggtttcttttgctccctcctcaaacggcacgcctgaagttgaaaccacgagccttaatgatgtaacgttgtctcttctgccatccaacgagacagaaaagactaagataacaattgtaaagacgtttaatgccagcggtgtgaagcctcagcgcaacatctgcaatttgtcatctatttgtaatgacagcgcctttttcagaggagaaatcatgttccagtatgataaagaaagcaccgtaccacagaatcagcacatcaccaatggcactttaactggagtgctgagtttgtctgagctgaagagaagcgagttaaataagactctgcaaaccctttctgagacatatttcatcatgtgcgccacggccgaggctcaatccacccttaactgcactttcactatcaagctgaataatacaatgaatgcatgcgctgtaatcgcagcccttgagagagtcaagatcagacctatggagcattgctgttgctctgtgcggattccgtgtcccagcagccccgaggaactggaaaaactgcagtgtgatctccaggacccaatagtctgcctcgccgaccatcctcgcggtcccccattttcttcatctcagagcatccccgtggtgccccgtgcaactgtgctgtcccaggtaccaaaggccacctcttttgccgaaccgcccgattacagtcctgttacccacaacgtgccctccccaattggcgaaatccaaccactgtcccctcagcctagcgccccaatcgccagcagcccagctattgacatgccacctcaaagcgagaccataagttctcctatgccccagactcacgtcagtggcacccctccacccgtaaaagcatccttcagttcacctaccgtgagcgcccctgccaacgtaaatacaacaagtgcccccccagtacagaccgatattgttaacaccagtagtatctccgaccttgaaaatcaggtgttacagatggaaaaagccctgtcattaggatctcttgagccaaacctggccggagagatgataaaccaggtgtccaggctgctccatagcccaccagacatgctcgcaccactcgcacagaggttattgaaggtggtcgacgatatagggcttcagctgaatttcagtaacacaacaatctccctgacctcgccctcgctggccctcgctgtgatcagagtgaacgccagtagcttcaataccaccacttttgtcgcccaggaccccgccaatttacaggtaagcttagagactcaggctcccgagaactcaattggaaccattacattgccatcctctctgatgaacaatctgccggcccatgatatggagctggcgtccagggtgcaatttaacttcttcgaaactcccgccctgtttcaggatccaagccttgagaatctcagtttaatatcatatgtcattagttccagcgtggccaatctgacagtccgcaatttgacccgcaacgtgacagtcaccctcaagcacatcaacccctcccaagacgaattgactgtccgctgtgtattctgggacctgggacgaaatggaggaagaggcgggtggtcagacaacgggtgtagtgtcaaggatcgtaggctcaacgaaactatttgcacctgcagccacttgacaagtttcggtgtgttactggatcttagcagaacttcggtgctacccgcccagatgatggccctgaccttcattacttacatcggctgtggactaagcagtattttcctgtccgtgacgttggtgacgtacattgcctttgaaaagatccgacgggattatccttcaaagatcctgattcagttgtgtgcggcgctccttctactcaatctggtattcctcctggattcctggattgctctgtataaaatgcaagggttatgtatttccgtagccgtgttcttgcattatttcctgctggttagcttcacatggatggggctagaagccttccatatgtatctcgccctggttaaagtgttcaacacatacattagaaaatacattttaaaattctgtatcgtaggatggggtgtaccagctgtagttgtgaccatcatcttaactatcagccccgataactacggcttgggatcttacggcaaattccctaatggatccccggacgacttctgctggatcaataacaatgccgtgttttacataaccgttgttggatacttttgcgtcatatttcttctgaatgtttcgatgtttattgtggttctggtgcagctgtgccgaatcaagaaaaaaaaacaactcggagctcagagaaaaacatcaatccaagacctcagaagcattgccggtctgaccttccttctcgggataacttggggattcgcctttttcgcctggggtccagttaacgttactttcatgtacttatttgcgatctttaatacccttcaagggtttttcattttcatcttttactgcgttgccaaagaaaatgtgcgcaagcagtggcggcggtacctgtgctgtggcaagttgcggctggctgagaacagcgactggagcaagaccgctactaacggactcaagaagcagaccgtcaaccagggcgtctcgagctcctccaacagtttacagagctcctcaaactccacaaattctactacactgctggttaataatgattgcagcgtccacgccagcgggaatggaaacgcctccactgagcgtaatggtgtgagcttctcagttcagaacggagatgtctgtttacatgattttacgggcaagcagcacatgttcaacgagaaagaggacagctgcaacggtaaggggcggatggcgttgaggcgcacctccaagcgcggctccctgcattttattgagcagatgtag

SEQ ID NO: 35855 - DNA, 3054 bp, Artificial Sequence
  derived and/or modified sequence
atggtgttttctgtgcggcagtgtggccacgtgggccgcacagaggaggtgctgctgaccttcaagatcttcctggtgatcatctgcctgcacgtggtgctggtgaccagcctggaggaggacacagacaacagcagcctgagccccccaccagccaagctgtctgtggtgtcctttgcccccagcagcaatggcaccccagaggtggagaccaccagcctgaatgatgtgaccctgagcctgctgcccagcaatgaaacagagaagaccaagatcaccatcgtgaagaccttcaatgccagcggcgtgaagccccagaggaacatctgcaacctgagcagcatctgcaatgattctgccttcttccggggggagatcatgttccagtatgacaaggagagcacagtgccccagaaccagcacatcaccaacggcaccctgactggagtgctgagcctgtctgagctgaagaggtctgagctgaacaagaccctgcagaccctgtctgagacctacttcatcatgtgtgccacagctgaggcccagagcaccctgaactgcaccttcaccatcaagctgaacaacaccatgaatgcctgtgctgtgattgctgccctggagcgggtgaagatccggcccatggagcactgctgctgcagcgtgcgcatcccctgccccagcagccctgaggagctggagaagctgcagtgtgacctgcaggaccccatcgtgtgcctggccgaccacccccggggcccccccttcagcagcagccagagcatccctgtggtgccccgggccaccgtgctgagccaggtgcccaaggccaccagctttgctgagcccccagactacagccctgtgacccacaacgtgcccagccccatcggggagatccagcccctgagcccccagcccagcgcccccatcgccagcagccctgccatcgacatgccaccccagagcgagaccatcagcagccccatgccccagacccacgtgtctggcaccccacctcctgtgaaggccagcttcagcagccccaccgtgtctgccccagccaacgtgaacaccaccagcgcccctcctgtgcagacagacatcgtgaacaccagcagcatcagtgacctggagaaccaggtgctgcagatggagaaggccctgagcctgggcagcctggagcccaacctggccggggagatgatcaaccaggtgtcccggctgctgcacagccccccagacatgctggcccccctggcccagaggctgctgaaggtggtggatgacatcggcctgcagctgaacttcagcaacaccaccatcagcctgaccagccccagcctggccctggccgtcatccgggtgaatgccagcagcttcaacaccaccacctttgtggcccaggaccctgccaacctgcaggtgtccctggagacccaggccccagaaaattccatcggcaccatcaccctgcccagcagcctgatgaacaacctgcctgcccatgacatggagctggccagccgggtgcagttcaacttctttgagaccccagccctcttccaggaccccagcctggagaacctgagcctcatctcctatgtgatcagcagctctgtggccaacctgactgtgaggaacctgaccagaaatgtgacagtgaccctgaagcacatcaaccccagccaggatgagctgactgtgcgctgtgtgttctgggacctgggcagaaatggaggccggggcggctggagcgacaatggctgcagcgtgaaggaccggcggctgaatgagaccatctgcacctgcagccacctgaccagctttggagtgctgctggacctgagcaggacctctgtgctgcctgcccagatgatggccctgaccttcatcacctacatcggctgcggcctgagcagcatcttcctgtctgtgaccctggtgacctacatcgcctttgagaagatcagaagagactaccccagcaagatcctgatccagctgtgtgccgccctgctgctgctgaacctggtgttcctgctggacagctggatcgccctgtacaagatgcagggcctgtgcatctctgtggccgtgttcctgcactacttcctgctggtgtccttcacctggatgggcctggaggccttccacatgtacctggccctggtgaaggtgttcaacacctacatcaggaagtacatcctgaagttctgcatcgtgggctggggcgtgcctgctgtggtggtgaccatcatcctgaccatcagcccagacaactacggcctgggcagctatggcaagttccccaacggcagcccagatgacttctgctggatcaacaacaatgctgtgttctacatcaccgtggtgggctacttctgtgtgatcttcctgctgaatgtgtccatgttcatcgtggtgctggtgcagctgtgccgcatcaagaagaagaagcagctgggcgcccagaggaagaccagcatccaggacctgcggagcattgctggcctgaccttcctgctgggcatcacctggggctttgccttctttgcctggggccctgtgaatgtgaccttcatgtacctgtttgccatcttcaacaccctgcagggcttcttcatcttcatcttctactgtgtggccaaggaaaatgtgaggaagcagtggaggcgctacctgtgctgcggcaagctgcggctggctgaaaattctgactggagcaagacagccaccaacggcctgaagaagcagacagtgaaccagggcgtgagcagcagcagcaacagcctgcagagcagcagcaacagcaccaacagcaccaccctgctggtgaacaatgactgcagcgtgcacgccagcggaaatggaaatgccagcacagaaagaaatggagtgtccttctctgtgcagaatggagatgtgtgcctgcatgacttcaccgggaagcagcacatgtttaatgagaaggaggacagctgcaatggaaaaggaaggatggccctgcggaggaccagcaagaggggcagcctgcacttcatcgagcagatgtag

SEQ ID NO: 35856 - DNA, 3054 bp, Artificial Sequence
  derived and/or modified sequence
atggtgttcagcgtgcggcagtgcggccacgtgggccggaccgaggaggtgctcctgacattcaagatttttttagtgatcatttgcctgcacgtggtgctggttacatctttggaagaggacacggataactccagcctgtcaccacccccagccaaattatcagtggtctcttttgcccccagctccaacggcacaccggaggtggagacaacttcattgaacgacgtgacactttcattattgccatcaaatgaaacagagaaaaccaagatcacgatagtgaagaccttcaatgcctctggtgtcaaacctcagcggaatatatgcaacctgtccagtatttgtaatgacagcgctttctttagaggtgaaataatgtttcagtacgacaaggagagcactgtaccccagaaccaacatatcacgaatggcaccctgaccggtgtcctctcactttcagagctgaaacgatccgaattgaacaaaacgttgcagaccctaagcgagacgtatttcattatgtgtgccacagctgaggcccaaagcacattgaattgcacattcaccataaagttaaataataccatgaatgcttgcgctgtgatcgccgctcttgagcgagtgaagatcagacccatggaacactgctgctgctctgtgagaataccctgcccctcctcccctgaggagttggagaaactgcagtgcgacctgcaagatccaattgtgtgtctggcagaccaccccagggggcctccattcagtagtagccaaagcatccctgtcgttccccgagcgacagtcctgtcccaggttccaaaggctaccagcttcgcagaaccaccagactactctccagtgactcacaacgtacccagtcctatcggagagattcaacccttgtcaccccagccttctgccccaattgcctcatccccagccatcgatatgccacctcagagtgagactatcagcagtcctatgccccaaacccacgtgtccgggacgccccccccagtgaaggctagcttctccagcccgacagtaagcgcccccgcaaatgtgaatacgacctccgcccctccagtgcagaccgacattgtgaatacctcttcaatcagcgacctggagaatcaagttctgcaaatggaaaaagctctgtccctgggcagcctggagcccaatctggctggggaaatgatcaatcaggtgtctagactgctgcactcgccacctgacatgttagctcctctggcacaaaggctactaaaggtcgtggacgacatcgggctccagctaaacttttcgaacacaacaatcagcctgacctcacctagcctcgctcttgccgtaatccgagtcaatgcctcctcttttaacacaacaacatttgtcgcccaggatcccgctaatctgcaggtttctctggagacgcaggcaccggagaattcgatcggaacaattacattgccaagctccctgatgaacaatctgcctgcccatgatatggaactggcatctcgggtccagttcaacttcttcgagactcccgctctcttccaggatccctctctcgagaatttaagtcttatcagctatgtgatctcatcttcagttgccaacctgacggtccgtaatcttacgaggaacgtgactgttacgctgaagcacattaacccatctcaggatgagctcacagtacggtgtgttttctgggatctcggccgcaatgggggccgtggcggttggagtgacaacggctgcagcgtaaaggatcgtagactgaacgagaccatatgtacatgttcccacctgacatcgttcggggtcctgctggacctctctcggacttccgtactccccgcgcagatgatggctctgaccttcatcacgtacatcggatgtggcttgagtagcatattcctctcagtgacactcgtgacctacattgcctttgagaaaattcgccgcgattacccgagcaagattctgatacagttgtgcgcagcactcttgctgttaaatcttgtttttctactagatagttggatcgcactttacaagatgcagggtctgtgtatatcagtggcagtgtttctgcactacttcctccttgtgagctttacctggatgggcctggaagcattccatatgtacctcgccttggtgaaggtgttcaatacctacattagaaagtatatccttaaattctgcattgttgggtggggcgttcctgcggtcgtcgtgaccattatcctaactatttcccccgacaattatggtctaggcagttatgggaaatttccgaatggatctccggacgacttctgctggatcaacaacaatgcagttttttatattactgttgttggatacttctgcgtgatctttctacttaacgtatccatgttcatagtcgtgcttgtgcagctctgcagaatcaagaaaaagaaacaactcggagcacagcgtaagacgagtatccaggacctgcgctccatcgcgggactgacttttctgttggggatcacatggggctttgccttctttgcctggggacctgtgaatgtgactttcatgtatttatttgccatctttaacactctccaaggattcttcattttcatcttctactgtgtcgccaaagaaaatgtgagaaagcagtggaggcgctacctatgttgtggaaagctgcgcctggcagaaaattcggactggagcaagactgcaacgaatggactcaagaaacagacggttaatcagggggtctcatccagctcaaactcactccagagctcatcaaacagcacaaatagcactaccctcttggttaataacgattgtagcgtgcacgcaagcggtaacggcaacgcttccacagagaggaacggagtgagcttttcggttcagaacggtgacgtctgcctgcatgattttactggaaaacaacacatgtttaatgagaaggaagactcatgcaacggcaagggtcgaatggcacttaggcggacttcaaaacgcggaagcctgcatttcatagagcagatgtag

SEQ ID NO: 35857 - DNA, 3054 bp, Artificial Sequence
  derived and/or modified sequence
atggtattttctgtccggcaatgtggacatgtgggacggactgaggaagttctcctgaccttcaagatttttctggtgatcatatgcctccatgtggtgctggtaacatccttggaggaggacaccgacaatagcagcctatcacctcctccggctaagctatccgttgtgtccttcgctccatccagcaatgggacgccagaggtagagacgacgtcgctgaatgacgtaacactcagcctgctgccgagcaatgaaacggagaagacaaagattacaattgtcaaaacatttaatgcctcgggagtgaagccccaaaggaatatctgtaatctgtcaagcatttgtaacgacagcgcattcttccgcggtgaaatcatgtttcagtatgataaggaaagcaccgtaccgcagaatcagcacattaccaacggcacacttaccggggttctcagtctctctgaactgaagcgctccgagcttaacaaaacactgcagacgcttagcgagacctattttattatgtgcgccacagccgaggcacagtcaactctgaactgcacctttactatcaagctgaacaacaccatgaatgcatgcgctgttattgcggcactcgagagggtgaagattaggcccatggagcactgctgttgttctgtgcggattccatgcccttcctctcctgaagagctggaaaagcttcagtgcgatctgcaagatcccattgtatgcttggctgatcaccccaggggacctcctttctccagcagtcagtccatccctgtggtgccacgggcaaccgtgctgtcccaggttcccaaggccacatcattcgcagaacctcctgactacagccccgtgactcacaatgtccccagcccaattggcgaaatccaaccactgagtccacagccctcagccccaattgcgagttcccccgctatcgacatgccgccacagtctgagaccatatctagtccgatgccacagacccatgtctctggaacacctccccctgtgaaagcctctttttccagccccactgtctccgcccctgccaatgtcaacaccacaagcgcgcctcctgtccagacagatatagtgaacaccagcagtatttctgatctggaaaatcaggtgctccaaatggagaaagctctgtcccttggctccctggagcccaaccttgctggagaaatgattaaccaggtgtcccgccttctgcattctccacccgatatgttggcccctctcgcccagcgattgcttaaagtcgtggacgacatagggctgcagctgaatttctcaaacaccaccatctctctgacatcccccagcttagctcttgccgtcattagagtgaacgccagcagctttaataccactacatttgtcgctcaagaccctgcaaacctgcaggtgtccctggagacccaggctcccgaaaactcaatcggaacgattacgctcccttcctcactgatgaataatctgccagcacacgacatggaactggcttcgcgagtccagtttaatttctttgaaactcctgccttgtttcaggatccaagtttagagaacttatcccttatttcttacgtgattagttccagcgtcgcaaatctgaccgttcgcaaccttactcgaaacgtcaccgttacactgaaacatatcaatccttctcaagacgagctgacagtgagatgtgtgttctgggatctggggaggaacggcggacgaggcggatggtccgacaatggctgtagcgtgaaagacaggaggcttaacgagacgatctgcacctgctcccacttaacaagttttggtgtattactggatttgtcgaggacctctgtcctccccgcacaaatgatggcactgacgtttataacgtatataggctgcggcctgtcctccatatttctttcagtcaccctggtgacctatatcgctttcgaaaagatcaggagggactatccttcgaagattctcatccagttatgcgctgccctgctcctcctcaacctggtgtttttactggacagttggatcgccctttataagatgcagggtctttgcatctcagtagcagttttcctccactacttcttattggtatccttcacatggatggggctggaagccttccacatgtacctcgccctggtgaaggtctttaatacttacattcggaaatacatcttgaaattctgtattgtgggctggggggtgcccgcagtagtggttacaatcattctgactataagtcccgacaactatggacttgggagctatggcaagtttcctaacggatccccggatgatttttgctggattaacaataacgctgtgttttacataactgttgtaggatacttttgcgtaatatttttgctgaatgtgtccatgttcattgtcgtgctggtacaactctgtaggataaagaaaaaaaagcagctgggagcccagaggaagacatccattcaggatttgcgatcgattgcgggactgacattcctcttgggaatcacctggggctttgctttcttcgcatgggggcctgtaaatgtcacatttatgtatctgtttgcaattttcaataccctgcagggcttttttattttcattttctactgcgtggccaaggagaatgtcaggaaacagtggcgcaggtacctatgttgcggcaaattgaggctcgccgaaaacagcgattggtcaaagactgctactaacggactcaaaaagcaaactgtcaaccagggcgtgtctagctcatccaattcccttcagagcagctcaaatagcacaaactcaacaacattactggtgaacaatgactgcagcgtacatgctagtggcaacgggaatgcttctactgagcgaaatggtgtgagcttttcagtgcaaaatggggatgtctgcttacacgatttcaccggcaagcaacacatgttcaacgaaaaggaggatagctgtaatggcaaagggagaatggctctgcgaagaacgtccaagaggggaagccttcatttcatcgagcaaatgtag

SEQ ID NO: 35858 - DNA, 3054 bp, Artificial Sequence
  derived and/or modified sequence
atggtgttcagcgtgagacagtgcggccacgtgggcagaaccgaggaggtgctgctgaccttcaagatcttcctggtgatcatctgcctgcacgtggtgctggtgaccagcctggaggaggacaccgacaacagcagcctgagccccccccccgccaagctgagcgtggtgagcttcgcccccagcagcaacggcacccccgaggtggagaccaccagcctgaacgacgtgaccctgagcctgctgcccagcaacgagaccgagaagaccaagatcaccatcgtgaagaccttcaacgccagcggcgtgaagccccagagaaacatctgcaacctgagcagcatctgcaacgacagcgccttcttcagaggcgagatcatgttccagtacgacaaggagagcaccgtgccccagaaccagcacatcaccaacggcaccctgaccggcgtgctgagcctgagcgagctgaagagaagcgagctgaacaagaccctgcagaccctgagcgagacctacttcatcatgtgcgccaccgccgaggcccagagcaccctgaactgcaccttcaccatcaagctgaacaacaccatgaacgcctgcgccgtgatcgccgccctggagagagtgaagatcagacccatggagcactgctgctgcagcgtgagaatcccctgccccagcagccccgaggagctggagaagctgcagtgcgacctgcaggaccccatcgtgtgcctggccgaccaccccagaggcccccccttcagcagcagccagagcatccccgtggtgcccagagccaccgtgctgagccaggtgcccaaggccaccagcttcgccgagccccccgactacagccccgtgacccacaacgtgcccagccccatcggcgagatccagcccctgagcccccagcccagcgcccccatcgccagcagccccgccatcgacatgcccccccagagcgagaccatcagcagccccatgccccagacccacgtgagcggcacccccccccccgtgaaggccagcttcagcagccccaccgtgagcgcccccgccaacgtgaacaccaccagcgccccccccgtgcagaccgacatcgtgaacaccagcagcatcagcgacctggagaaccaggtgctgcagatggagaaggccctgagcctgggcagcctggagcccaacctggccggcgagatgatcaaccaggtgagcagactgctgcacagcccccccgacatgctggcccccctggcccagagactgctgaaggtggtggacgacatcggcctgcagctgaacttcagcaacaccaccatcagcctgaccagccccagcctggccctggccgtgatcagagtgaacgccagcagcttcaacaccaccaccttcgtggcccaggaccccgccaacctgcaggtgagcctggagacccaggcccccgagaacagcatcggcaccatcaccctgcccagcagcctgatgaacaacctgcccgcccacgacatggagctggccagcagagtgcagttcaacttcttcgagacccccgccctgttccaggaccccagcctggagaacctgagcctgatcagctacgtgatcagcagcagcgtggccaacctgaccgtgagaaacctgaccagaaacgtgaccgtgaccctgaagcacatcaaccccagccaggacgagctgaccgtgagatgcgtgttctgggacctgggcagaaacggcggcagaggcggctggagcgacaacggctgcagcgtgaaggacagaagactgaacgagaccatctgcacctgcagccacctgaccagcttcggcgtgctgctggacctgagcagaaccagcgtgctgcccgcccagatgatggccctgaccttcatcacctacatcggctgcggcctgagcagcatcttcctgagcgtgaccctggtgacctacatcgccttcgagaagatcagaagagactaccccagcaagatcctgatccagctgtgcgccgccctgctgctgctgaacctggtgttcctgctggacagctggatcgccctgtacaagatgcagggcctgtgcatcagcgtggccgtgttcctgcactacttcctgctggtgagcttcacctggatgggcctggaggccttccacatgtacctggccctggtgaaggtgttcaacacctacatcagaaagtacatcctgaagttctgcatcgtgggctggggcgtgcccgccgtggtggtgaccatcatcctgaccatcagccccgacaactacggcctgggcagctacggcaagttccccaacggcagccccgacgacttctgctggatcaacaacaacgccgtgttctacatcaccgtggtgggctacttctgcgtgatcttcctgctgaacgtgagcatgttcatcgtggtgctggtgcagctgtgcagaatcaagaagaagaagcagctgggcgcccagagaaagaccagcatccaggacctgagaagcatcgccggcctgaccttcctgctgggcatcacctggggcttcgccttcttcgcctggggccccgtgaacgtgaccttcatgtacctgttcgccatcttcaacaccctgcagggcttcttcatcttcatcttctactgcgtggccaaggagaacgtgagaaagcagtggagaagatacctgtgctgcggcaagctgagactggccgagaacagcgactggagcaagaccgccaccaacggcctgaagaagcagaccgtgaaccagggcgtgagcagcagcagcaacagcctgcagagcagcagcaacagcaccaacagcaccaccctgctggtgaacaacgactgcagcgtgcacgccagcggcaacggcaacgccagcaccgagagaaacggcgtgagcttcagcgtgcagaacggcgacgtgtgcctgcacgacttcaccggcaagcagcacatgttcaacgagaaggaggacagctgcaacggcaagggcagaatggccctgagaagaaccagcaagagaggcagcctgcacttcatcgagcagatgtag

SEQ ID NO: 35859 - protein, 1003 aa, Artificial Sequence
  derived and/or modified sequence
MVFSVRQCGHVGRTEEVLLTFKIFLVIICLHVVLVTSLEEDTDNSSLSPPPAKLSVVSFAPSSNGTPEVETTSLNDVTLSLLPSNETGVKPQRNICNLSSICNDSAFFRGEIMFQYDKESTVPQNQHITNGTLTGVLSLSELKRSELNKTLQTLSETYFIMCATAEAQSTLNCTFTIKLNNTMNACAVIAALERVKIRPMEHCCCSVRIPCPSSPEELEKLQCDLQDPIVCLADHPRGPPFSSSQSIPVVPRATVLSQVPKATSFAEPPDYSPVTHNVPSPIGEIQPLSPQPSAPIASSPAIDMPPQSETISSPMPQTHVSGTPPPVKASFSSPTVSAPANVNTTSAPPVQTDIVNTSSISDLENQVLQMEKALSLGSLEPNLAGEMINQVSRLLHSPPDMLAPLAQRLLKVVDDIGLQLNFSNTTISLTSPSLALAVIRVNASSFNTTTFVAQDPANLQVSLETQAPENSIGTITLPSSLMNNLPAHDMELASRVQFNFFETPALFQDPSLENLSLISYVISSSVANLTVRNLTRNVTVTLKHINPSQDELTVRCVFWDLGRNGGRGGWSDNGCSVKDRRLNETICTCSHLTSFGVLLDLSRTSVLPAQMMALTFITYIGCGLSSIFLSVTLVTYIAFEKIRRDYPSKILIQLCAALLLLNLVFLLDSWIALYKMQGLCISVAVFLHYFLLVSFTWMGLEAFHMYLALVKVFNTYIRKYILKFCIVGWGVPAVVVTIILTISPDNYGLGSYGKFPNGSPDDFCWINNNAVFYITVVGYFCVIFLLNVSMFIVVLVQLCRIKKKKQLGAQRKTSIQDLRSIAGLTFLLGITWGFAFFAWGPVNVTFMYLFAIFNTLQGFFIFIFYCVAKENVRKQWRRYLCCGKLRLAENSDWSKTATNGLKKQTVNQGVSSSSNSLQSSSNSTNSTTLLVNNDCSVHASGNGNASTERNGVSFSVQNGDVCLHDFTGKQHMFNEKEDSCNGKGRMALRRTSKRGSLHFIEQM

SEQ ID NO: 35860 - DNA, 3012 bp, Artificial Sequence
  derived and/or modified sequence
atggtattctcagtgaggcagtgcggtcacgtgggtaggacagaagaagttctattgaccttcaagattttcttggtcattatctgtctgcacgtggttctcgtgacatctttggaggaagatactgacaacagcagcttgtcgccccctcctgcgaagcttagcgtggtgtccttcgccccaagcagtaacgggacccccgaggtggaaaccacttcactgaacgacgtcacgctaagtctgctgcctagcaacgagaccggcgtgaagccccagagaaatatatgcaacctttctagtatatgtaatgattcagcatttttccgtggagaaattatgttccagtatgataaggagagcactgttccccagaatcagcatataacaaacggcacgctgactggcgtcctcagcttatccgagctaaaacgtagtgagctaaataaaaccctacaaactttgtcggagacctattttatcatgtgcgccaccgctgaagctcagtccacattgaactgcactttcacgattaagctgaataacactatgaatgcttgtgcagttattgctgctctcgagagagttaagattcgtcctatggagcattgttgctgttctgtccgaatcccatgcccttccagtcccgaagagctcgagaagttacaatgcgacctgcaggacccaatcgtttgcctggcagatcaccctcggggaccacccttttcttcaagtcaatctattccagtggtgcccagagccaccgtgctatcccaggtgcccaaggcaacttccttcgcagaaccaccggattattcacccgtgactcataatgttcccagcccgatcggcgagattcagcccctgtccccgcagccctcggcaccaattgcatcctctccggccatcgatatgcccccccaatctgaaaccatatctagtccaatgccacagacccatgtgtccgggacaccccccccggtcaaggcctctttttcctccccaactgtgagtgccccagccaacgtgaataccacctccgcaccccccgtccagaccgacattgtcaacaccagttctatttcagacctcgagaaccaggttctgcaaatggaaaaagcactcagtctaggttctttggagcccaatctcgcaggggagatgattaaccaggtttctcgacttctgcacagcccacccgatatgctggccccccttgctcagaggctgttgaaagtagtggatgatatcggcctgcagttgaacttctcaaacaccaccatctccctgacatctccctctctcgccttggccgtgattagggttaacgccagttcctttaacacgaccactttcgttgcgcaggatcctgcaaacttgcaggtttccctagaaacacaggcacctgagaattcaatagggacgatcacactcccatcttcacttatgaacaatctgccagctcacgatatggagttggccagtcgagtccagttcaatttctttgaaacgcccgcgctatttcaggacccatcattggaaaacctgagtctgattagctacgtaatatcttcctccgtggccaatctgaccgtgcgcaatctgaccagaaacgtgacagtgaccctcaagcacataaatcccagtcaggacgagttaacggtaagatgtgtcttttgggatcttggccggaacggcgggcggggggggtggtccgataatggatgcagcgtcaaggacaggcgcctgaacgagacaatctgcacctgctcacatctcacgagttttggggttctgctggatctcagcaggacatctgtgctgcctgcccaaatgatggcattaactttcattacctacatcgggtgtggtctgagttctatcttcttatctgtcactctggttacctatatcgcattcgagaaaatacgccgggactacccctccaagatacttatccagctgtgtgccgctttgctgctgctcaatcttgtattcctccttgacagctggatcgctctctataaaatgcaggggctgtgtattagcgttgccgtcttcttgcattatttcctcctagtgtctttcacctggatgggcctcgaagctttccatatgtatcttgccctggttaaggtgttcaatacttacatccggaagtacatactcaaattctgcatcgtaggttggggagtgcctgccgttgtggtgactatcatactaaccattagccctgacaactatggcctggggtcatatggcaagttcccaaatggtagccctgacgatttctgttggattaacaacaatgccgttttctacattaccgtggtcgggtacttctgcgtcatcttcctcttgaatgtgagcatgttcatcgtcgttctggtccagctctgcaggatcaagaagaaaaaacagctgggcgcccagcggaaaactagtatccaggacctgagatccatcgctggcctgactttcctcctcggaataacgtggggattcgccttttttgcgtgggggccggtgaacgtgactttcatgtacctgtttgcaattttcaacacactgcaggggtttttcatattcatcttctactgcgtggctaaagaaaacgtgcggaagcagtggagacggtatctttgctgcggcaagctgagactggccgagaactccgattggagcaaaaccgcaaccaacggactaaaaaaacagaccgtgaaccaaggtgtgagctcatctagtaacagcctgcagagctcatctaatagcaccaattccactacactcttagtcaacaatgactgttctgtgcatgcctccggcaacggcaatgcctccacagagcgcaatggcgtgtccttttccgttcagaacggcgatgtgtgcctgcacgactttactggtaaacagcatatgtttaacgagaaagaggattcatgtaatggaaagggaagaatggcacttagaagaacatctaaacgcggaagtttacattttatcgaacaaatgtag

SEQ ID NO: 35861 - DNA, 3012 bp, Artificial Sequence
  derived and/or modified sequence
atggtgttttctgtgcggcagtgtggccacgtgggccgcacagaggaggtgctgctgaccttcaagatcttcctggtgatcatctgcctgcacgtggtgctggtgaccagcctggaggaggacacagacaacagcagcctgagccccccaccagccaagctgtctgtggtgtcctttgcccccagcagcaatggcaccccagaggtggagaccaccagcctgaatgatgtgaccctgagcctgctgcccagcaatgaaacaggagtgaagccccagaggaacatctgcaacctgagcagcatctgcaatgattctgccttcttccggggggagatcatgttccagtatgacaaggagagcacagtgccccagaaccagcacatcaccaacggcaccctgactggagtgctgagcctgtctgagctgaagaggtctgagctgaacaagaccctgcagaccctgtctgagacctacttcatcatgtgtgccacagctgaggcccagagcaccctgaactgcaccttcaccatcaagctgaacaacaccatgaatgcctgtgctgtgattgctgccctggagcgggtgaagatccggcccatggagcactgctgctgcagcgtgcgcatcccctgccccagcagccctgaggagctggagaagctgcagtgtgacctgcaggaccccatcgtgtgcctggccgaccacccccggggcccccccttcagcagcagccagagcatccctgtggtgccccgggccaccgtgctgagccaggtgcccaaggccaccagctttgctgagcccccagactacagccctgtgacccacaacgtgcccagccccatcggggagatccagcccctgagcccccagcccagcgcccccatcgccagcagccctgccatcgacatgccaccccagagcgagaccatcagcagccccatgccccagacccacgtgtctggcaccccacctcctgtgaaggccagcttcagcagccccaccgtgtctgccccagccaacgtgaacaccaccagcgcccctcctgtgcagacagacatcgtgaacaccagcagcatcagtgacctggagaaccaggtgctgcagatggagaaggccctgagcctgggcagcctggagcccaacctggccggggagatgatcaaccaggtgtcccggctgctgcacagccccccagacatgctggcccccctggcccagaggctgctgaaggtggtggatgacatcggcctgcagctgaacttcagcaacaccaccatcagcctgaccagccccagcctggccctggccgtcatccgggtgaatgccagcagcttcaacaccaccacctttgtggcccaggaccctgccaacctgcaggtgtccctggagacccaggccccagaaaattccatcggcaccatcaccctgcccagcagcctgatgaacaacctgcctgcccatgacatggagctggccagccgggtgcagttcaacttctttgagaccccagccctcttccaggaccccagcctggagaacctgagcctcatctcctatgtgatcagcagctctgtggccaacctgactgtgaggaacctgaccagaaatgtgacagtgaccctgaagcacatcaaccccagccaggatgagctgactgtgcgctgtgtgttctgggacctgggcagaaatggaggccggggcggctggagcgacaatggctgcagcgtgaaggaccggcggctgaatgagaccatctgcacctgcagccacctgaccagctttggagtgctgctggacctgagcaggacctctgtgctgcctgcccagatgatggccctgaccttcatcacctacatcggctgcggcctgagcagcatcttcctgtctgtgaccctggtgacctacatcgcctttgagaagatcagaagagactaccccagcaagatcctgatccagctgtgtgccgccctgctgctgctgaacctggtgttcctgctggacagctggatcgccctgtacaagatgcagggcctgtgcatctctgtggccgtgttcctgcactacttcctgctggtgtccttcacctggatgggcctggaggccttccacatgtacctggccctggtgaaggtgttcaacacctacatcaggaagtacatcctgaagttctgcatcgtgggctggggcgtgcctgctgtggtggtgaccatcatcctgaccatcagcccagacaactacggcctgggcagctatggcaagttccccaacggcagcccagatgacttctgctggatcaacaacaatgctgtgttctacatcaccgtggtgggctacttctgtgtgatcttcctgctgaatgtgtccatgttcatcgtggtgctggtgcagctgtgccgcatcaagaagaagaagcagctgggcgcccagaggaagaccagcatccaggacctgcggagcattgctggcctgaccttcctgctgggcatcacctggggctttgccttctttgcctggggccctgtgaatgtgaccttcatgtacctgtttgccatcttcaacaccctgcagggcttcttcatcttcatcttctactgtgtggccaaggaaaatgtgaggaagcagtggaggcgctacctgtgctgcggcaagctgcggctggctgaaaattctgactggagcaagacagccaccaacggcctgaagaagcagacagtgaaccagggcgtgagcagcagcagcaacagcctgcagagcagcagcaacagcaccaacagcaccaccctgctggtgaacaatgactgcagcgtgcacgccagcggaaatggaaatgccagcacagaaagaaatggagtgtccttctctgtgcagaatggagatgtgtgcctgcatgacttcaccgggaagcagcacatgtttaatgagaaggaggacagctgcaatggaaaaggaaggatggccctgcggaggaccagcaagaggggcagcctgcacttcatcgagcagatgtag

SEQ ID NO: 35862 - DNA, 3012 bp, Artificial Sequence
  derived and/or modified sequence
atggtgttcagcgtgcggcagtgcggccacgtgggccggaccgaggaggttcttctgacttttaagatttttctggtcatcatctgtctacatgtggtactggtgactagccttgaggaagacacagataatagcagtctcagccctccacctgctaagctctctgtcgtttccttcgccccttccagtaacggaacacccgaagtggaaactacgagcttaaacgatgttactttaagcctcctgcctagcaatgagactggcgtgaagccgcagcggaacatctgcaacctgagctccatctgcaatgacagcgcgttctttcggggggagattatgttccagtatgacaaggagtctacggttcctcagaatcagcatattacaaacggaaccctcaccggggttttgtccttaagcgagctcaagagaagcgaactgaataagaccctgcagacgctgtccgaaacttattttatcatgtgcgcaaccgcggaggcccaatctaccctgaactgtaccttcactatcaaattgaacaacaccatgaacgcctgcgccgtcatcgccgccctcgaacgggtgaagatccggcccatggaacactgttgctgctccgtcaggataccctgtccgagttctcccgaggagctggagaagctacagtgtgacctgcaggatccaatcgtgtgtctcgcagaccacccacggggccctccattcagtagcagtcagtctattcctgtcgtgcccagagcaacagtgctgtcgcaggtaccaaaggccacctcctttgcagagcctccagattacagtcccgtcactcataatgttccaagtccgataggggaaatccagccactttcccctcaaccgagcgccccaatcgcttcctcccccgcaatcgacatgccccctcaaagcgagacaatcagcagtcctatgccgcagacacacgtttccggtactcccccgcccgttaaggcgtccttctcctctcctaccgttagcgcacctgccaatgtaaacaccacctctgcaccccccgttcagactgatatcgttaacacttctagcatatctgatctggaaaatcaagtgcttcagatggagaaggctctgagtctaggatctctggagccaaacctcgcaggagaaatgattaatcaggttagcagactactgcattcacccccggatatgctggcccccctcgctcagcgattacttaaggtggtggacgacattggtctccagctgaacttcagcaataccacaatttctctgaccagcccatccctggcccttgctgtaattcgggtgaatgccagctcatttaatactactacctttgttgctcaggatcccgctaatctgcaggtaagtctggagactcaggcccccgaaaacagtattggcaccatcacattacccagctctcttatgaacaatctcccagctcatgacatggagttggcgtcaagagtgcagtttaactttttcgagaccccagccctgtttcaggatccatccttggagaacctgtctttgatttcatacgtaatatcgagctctgtagctaatttgaccgtgcgcaaccttactaggaacgttacggtaacccttaagcacattaacccttcccaggacgaactcactgtccgctgcgtattctgggatctgggtcggaacgggggcagaggcggctggagcgataacggatgtagcgtgaaagatcgccgcttgaacgaaactatttgcacttgcagccacctgacctcttttggcgtgctcctggacttgtcccggacaagcgtgctacccgcccagatgatggctttaacgtttattacttacatcggatgcggattgtcatctatctttctcagtgtcacgctggtgacttacattgcattcgagaaaattaggagagactatccgtctaagattctgattcagttgtgcgccgctctcctcttgctaaatttagtttttcttctggactcctggatcgctctatacaaaatgcagggcctctgcatttccgtcgccgtgttcctccactactttctcctcgtaagcttcacttggatggggctggaggcctttcacatgtatctggccctagtgaaggtttttaatacctacatacgaaagtacattcttaaattctgcatcgtcggctggggtgtaccagccgtggttgtgacaatcatcttgactatttcaccagataactacggtctgggttcctatggaaagttccctaatggctcgccagatgacttttgttggatcaacaataacgccgtgttctatataactgttgttgggtacttttgtgtcatcttcctgctgaacgtgtcaatgttcatcgtcgttctggtgcagctgtgcaggatcaagaaaaagaagcagctgggagcacagagaaagacttctatccaggacttaaggagcatagcaggcctaacctttctgttgggaatcacatggggtttcgcgtttttcgcatggggacccgttaatgtgaccttcatgtacctgttcgcaatcttcaacacacttcaaggcttcttcatttttattttctattgcgtcgcgaaagagaatgtgcggaagcaatggcggagatacctttgctgtggcaagttgcgcctcgctgagaactcagactggtctaaaacagccactaacgggcttaagaagcagaccgtcaatcaaggagtatcctcctccagcaactcgttacagtcctcctccaacagcaccaacagcacgaccctcctcgtcaataatgattgttctgttcatgcgtccggcaatggaaacgcctccaccgaacgcaatggcgtttcgttcagcgttcagaacggcgatgtgtgcctccatgacttcacaggaaagcagcacatgttcaacgagaaagaagactcctgcaatgggaagggcagaatggctcttagacggacttccaaaaggggaagtctacatttcatcgagcaaatgtag

SEQ ID NO: 35863 - DNA, 3012 bp, Artificial Sequence
  derived and/or modified sequence
atggtttttagcgtgcgtcaatgcggccatgtagggcgtacagaagaggtgcttctcaccttcaaaatttttctcgttatcatctgtctgcatgtagtccttgtgacaagtcttgaggaggatacggataattctagcctgtctccgcctcccgctaagctgtcagttgtctcatttgcacccagttcaaacggaactcctgaagtggaaacgactagtctcaacgatgtgacattaagtctcttaccttccaacgagacgggtgttaagccgcagcggaatatctgcaacctgagctctatttgcaatgatagtgccttttttagaggcgagatcatgtttcagtacgataaagaaagcactgtgccccagaatcaacacatcaccaatggcactctgaccggcgtgttgagcctctccgagctcaagagatcagagctcaataaaacccttcagacactctccgaaacgtatttcatcatgtgtgcaactgctgaggcccagagtacgctgaactgtacgtttactatcaaattgaataacaccatgaacgcgtgcgcggtgatcgccgcactggagagggtaaagatccgcccaatggaacattgttgctgctcagtgcgcattccatgtccgtcatccccagaggaacttgagaagttgcagtgcgatttgcaggaccccatcgtttgtctggctgatcacccaagggggcctccctttagttcttcgcagagcatccccgttgtgcccagggcaactgtgctttcccaagtcccgaaagctacatctttcgccgagcccccagattacagccccgtaacgcataatgttccttctccaattggcgaaatccagccattgtccccccaacccagtgccccaattgcatcgtcccccgctatcgacatgcctccacagagcgagaccattagcagtcctatgcctcaaacacatgtgagtggaactccgcctccagtgaaggcgtccttctcttcccccacagtgtccgcccctgccaatgtgaataccactagtgcccctccagtgcaaactgacatcgtgaacaccagctccatctccgatctcgagaatcaagttcttcaaatggaaaaggccctgagcttgggatccctcgagccaaacttagctggtgagatgatcaaccaagtctctagactacttcatagccctccagacatgcttgcgcctcttgctcagcggttactgaaggtggtcgatgacatcggcctgcagttaaactttagcaacaccaccattagtttgaccagtccttcactggccctggctgtaatcagggtcaatgcctcttcttttaataccaccacattcgtggcccaggacccagccaacctgcaggtatccttggaaacccaggccccagaaaacagcataggtactatcactctgcccagctctttgatgaataacttacctgcccatgatatggagctcgccagccgagtgcaatttaatttttttgagacaccagccctgttccaggaccccagcctcgagaatctaagcctgatatcatatgttattagttcttcagtagccaacctcaccgtgcggaacttgaccaggaacgtgacagttacactgaagcacataaatccctcccaggatgaactcaccgtgcgatgtgtgttctgggacctcggacggaacggcggtagagggggatggtctgataacggctgctccgtaaaagaccgacgcttgaacgagaccatctgtacctgcagtcacctgacttccttcggggttcttttagacctgagcaggacaagcgtgctgcccgctcagatgatggctctgaccttcatcacttatatcggttgcggcttgtcttcaatattccttagtgtcactcttgtgacttacatcgcctttgagaagatacgcagagattacccgtctaagattctaattcagttgtgcgccgctttgctcctgttgaacctggtgttcctgctggactcatggatcgccctgtataaaatgcaggggctgtgtatcagtgttgccgtttttctgcactactttctcctagtgtccttcacatggatgggtctggaagccttccacatgtacctggcgctggtcaaagttttcaatacttacatcaggaagtatatccttaaattctgtatcgtggggtggggcgtgcctgctgtcgtggttaccattatcctcactatttcacctgacaattacggtctcggatcctatgggaaatttccaaatggctcgcccgacgacttttgctggatcaataataatgccgtgttttatattactgtggttgggtacttctgcgtgatatttttgcttaacgtgagcatgttcatcgtggtcctggttcagctctgtcgtattaagaagaagaagcaactgggcgcacaacgtaagacatctatccaggatctcaggagcatcgccggtcttacttttctgttgggcataacgtggggtttcgccttctttgcatggggtccagtgaacgttacatttatgtacctttttgcgattttcaataccctccagggctttttcattttcattttttattgtgtggctaaggagaacgttagaaagcagtggagacgatacctgtgttgcggcaaactgaggctggctgagaatagtgattggagtaagaccgctacaaacggcttaaaaaaacaaacagttaaccaaggagtttcctccagcagcaattctctacagagttcctccaactcaactaatagcacgaccctcctagtgaacaatgactgtagtgtccacgcatcaggaaacggcaatgctagcacagagcgcaatggcgtgagcttcagtgtccaaaatggtgacgtgtgccttcatgacttcactggcaaacaacacatgtttaacgagaaagaggacagctgcaatggtaagggcagaatggccctcagacggacctctaagagaggatcactgcatttcatcgagcagatgtag

SEQ ID NO: 35864 - DNA, 3012 bp, Artificial Sequence
  derived and/or modified sequence
atggtgttcagcgtgagacagtgcggccacgtgggcagaaccgaggaggtgctgctgaccttcaagatcttcctggtgatcatctgcctgcacgtggtgctggtgaccagcctggaggaggacaccgacaacagcagcctgagccccccccccgccaagctgagcgtggtgagcttcgcccccagcagcaacggcacccccgaggtggagaccaccagcctgaacgacgtgaccctgagcctgctgcccagcaacgagaccggcgtgaagccccagagaaacatctgcaacctgagcagcatctgcaacgacagcgccttcttcagaggcgagatcatgttccagtacgacaaggagagcaccgtgccccagaaccagcacatcaccaacggcaccctgaccggcgtgctgagcctgagcgagctgaagagaagcgagctgaacaagaccctgcagaccctgagcgagacctacttcatcatgtgcgccaccgccgaggcccagagcaccctgaactgcaccttcaccatcaagctgaacaacaccatgaacgcctgcgccgtgatcgccgccctggagagagtgaagatcagacccatggagcactgctgctgcagcgtgagaatcccctgccccagcagccccgaggagctggagaagctgcagtgcgacctgcaggaccccatcgtgtgcctggccgaccaccccagaggcccccccttcagcagcagccagagcatccccgtggtgcccagagccaccgtgctgagccaggtgcccaaggccaccagcttcgccgagccccccgactacagccccgtgacccacaacgtgcccagccccatcggcgagatccagcccctgagcccccagcccagcgcccccatcgccagcagccccgccatcgacatgcccccccagagcgagaccatcagcagccccatgccccagacccacgtgagcggcacccccccccccgtgaaggccagcttcagcagccccaccgtgagcgcccccgccaacgtgaacaccaccagcgccccccccgtgcagaccgacatcgtgaacaccagcagcatcagcgacctggagaaccaggtgctgcagatggagaaggccctgagcctgggcagcctggagcccaacctggccggcgagatgatcaaccaggtgagcagactgctgcacagcccccccgacatgctggcccccctggcccagagactgctgaaggtggtggacgacatcggcctgcagctgaacttcagcaacaccaccatcagcctgaccagccccagcctggccctggccgtgatcagagtgaacgccagcagcttcaacaccaccaccttcgtggcccaggaccccgccaacctgcaggtgagcctggagacccaggcccccgagaacagcatcggcaccatcaccctgcccagcagcctgatgaacaacctgcccgcccacgacatggagctggccagcagagtgcagttcaacttcttcgagacccccgccctgttccaggaccccagcctggagaacctgagcctgatcagctacgtgatcagcagcagcgtggccaacctgaccgtgagaaacctgaccagaaacgtgaccgtgaccctgaagcacatcaaccccagccaggacgagctgaccgtgagatgcgtgttctgggacctgggcagaaacggcggcagaggcggctggagcgacaacggctgcagcgtgaaggacagaagactgaacgagaccatctgcacctgcagccacctgaccagcttcggcgtgctgctggacctgagcagaaccagcgtgctgcccgcccagatgatggccctgaccttcatcacctacatcggctgcggcctgagcagcatcttcctgagcgtgaccctggtgacctacatcgccttcgagaagatcagaagagactaccccagcaagatcctgatccagctgtgcgccgccctgctgctgctgaacctggtgttcctgctggacagctggatcgccctgtacaagatgcagggcctgtgcatcagcgtggccgtgttcctgcactacttcctgctggtgagcttcacctggatgggcctggaggccttccacatgtacctggccctggtgaaggtgttcaacacctacatcagaaagtacatcctgaagttctgcatcgtgggctggggcgtgcccgccgtggtggtgaccatcatcctgaccatcagccccgacaactacggcctgggcagctacggcaagttccccaacggcagccccgacgacttctgctggatcaacaacaacgccgtgttctacatcaccgtggtgggctacttctgcgtgatcttcctgctgaacgtgagcatgttcatcgtggtgctggtgcagctgtgcagaatcaagaagaagaagcagctgggcgcccagagaaagaccagcatccaggacctgagaagcatcgccggcctgaccttcctgctgggcatcacctggggcttcgccttcttcgcctggggccccgtgaacgtgaccttcatgtacctgttcgccatcttcaacaccctgcagggcttcttcatcttcatcttctactgcgtggccaaggagaacgtgagaaagcagtggagaagatacctgtgctgcggcaagctgagactggccgagaacagcgactggagcaagaccgccaccaacggcctgaagaagcagaccgtgaaccagggcgtgagcagcagcagcaacagcctgcagagcagcagcaacagcaccaacagcaccaccctgctggtgaacaacgactgcagcgtgcacgccagcggcaacggcaacgccagcaccgagagaaacggcgtgagcttcagcgtgcagaacggcgacgtgtgcctgcacgacttcaccggcaagcagcacatgttcaacgagaaggaggacagctgcaacggcaagggcagaatggccctgagaagaaccagcaagagaggcagcctgcacttcatcgagcagatgtag

SEQ ID NO: 35865 - protein, 995 aa, Artificial Sequence
  derived and/or modified sequence
MVFSVRQCGHVGRTEEVLLTFKIFLVIICLHVVLVTSLEEDTDNSSLSPPPAKLSVVSFAPSSNGTPDVTLSLLPSNETGVKPQRNICNLSSICNDSAFFRGEIMFQYDKESTVPQNQHITNGTLTGVLSLSELKRSELNKTLQTLSETYFIMCATAEAQSTLNCTFTIKLNNTMNACAVIAALERVKIRPMEHCCCSVRIPCPSSPEELEKLQCDLQDPIVCLADHPRGPPFSSSQSIPVVPRATVLSQVPKATSFAEPPDYSPVTHNVPSPIGEIQPLSPQPSAPIASSPAIDMPPQSETISSPMPQTHVSGTPPPVKASFSSPTVSAPANVNTTSAPPVQTDIVNTSSISDLENQVLQMEKALSLGSLEPNLAGEMINQVSRLLHSPPDMLAPLAQRLLKVVDDIGLQLNFSNTTISLTSPSLALAVIRVNASSFNTTTFVAQDPANLQVSLETQAPENSIGTITLPSSLMNNLPAHDMELASRVQFNFFETPALFQDPSLENLSLISYVISSSVANLTVRNLTRNVTVTLKHINPSQDELTVRCVFWDLGRNGGRGGWSDNGCSVKDRRLNETICTCSHLTSFGVLLDLSRTSVLPAQMMALTFITYIGCGLSSIFLSVTLVTYIAFEKIRRDYPSKILIQLCAALLLLNLVFLLDSWIALYKMQGLCISVAVFLHYFLLVSFTWMGLEAFHMYLALVKVFNTYIRKYILKFCIVGWGVPAVVVTIILTISPDNYGLGSYGKFPNGSPDDFCWINNNAVFYITVVGYFCVIFLLNVSMFIVVLVQLCRIKKKKQLGAQRKTSIQDLRSIAGLTFLLGITWGFAFFAWGPVNVTFMYLFAIFNTLQGFFIFIFYCVAKENVRKQWRRYLCCGKLRLAENSDWSKTATNGLKKQTVNQGVSSSSNSLQSSSNSTNSTTLLVNNDCSVHASGNGNASTERNGVSFSVQNGDVCLHDFTGKQHMFNEKEDSCNGKGRMALRRTSKRGSLHFIEQM

SEQ ID NO: 35866 - DNA, 2988 bp, Artificial Sequence
  derived and/or modified sequence
atggttttctctgtgcggcagtgcgggcacgtgggacgcacagaggaggttttgctcactttcaaaatattcctcgtaataatttgtctccatgtagtgctcgtcacgtcactggaagaggataccgacaacagcagtctctcccccccgccagcaaaactgagtgtggtgagcttcgccccgagtagcaacggaacccctgacgtgacactatcacttctgccatctaatgagacaggagtgaagccccagcggaacatctgcaacttgtctagcatctgcaacgactcagcattcttcagaggagaaataatgtttcagtatgacaaggagtctaccgtgccacagaatcaacatatcaccaatgggaccttaacaggggtcttaagtctctccgagctcaaaaggtctgagctgaataagactctgcagacgctgtccgagacatacttcattatgtgtgcaactgccgaggcccagtccacgctcaactgtacatttacaataaagctgaacaacacaatgaacgcttgcgccgtgatcgcggccctagaaagagtaaagataaggccaatggaacactgctgttgcagcgtccggatcccctgtccctcatcgccggaagagctggagaagctgcaatgcgacctgcaagacccgattgtgtgcctggcggatcacccacgcggaccaccctttagctccagccagtccattccagtcgtacccagagcaacagttctgtcgcaagtgcctaaggccacaagttttgcagagccccctgattacagccctgtaactcacaatgtgcctagtcctatcggagaaatccagccgctctcccctcaaccatcagctcccatcgccagttctcctgccattgatatgcctccacagtcagaaaccatcagttctcctatgccacagacacatgtttctggcacacccccaccggttaaggccagtttcagctcccccacggttagtgcacccgccaatgtgaacactaccagcgcccctcccgtgcagaccgacattgtgaatacttcctccatctctgatcttgagaatcaagtcctgcagatggaaaaagctctctccctcggaagtcttgagccaaatctggccggtgagatgatcaatcaagtctcacggctgttacatagtccacccgacatgttggctcccttggcccagcgtttactgaaggttgttgacgatattggcttgcagcttaatttttccaataccacaatcagtttaacaagcccaagccttgccctggccgtcattagagttaatgcatcgagttttaacaccactacctttgtcgcccaagatccagccaacctgcaggtatctttggagacccaagctcccgaaaactcgataggtaccataacgctcccgagcagtctgatgaataatctgcctgcccacgacatggagctagcctctagggttcagtttaacttcttcgagactcccgccctgttccaggacccaagtctggagaatctctctctgatctcttacgtgatctcatcctcagttgccaacttgacagtgagaaacctaacccgtaacgtgaccgttactctgaagcacattaatccctcacaggacgagctaacagtgaggtgcgtcttctgggatcttggccgcaacggcggacggggaggctggtcagataatggctgctccgtcaaagatcgtcgactcaacgagacaatttgcacatgttctcaccttacctcgttcggagtgctgctggatcttagtcggaccagtgtgctgcctgcccagatgatggccctgacgtttattacctatatagggtgcggactgtcaagcatatttttgtctgtcactcttgttacctacatcgctttcgagaaaataaggagagattaccccagcaagattctcatccagctgtgcgccgccttgttactcttgaaccttgtcttcctgttggatagctggattgccctgtacaaaatgcagggtctctgcatctccgtggctgtgtttctgcactattttttacttgtttcatttacctggatggggctggaggcatttcatatgtacctcgcactggtcaaagtgtttaacacctatataagaaaatacatcctgaaattctgtatagtgggctggggtgtgcctgcagtggtagttacaatcatactaaccattagccccgataattacggtctagggtcttatggtaaattcccaaacggttcacccgacgacttctgttggatcaacaataatgctgttttttatattactgtcgtcgggtatttttgcgtgatctttcttcttaacgtctccatgttcattgtggtcctcgtccaactctgccgcatcaagaaaaagaagcaactgggggcccagaggaagacttcaatacaggacctgcggagtatcgctgggctaacattcctgctgggaattacttggggattcgcattctttgcatgggggcccgtgaacgttacattcatgtacctgttcgcaattttcaatactctccaaggcttttttattttcatcttttattgtgttgcaaaagaaaatgtgcggaaacagtggagacgctatctgtgctgcgggaaactgcggcttgccgagaattcggattggtctaagactgccacgaatggtctgaagaaacagacagtcaatcaaggggtgtcgtcttcctccaactcactccagagttcaagcaattcaaccaattcaacaaccctgcttgttaataacgattgctcggtccatgcaagcggtaatggaaacgcttccaccgaaaggaatggcgtctctttttcagtgcagaacggagatgtttgcctgcacgatttcacaggaaagcaacatatgttcaacgaaaaggaagactcatgtaacggcaaaggtaggatggccttgaggcgcacatcaaagcggggttcactgcattttatagagcagatgtag

SEQ ID NO: 35867 - DNA, 2988 bp, Artificial Sequence
  derived and/or modified sequence
atggtgttttctgtgcggcagtgtggccacgtgggccgcacagaggaggtgctgctgaccttcaagatcttcctggtgatcatctgcctgcacgtggtgctggtgaccagcctggaggaggacacagacaacagcagcctgagccccccaccagccaagctgtctgtggtgtcctttgcccccagcagcaatggcaccccagatgtgaccctgagcctgctgcccagcaatgaaacaggagtgaagccccagaggaacatctgcaacctgagcagcatctgcaatgattctgccttcttccggggggagatcatgttccagtatgacaaggagagcacagtgccccagaaccagcacatcaccaacggcaccctgactggagtgctgagcctgtctgagctgaagaggtctgagctgaacaagaccctgcagaccctgtctgagacctacttcatcatgtgtgccacagctgaggcccagagcaccctgaactgcaccttcaccatcaagctgaacaacaccatgaatgcctgtgctgtgattgctgccctggagcgggtgaagatccggcccatggagcactgctgctgcagcgtgcgcatcccctgccccagcagccctgaggagctggagaagctgcagtgtgacctgcaggaccccatcgtgtgcctggccgaccacccccggggcccccccttcagcagcagccagagcatccctgtggtgccccgggccaccgtgctgagccaggtgcccaaggccaccagctttgctgagcccccagactacagccctgtgacccacaacgtgcccagccccatcggggagatccagcccctgagcccccagcccagcgcccccatcgccagcagccctgccatcgacatgccaccccagagcgagaccatcagcagccccatgccccagacccacgtgtctggcaccccacctcctgtgaaggccagcttcagcagccccaccgtgtctgccccagccaacgtgaacaccaccagcgcccctcctgtgcagacagacatcgtgaacaccagcagcatcagtgacctggagaaccaggtgctgcagatggagaaggccctgagcctgggcagcctggagcccaacctggccggggagatgatcaaccaggtgtcccggctgctgcacagccccccagacatgctggcccccctggcccagaggctgctgaaggtggtggatgacatcggcctgcagctgaacttcagcaacaccaccatcagcctgaccagccccagcctggccctggccgtcatccgggtgaatgccagcagcttcaacaccaccacctttgtggcccaggaccctgccaacctgcaggtgtccctggagacccaggccccagaaaattccatcggcaccatcaccctgcccagcagcctgatgaacaacctgcctgcccatgacatggagctggccagccgggtgcagttcaacttctttgagaccccagccctcttccaggaccccagcctggagaacctgagcctcatctcctatgtgatcagcagctctgtggccaacctgactgtgaggaacctgaccagaaatgtgacagtgaccctgaagcacatcaaccccagccaggatgagctgactgtgcgctgtgtgttctgggacctgggcagaaatggaggccggggcggctggagcgacaatggctgcagcgtgaaggaccggcggctgaatgagaccatctgcacctgcagccacctgaccagctttggagtgctgctggacctgagcaggacctctgtgctgcctgcccagatgatggccctgaccttcatcacctacatcggctgcggcctgagcagcatcttcctgtctgtgaccctggtgacctacatcgcctttgagaagatcagaagagactaccccagcaagatcctgatccagctgtgtgccgccctgctgctgctgaacctggtgttcctgctggacagctggatcgccctgtacaagatgcagggcctgtgcatctctgtggccgtgttcctgcactacttcctgctggtgtccttcacctggatgggcctggaggccttccacatgtacctggccctggtgaaggtgttcaacacctacatcaggaagtacatcctgaagttctgcatcgtgggctggggcgtgcctgctgtggtggtgaccatcatcctgaccatcagcccagacaactacggcctgggcagctatggcaagttccccaacggcagcccagatgacttctgctggatcaacaacaatgctgtgttctacatcaccgtggtgggctacttctgtgtgatcttcctgctgaatgtgtccatgttcatcgtggtgctggtgcagctgtgccgcatcaagaagaagaagcagctgggcgcccagaggaagaccagcatccaggacctgcggagcattgctggcctgaccttcctgctgggcatcacctggggctttgccttctttgcctggggccctgtgaatgtgaccttcatgtacctgtttgccatcttcaacaccctgcagggcttcttcatcttcatcttctactgtgtggccaaggaaaatgtgaggaagcagtggaggcgctacctgtgctgcggcaagctgcggctggctgaaaattctgactggagcaagacagccaccaacggcctgaagaagcagacagtgaaccagggcgtgagcagcagcagcaacagcctgcagagcagcagcaacagcaccaacagcaccaccctgctggtgaacaatgactgcagcgtgcacgccagcggaaatggaaatgccagcacagaaagaaatggagtgtccttctctgtgcagaatggagatgtgtgcctgcatgacttcaccgggaagcagcacatgtttaatgagaaggaggacagctgcaatggaaaaggaaggatggccctgcggaggaccagcaagaggggcagcctgcacttcatcgagcagatgtag

SEQ ID NO: 35868 - DNA, 2988 bp, Artificial Sequence
  derived and/or modified sequence
atggtgttcagcgtgcggcagtgcggccacgtgggccggaccgaggaggttctcttgacttttaagatttttctggtcatcatctgtctgcacgtcgtcttagtgacctcattggaggaggacactgacaactcgtctcttagtcccccaccagccaaactgtctgttgtttcattcgctccgtcgtcgaatggtacgccggacgtgaccttatcccttcttcccagtaacgaaaccggtgtcaaaccccagcgcaacatctgtaatctgtcttcaatctgtaatgactctgcgttcttccgcggtgaaatcatgtttcaatatgataaggagagcacagtgcctcaaaaccagcacattactaacggtactctgaccggggtcctgtctctctctgagctgaaaaggtccgagctaaataagacattgcagactctgtccgaaacatactttatcatgtgcgctacagcggaggctcagtccacactcaattgtaccttcacaattaagttaaacaatacaatgaatgcctgtgctgtgatagccgcactagagagagtcaagatcaggcccatggagcactgctgttgcagcgtgaggattccttgtccatcgagccccgaggaattggagaagctccagtgcgatctgcaggatcctatcgtctgcctggcggaccacccaagaggccctcctttctcgtcctcccagtccatccctgtcgtgcctcgagctaccgttctctcccaggtaccaaaagctacaagtttcgccgaaccgcctgactactctccagtcacacacaatgttccgagtcccattggagagattcagccactgtccccgcagccctcagcccctattgccagcagccccgctattgatatgccgcctcaatccgagaccatttcctcaccaatgccccaaacccatgtgtcagggaccccacctcctgtcaaggcgtccttcagtagccctacagtgtcggctcccgctaacgtgaacactacatctgcccccccagtacagaccgacattgtcaacacgtcgtctatctccgatctggaaaaccaggtattacagatggagaaggcgcttagcttagggtctttagagcccaatcttgcaggagagatgattaatcaggtcagtcggctcctacactccccaccagacatgctcgcacccctggcccagaggttgctgaaagtcgtggatgatattggcctgcagctcaacttctctaacactactataagtctcacgtccccaagtcttgccttggcggtcattcgggtgaacgcctcaagcttcaatacaactacattcgtagcccaggaccccgcaaacctgcaggtctctcttgagacgcaggcaccagagaattctatcggaactatcacgttgccgtctagtctcatgaacaatcttccagctcatgatatggagctggcttccagagtgcagttcaacttttttgagacccctgccctttttcaagacccttctttagagaacctctccctcatttcttacgtgatttcttcctccgttgccaacctgactgtcagaaatctaactcggaacgtcaccgtgacgttgaaacacattaacccttcccaggacgagctgactgtgaggtgtgtgttctgggacctggggcgtaacggggggagaggcgggtggtctgataatgggtgctccgtgaaggatcggcgtttgaatgaaaccatctgcacctgttcccatttgacatcatttggcgtgctcctggatttgtcgagaacatcggttcttcccgcccagatgatggctctcacctttatcacgtacattggctgtgggttgagctccatctttcttagcgtcactttggtgacctatatcgctttcgagaaaattaggcgcgattatccttctaaaatcctgatccagctttgcgccgccctgctgttgctgaatctggttttcttgcttgattcatggatcgcgctgtataaaatgcaaggtctgtgtataagcgttgctgtctttttgcactactttctcctcgtgtctttcacgtggatgggcttagaggcatttcatatgtacctggctcttgtcaaggtgtttaacacctatatccgtaaatacatccttaaattttgcatagtaggatggggcgtacctgccgtggtcgtgaccatcattttgaccatttcacctgacaactacggcttgggcagttatgggaaatttccaaacggttcgcccgacgatttctgctggatcaacaataatgctgtcttttacatcacggtggttggatacttctgcgtaatctttcttctgaacgtgtccatgtttatcgtggtccttgtgcagctttgtcggatcaagaaaaaaaagcagttgggagctcagcgtaagacaagtatccaggaccttaggtcaatcgcagggctgacttttcttctggggattacgtggggattcgcattcttcgcgtggggaccagtcaatgtgacttttatgtacttattcgccattttcaacaccctgcaagggtttttcattttcatattctactgcgtcgctaaagaaaatgtccgaaaacagtggaggagatatctgtgttgcgggaaactgcggctcgccgagaactccgactggtctaagactgcaacgaacgggctgaaaaaacagacagtgaatcaaggagtgtcaagttcctctaattcattgcagagctcttctaactccacaaattcgacgacccttctggtgaataatgattgtagcgtgcacgccagcggcaacggaaacgcctcgacggaaagaaatggcgtgtccttcagcgtacagaacggcgacgtctgtctgcacgacttcacaggcaaacaacacatgtttaacgagaaggaagattcttgcaacggcaagggtaggatggccctccggagaacaagcaagcggggcagtctgcactttattgaacagatgtag

SEQ ID NO: 35869 - DNA, 2988 bp, Artificial Sequence
  derived and/or modified sequence
atggtgtttagtgtgcgacagtgtggacatgtaggcaggacagaggaggtcctgcttacttttaagatctttttagtcatcatctgcctgcatgtcgtcctagtgacttccttagaggaggacacggacaactcttcactttccccccctccggcaaagttatctgtcgtcagcttcgctccttccagcaatgggaccccagacgtgacgctcagtctgttacccagcaacgaaaccggggtcaaaccacagcggaatatatgcaatctctcttcaatttgtaacgacagtgccttcttcaggggcgagattatgtttcagtatgacaaggagagcaccgtcccgcagaatcagcacattaccaatggcacgctgactggcgtcctttccttaagtgaactgaaacgttcggagcttaacaagactctccagaccctgtctgaaacctatttcattatgtgcgctaccgccgaggcacagagtacgctcaactgtacttttactattaagctgaacaacaccatgaacgcttgcgccgtgatcgcagctctcgaacgtgtgaagatccgacctatggaacattgctgctgcagcgtccgcattccttgtccttcatcacccgaagaattggaaaaactgcaatgcgacctgcaggatccgattgtatgtctggccgaccaccccagaggtccaccattctcttcatctcagtccatccccgtggttccaagagccacagtcctcagccaagtgcccaaggctactagctttgcagaacccccagactatagtccagtgacacacaatgtgccgagccctattggcgagatccaacccctctctcctcaacccagcgccccaattgcgtccagtccagcaatagacatgcccccacagtccgaaaccatttcttcccccatgcctcagactcacgtttccggcaccccgcctccagtgaaagcttccttctcttcaccgacagttagcgcaccagctaacgtgaacaccactagcgcccctcccgtgcagactgatatcgtgaacacgtcatccatctcggacctggaaaatcaggtgctgcagatggagaaggcgctgtccttggggtccctggagcctaatctggcgggtgagatgatcaatcaagtgagtagattactgcacagcccccctgatatgcttgcccctctcgcccaacggctgctgaaggtggttgatgacatcggcctccaactcaattttagtaacacaactataagcctgacaagcccctctcttgcattagccgtaatacgggttaatgcatcttcgttcaacacgacaaccttcgttgctcaggaccctgcaaacttacaagtgtctcttgagacccaggctccagaaaacagtatcgggactatcactctgccgagttcgctgatgaacaacctgccagcccacgatatggagctcgccagcagggttcagttcaatttcttcgagaccccagccctgtttcaggatccaagcctggagaatctcagcctgatttcctacgtcatttcctcatctgtggccaatctcaccgtaaggaatctaacaagaaatgttaccgtgactctgaagcacatcaacccaagccaggacgaattaacagtgcgctgcgtgttctgggaccttggcagaaacggcggtaggggaggctggtctgataacggatgctctgtcaaagacagaagattgaacgaaactatttgcacctgtagccatctgaccagcttcggtgtgctcctggatcttagcaggacatcagtgctcccagcacaaatgatggctcttacttttataacgtatatcgggtgtgggctcagctccatcttcctcagcgtgacactggtaacatacatcgcattcgagaaaatcaggagggactacccttccaagatactgatccaactgtgtgcagcattacttctcctgaacctagtattcttgctggattcatggatagccttatataagatgcagggtctctgcatatccgtggccgtgtttctccactatttcctgctcgtgtccttcacttggatggggttggaggcttttcatatgtacttagcgctggtgaaagtctttaacacgtacattagaaagtacattctcaagttctgcatcgttggctggggtgtacccgctgttgtcgtaacaatcattctcacaatctctccagacaactacggactcggctcgtatggaaagttccccaatggctcccctgatgatttctgctggatcaacaataacgcagttttctatattacagtggtaggatacttttgtgttatttttttgcttaatgtttcgatgttcattgtagtgttagtccagttgtgtcgcatcaaaaagaagaaacagttgggagctcagcgaaaaacatctattcaggaccttcggtcaattgctggtctgacttttttgcttggtattacgtggggctttgccttcttcgcttggggtcctgtcaacgtaaccttcatgtacttgttcgcaatttttaataccctgcagggattcttcatctttatcttttattgtgtagccaaggaaaacgtcagaaaacagtggagaaggtacttgtgttgcggaaaactgaggctggccgagaactcagattggtctaaaacagctacgaacggtctgaaaaaacagaccgtgaatcaaggggtgagctcatcgtcaaattccctgcagtcatccagtaatagtaccaatagcacgacgctgctagtcaataacgattgctccgtacacgcctctggaaacggtaatgcctctacagaacggaacggtgtaagtttttctgttcagaacggggacgtgtgcctgcatgatttcacagggaagcagcacatgtttaatgaaaaggaagacagctgcaacgggaaaggtcgcatggcactccggcgaacctctaagcggggtagcctacactttattgaacagatgtag

SEQ ID NO: 35870 - DNA, 2988 bp, Artificial Sequence
  derived and/or modified sequence
atggtgttcagcgtgagacagtgcggccacgtgggcagaaccgaggaggtgctgctgaccttcaagatcttcctggtgatcatctgcctgcacgtggtgctggtgaccagcctggaggaggacaccgacaacagcagcctgagccccccccccgccaagctgagcgtggtgagcttcgcccccagcagcaacggcacccccgacgtgaccctgagcctgctgcccagcaacgagaccggcgtgaagccccagagaaacatctgcaacctgagcagcatctgcaacgacagcgccttcttcagaggcgagatcatgttccagtacgacaaggagagcaccgtgccccagaaccagcacatcaccaacggcaccctgaccggcgtgctgagcctgagcgagctgaagagaagcgagctgaacaagaccctgcagaccctgagcgagacctacttcatcatgtgcgccaccgccgaggcccagagcaccctgaactgcaccttcaccatcaagctgaacaacaccatgaacgcctgcgccgtgatcgccgccctggagagagtgaagatcagacccatggagcactgctgctgcagcgtgagaatcccctgccccagcagccccgaggagctggagaagctgcagtgcgacctgcaggaccccatcgtgtgcctggccgaccaccccagaggcccccccttcagcagcagccagagcatccccgtggtgcccagagccaccgtgctgagccaggtgcccaaggccaccagcttcgccgagccccccgactacagccccgtgacccacaacgtgcccagccccatcggcgagatccagcccctgagcccccagcccagcgcccccatcgccagcagccccgccatcgacatgcccccccagagcgagaccatcagcagccccatgccccagacccacgtgagcggcacccccccccccgtgaaggccagcttcagcagccccaccgtgagcgcccccgccaacgtgaacaccaccagcgccccccccgtgcagaccgacatcgtgaacaccagcagcatcagcgacctggagaaccaggtgctgcagatggagaaggccctgagcctgggcagcctggagcccaacctggccggcgagatgatcaaccaggtgagcagactgctgcacagcccccccgacatgctggcccccctggcccagagactgctgaaggtggtggacgacatcggcctgcagctgaacttcagcaacaccaccatcagcctgaccagccccagcctggccctggccgtgatcagagtgaacgccagcagcttcaacaccaccaccttcgtggcccaggaccccgccaacctgcaggtgagcctggagacccaggcccccgagaacagcatcggcaccatcaccctgcccagcagcctgatgaacaacctgcccgcccacgacatggagctggccagcagagtgcagttcaacttcttcgagacccccgccctgttccaggaccccagcctggagaacctgagcctgatcagctacgtgatcagcagcagcgtggccaacctgaccgtgagaaacctgaccagaaacgtgaccgtgaccctgaagcacatcaaccccagccaggacgagctgaccgtgagatgcgtgttctgggacctgggcagaaacggcggcagaggcggctggagcgacaacggctgcagcgtgaaggacagaagactgaacgagaccatctgcacctgcagccacctgaccagcttcggcgtgctgctggacctgagcagaaccagcgtgctgcccgcccagatgatggccctgaccttcatcacctacatcggctgcggcctgagcagcatcttcctgagcgtgaccctggtgacctacatcgccttcgagaagatcagaagagactaccccagcaagatcctgatccagctgtgcgccgccctgctgctgctgaacctggtgttcctgctggacagctggatcgccctgtacaagatgcagggcctgtgcatcagcgtggccgtgttcctgcactacttcctgctggtgagcttcacctggatgggcctggaggccttccacatgtacctggccctggtgaaggtgttcaacacctacatcagaaagtacatcctgaagttctgcatcgtgggctggggcgtgcccgccgtggtggtgaccatcatcctgaccatcagccccgacaactacggcctgggcagctacggcaagttccccaacggcagccccgacgacttctgctggatcaacaacaacgccgtgttctacatcaccgtggtgggctacttctgcgtgatcttcctgctgaacgtgagcatgttcatcgtggtgctggtgcagctgtgcagaatcaagaagaagaagcagctgggcgcccagagaaagaccagcatccaggacctgagaagcatcgccggcctgaccttcctgctgggcatcacctggggcttcgccttcttcgcctggggccccgtgaacgtgaccttcatgtacctgttcgccatcttcaacaccctgcagggcttcttcatcttcatcttctactgcgtggccaaggagaacgtgagaaagcagtggagaagatacctgtgctgcggcaagctgagactggccgagaacagcgactggagcaagaccgccaccaacggcctgaagaagcagaccgtgaaccagggcgtgagcagcagcagcaacagcctgcagagcagcagcaacagcaccaacagcaccaccctgctggtgaacaacgactgcagcgtgcacgccagcggcaacggcaacgccagcaccgagagaaacggcgtgagcttcagcgtgcagaacggcgacgtgtgcctgcacgacttcaccggcaagcagcacatgttcaacgagaaggaggacagctgcaacggcaagggcagaatggccctgagaagaaccagcaagagaggcagcctgcacttcatcgagcagatgtag

SEQ ID NO: 35871 - protein, 87 aa, Artificial Sequence
  derived and/or modified sequence
MSQAEFEKAAEEVRHLKTKPSDEEMLFIYGHYKQATVGDINTERPGMLDFTGKAKWDAWNELKGTSKEDAMKAYINKVEELKKKYGI

SEQ ID NO: 35872 - DNA, 264 bp, Artificial Sequence
  derived and/or modified sequence
atgagccaggccgagttcgagaaggccgccgaggaggtgagacacctgaagaccaagcccagcgacgaggagatgctgttcatctacggccactacaagcaggccaccgtgggcgacatcaacaccgagagacccggcatgctggacttcaccggcaaggccaagtgggacgcctggaacgagctgaagggcaccagcaaggaggacgccatgaaggcctacatcaacaaggtggaggagctgaagaagaagtacggcatctag

SEQ ID NO: 35873 - DNA, 627 bp, Artificial Sequence
  derived and/or modified sequence
ggtgctcgcccgagcagggttggggcgagtggaccgcgcctctaaaggcgcttgccagtgcaatctgggcgatcgcttcctggtcctcgcctcctccgctgtctccctggagttcttgcaagtcggccaggatgtctcaggctgagtttgagaaagctgcagaggaggttaggcaccttaagaccaagccatcggatgaggagatgctgttcatctatggccactacaaacaagcaactgtgggcgacataaatacagaacggcccgggatgttggacttcacgggcaaggccaagtgggatgcctggaatgagctgaaagggacttccaaggaagatgccatgaaagcttacatcaacaaagtagaagagctaaagaaaaaatacgggatatgagagactggatttggttactgtgccatgtgtttatcctaaactgagacaatgccttgtttttttctaataccgtggatggtgggaattcgggaaaataaccagttaaaccagctactcaaggctgctcaccatacggctctaacagattaggggctaaaacgattactgactttccttgagtagtttttatctgaaatcaattaaaagtgtatttgttactttaaataacttt

SEQ ID NO: 35874 - DNA, 264 bp, Artificial Sequence
  derived and/or modified sequence
atgagtcaggctgagttcgaaaaagctgccgaggaggtgcggcacctgaagacaaaaccatcggacgaggagatgctattcatatacgggcactacaagcaggcaactgtgggcgatataaatacggagcgcccagggatgttagactttaccggaaaggccaaatgggacgcttggaatgaactcaaaggtacctctaaagaagatgcgatgaaagcgtatataaacaaggtggaagagcttaagaaaaagtacggcatctag

SEQ ID NO: 35875 - DNA, 264 bp, Artificial Sequence
  derived and/or modified sequence
atgagccaggccgagtttgagaaggctgctgaggaggtgcgccacctgaagaccaagcccagtgatgaggagatgctgttcatctacggccactacaagcaggccaccgtgggggacatcaacacagagaggcctggcatgctggacttcaccgggaaggccaagtgggatgcctggaatgagctgaagggcaccagcaaggaggatgccatgaaggcctacatcaacaaggtggaggagctgaagaagaagtatggcatctag

SEQ ID NO: 35876 - DNA, 264 bp, Artificial Sequence
  derived and/or modified sequence
atgagccaggccgagttcgagaaggccgccgaggaggtgcggcacctgaagaccaagccttccgatgaagagatgttattcatttacggccattacaaacaggcgaccgtcggcgacatcaacaccgagaggccaggcatgttagattttacaggcaaggctaaatgggatgcatggaacgagttaaaagggacatcgaaggaagatgcaatgaaagcctatattaacaaggtggaggagctcaagaaaaagtatggaatctag

SEQ ID NO: 35877 - DNA, 264 bp, Artificial Sequence
  derived and/or modified sequence
atgagccaggctgagtttgagaaagccgcagaggaggtcagacatctgaagacaaagccgagcgatgaagaaatgctgtttatctatggccattataaacaggctacggtcggcgacatcaataccgagagacccggaatgctcgatttcaccggcaaggcgaaatgggatgcgtggaatgaattgaaggggacctccaaagaggacgccatgaaagcatacattaacaaggtcgaggaactcaaaaagaaatatgggatttag

SEQ ID NO: 35878 - protein, 88 aa, Artificial Sequence
  derived and/or modified sequence
MPAFAEFEKAAEEVRHLKTKPSDEEMLFIYGHYKQATVGDINTERPGMLDFTGKAKWDAWNELKGTSKEDAMKAYINKVEELKKKYGI

SEQ ID NO: 35879 - DNA, 267 bp, Artificial Sequence
  derived and/or modified sequence
atgcccgccttcgccgagttcgagaaggccgccgaggaggtgagacacctgaagaccaagcccagcgacgaggagatgctgttcatctacggccactacaagcaggccaccgtgggcgacatcaacaccgagagacccggcatgctggacttcaccggcaaggccaagtgggacgcctggaacgagctgaagggcaccagcaaggaggacgccatgaaggcctacatcaacaaggtggaggagctgaagaagaagtacggcatctag

SEQ ID NO: 35880 - DNA, 599 bp, Artificial Sequence
  derived and/or modified sequence
ggaggggaccaacgggctccggcgctgacaccgcggcactcatgccctgtcccctttcagctgtttccagcatactgtgccccgtctgtcctcaggccagggcttcgctgcagccccggccactccctagtgcctggcccggtggtggccaggcagttggccgcgctgcttctcccgcagaggggacccccactgggggcgaaggcttggcctgccctcttcactgctgtatttccagacctgatgcctgcgtttgctgagtttgagaaagctgcagaggaggttaggcaccttaagaccaagccatcggatgaggagatgctgttcatctatggccactacaaacaagcaactgtgggcgacataaatacagaacggcccgggatgttggacttcacgggcaaggccaagtgggatgcctggaatgagctgaaagggacttccaaggaagatgccatgaaagcttacatcaacaaagtagaagagctaaagaaaaaatacgggatatgagagactggatttggttactgtgccatgtgtttatcctaaactgagacaatgccttgtttttttctaataccgtggatggtgggaattcg

SEQ ID NO: 35881 - DNA, 267 bp, Artificial Sequence
  derived and/or modified sequence
atgccagcctttgcagaattcgaaaaggccgccgaggaagtgcgccacctcaaaaccaagccttcagacgaggaaatgctctttatctacgggcactataagcaggccactgtaggcgacatcaatacagagcgccccggcatgcttgactttactggcaaggccaaatgggacgcctggaacgaactgaagggcacatcaaaggaagacgctatgaaagcatacatcaataaagtcgaagagctcaaaaagaaatacggaatatag

SEQ ID NO: 35882 - DNA, 267 bp, Artificial Sequence
  derived and/or modified sequence
atgcctgcctttgctgagtttgagaaggctgctgaggaggtgcgccacctgaagaccaagcccagtgatgaggagatgctgttcatctacggccactacaagcaggccaccgtgggggacatcaacacagagcggcccggcatgctggacttcaccgggaaggccaagtgggatgcctggaatgagctgaagggcaccagcaaagaagatgccatgaaggcctacatcaacaaggtggaggagctgaagaagaagtatggcatctag

SEQ ID NO: 35883 - DNA, 267 bp, Artificial Sequence
  derived and/or modified sequence
atgcccgccttcgccgagttcgagaaggccgccgaggaggtgcggcatctcaagacaaagccgtcagacgaggagatgctgtttatttatggacattataagcaggcaacagtgggagacatcaacacagagcgccctggcatgcttgacttcacaggcaaggccaaatgggatgcgtggaacgagctcaaaggaacctcaaaagaggacgccatgaaggcatacattaacaaagtcgaggaactcaaaaaaaagtatggtatctag

SEQ ID NO: 35884 - DNA, 267 bp, Artificial Sequence
  derived and/or modified sequence
atgcccgcattcgctgaattcgagaaagccgctgaggaggttcgtcatcttaagacaaaaccatctgatgaggaaatgctgtttatctatggtcactacaaacaggcaacagtaggagatattaatactgagcgccctggaatgctggactttacagggaaggccaaatgggacgcctggaacgagctgaaggggaccagcaaagaggatgctatgaaagcgtacattaacaaagtggaggagctgaagaagaagtacggaatctag

SEQ ID NO: 35885 - protein, 747 aa, Artificial Sequence
  derived and/or modified sequence
MTSFQEVPLQTSNFAHVIFQNVAKSYLPNAHLECHYTLTPYIHPHPKDWVGIFKVGWSTARDYYTFLWSPMPEHYVEGSTVNCVLAFQGYYLPNDDGEFYQFCYVTHKGEIRGASTPFQFRASSPVEELLTMEDEGNSDMLVVTTKAGLLELKIEKTMKEKEELLKLIAVLEKETAQLREQVGRMERELNHEKERCDQLQAEQKGLTEVTQSLKMENEEFKKRFSDATSKAHQLEEDIVSVTHKAIEKETELDSLKDKLKKAQHEREQLECQLKTEKDEKELYKVHLKNTEIENTKLMSEVQTLKNLDGNKESVITHFKEEIGRLQLCLAEKENLQRTFLLTTSSKEDTCFLKEQLRKAEEQVQATRQEVVFLAKELSDAVNVRDRTMADLHTARLENEKVKKQLADAVAELKLNAMKKDQDKTDTLEHELRREVEDLKLRLQMAADHYKEKFKECQRLQKQINKLSDQSANNNNVFTKKTGNQQKVNDASVNTDPATSASTVDVKPSPSAAEADFDIVTKGQVCEMTKEIADKTEKYNKCKQLLQDEKAKCNKYADELAKMELKWKEQVKIAENVKLELAEVQDNYKELKRSLENPAERKMEDGADGAFYPDEIQRPPVRVPSWGLEDNVVCSQPARNFSRPDGLEDSEDSKEDENVPTAPDPPSQHLRGHGTGFCFDSSFDVHKKCPLCELMFPPNYDQSKFEEHVESHWKVCPMCSEQFPPDYDQQVFERHVQTHFDQNVLNFD

SEQ ID NO: 35886 - DNA, 2244 bp, Artificial Sequence
  derived and/or modified sequence
atgaccagcttccaggaggtgcccctgcagaccagcaacttcgcccacgtgatcttccagaacgtggccaagagctacctgcccaacgcccacctggagtgccactacaccctgaccccctacatccacccccaccccaaggactgggtgggcatcttcaaggtgggctggagcaccgccagagactactacaccttcctgtggagccccatgcccgagcactacgtggagggcagcaccgtgaactgcgtgctggccttccagggctactacctgcccaacgacgacggcgagttctaccagttctgctacgtgacccacaagggcgagatcagaggcgccagcacccccttccagttcagagccagcagccccgtggaggagctgctgaccatggaggacgagggcaacagcgacatgctggtggtgaccaccaaggccggcctgctggagctgaagatcgagaagaccatgaaggagaaggaggagctgctgaagctgatcgccgtgctggagaaggagaccgcccagctgagagagcaggtgggcagaatggagagagagctgaaccacgagaaggagagatgcgaccagctgcaggccgagcagaagggcctgaccgaggtgacccagagcctgaagatggagaacgaggagttcaagaagagattcagcgacgccaccagcaaggcccaccagctggaggaggacatcgtgagcgtgacccacaaggccatcgagaaggagaccgagctggacagcctgaaggacaagctgaagaaggcccagcacgagagagagcagctggagtgccagctgaagaccgagaaggacgagaaggagctgtacaaggtgcacctgaagaacaccgagatcgagaacaccaagctgatgagcgaggtgcagaccctgaagaacctggacggcaacaaggagagcgtgatcacccacttcaaggaggagatcggcagactgcagctgtgcctggccgagaaggagaacctgcagagaaccttcctgctgaccaccagcagcaaggaggacacctgcttcctgaaggagcagctgagaaaggccgaggagcaggtgcaggccaccagacaggaggtggtgttcctggccaaggagctgagcgacgccgtgaacgtgagagacagaaccatggccgacctgcacaccgccagactggagaacgagaaggtgaagaagcagctggccgacgccgtggccgagctgaagctgaacgccatgaagaaggaccaggacaagaccgacaccctggagcacgagctgagaagagaggtggaggacctgaagctgagactgcagatggccgccgaccactacaaggagaagttcaaggagtgccagagactgcagaagcagatcaacaagctgagcgaccagagcgccaacaacaacaacgtgttcaccaagaagaccggcaaccagcagaaggtgaacgacgccagcgtgaacaccgaccccgccaccagcgccagcaccgtggacgtgaagcccagccccagcgccgccgaggccgacttcgacatcgtgaccaagggccaggtgtgcgagatgaccaaggagatcgccgacaagaccgagaagtacaacaagtgcaagcagctgctgcaggacgagaaggccaagtgcaacaagtacgccgacgagctggccaagatggagctgaagtggaaggagcaggtgaagatcgccgagaacgtgaagctggagctggccgaggtgcaggacaactacaaggagctgaagagaagcctggagaaccccgccgagagaaagatggaggacggcgccgacggcgccttctaccccgacgagatccagagaccccccgtgagagtgcccagctggggcctggaggacaacgtggtgtgcagccagcccgccagaaacttcagcagacccgacggcctggaggacagcgaggacagcaaggaggacgagaacgtgcccaccgcccccgacccccccagccagcacctgagaggccacggcaccggcttctgcttcgacagcagcttcgacgtgcacaagaagtgccccctgtgcgagctgatgttcccccccaactacgaccagagcaagttcgaggagcacgtggagagccactggaaggtgtgccccatgtgcagcgagcagttcccccccgactacgaccagcaggtgttcgagagacacgtgcagacccacttcgaccagaacgtgctgaacttcgactag

SEQ ID NO: 35887 - DNA, 2244 bp, Artificial Sequence
  derived and/or modified sequence
atgacgagtttccaagaagtgcctctgcagacatccaattttgcccacgtcatcttccagaacgtggcaaaaagttacctgcccaacgcccaccttgagtgtcattatacattgactccgtacattcacccacacccgaaggattgggtcgggatcttcaaggtgggctggtccacagcacgcgattattacacattcctttggtcccccatgcctgagcactatgtggaaggaagcaccgttaactgtgtgctggccttccaggggtattacctgcccaacgacgatggggaattctatcagttttgttacgtgacacataaaggcgagataagaggggccagcactccattccagttccgggcttctagcccggtcgaggaattactgaccatggaggacgagggaaattcggatatgctagtggtaaccacgaaggccgggctgcttgaactcaagatcgaaaaaactatgaaagagaaggaagaattgcttaagctgatcgccgtactcgagaaagagactgctcagcttcgcgaacaagtgggtaggatggaacgagaactgaatcatgagaaagagcggtgtgatcagctgcaggccgagcagaaggggctgacggaagtgacccagtccctcaagatggagaatgaggagtttaagaagcgattttctgatgctacgagcaaggcccatcaactggaggaggacatcgtctctgtgactcataaggccatcgagaaggagacggagctggattccctgaaagataagctgaagaaggctcagcacgagagggagcagctcgaatgtcagcttaaaactgaaaaagacgaaaaagaactatataaagtgcacctgaagaatacagagatcgaaaacacaaagttgatgagtgaagttcagactttgaagaatttagacggaaataaggagagtgtgattacgcatttcaaagaagagataggaagactccaactctgcttagctgaaaaagagaatttgcagcggacgtttctcctaacgactagttccaaagaggacacatgcttcttaaaggaacagctccgtaaggcagaagaacaggtccaggcaacacgccaggaggtagtgttcctagccaaagagctatcagacgctgtcaatgtgcgggatcggactatggctgatcttcacacagcaaggctggagaacgagaaggtaaagaagcagttggcagacgcagtagctgaactgaaactgaacgcaatgaagaaggaccaagacaaaaccgacactcttgagcacgagctgaggcgcgaagtggaagacctgaagctgcggttacagatggcggcagatcactataaggaaaaatttaaggaatgccaacgtctacagaagcaaatcaataaactgtccgaccagtccgcaaacaacaataacgtgttcacgaagaaaacagggaaccaacagaaggtaaatgacgctagcgtgaataccgaccctgcgaccagcgcctcaaccgtagatgtgaaaccctccccttccgctgccgaggccgactttgacatcgtcaccaaaggccaggtgtgcgagatgactaaagagatcgccgataagacagaaaagtacaacaagtgcaagcagctgttacaggacgagaaggctaagtgcaataaatacgcagatgaacttgccaagatggagttgaagtggaaggagcaggttaaaatcgccgaaaatgtgaagctggagcttgccgaggtgcaggacaattacaaggaactcaagcgctccctggagaacccagccgaacgtaagatggaggatggggccgatggagccttctaccctgacgagatccagagaccaccagttagagtgccgagttgggggctggaggacaatgtggtgtgcagtcaacccgctcgcaattttagcaggccagatggattagaggactctgaggactcaaaggaagatgaaaacgttcccaccgctccagaccccccatctcagcatctgcgaggccatggaacaggcttctgctttgactcgagcttcgatgtccataagaaatgtcccctgtgcgaactgatgtttccgccaaactatgaccagtcaaaattcgaagagcacgtggagtcacactggaaggtgtgccccatgtgctcagagcagtttcctcctgattatgaccagcaggtgtttgagaggcacgtgcagacccatttcgaccaaaatgtcctgaatttcgactag

SEQ ID NO: 35888 - DNA, 2244 bp, Artificial Sequence
  derived and/or modified sequence
atgacatcattccaggaggtaccactgcaaacctctaatttcgcacatgtcatctttcaaaacgtggcaaagtcctacctgcccaacgctcatctggagtgtcactatacactgaccccctatattcatccgcacccgaaggattgggtcgggatatttaaagtaggctggtctactgctcgagattactatacgttcctgtggtcaccgatgcctgaacattatgtggaaggctcaacagtgaattgtgtcctcgcctttcaaggatactatctgccaaacgatgatggcgaattttatcagttttgttacgtcactcacaagggcgagattcggggcgcgtctacccctttccagttccgagcaagctccccggtagaggagctcctaacaatggaggacgaggggaacagtgacatgctggttgtgaccaccaaggcaggattgttggaacttaagatcgaaaaaactatgaaggagaaggaggagttacttaagctgattgccgtcttggaaaaggaaacagctcagcttcgagagcaggtaggccgcatggagagagagttaaaccatgaaaaagagaggtgtgaccaacttcaagcggagcagaaggggctgacagaagtcacacaaagcttgaagatggaaaacgaggaattcaaaaaaagattttccgatgccacttccaaagcacatcaactggaggaggatatcgtctcggtcacgcacaaagctatcgagaaggaaactgagctggactctctgaaggacaagctcaagaaggcacagcatgaacgcgaacaactggagtgtcagcttaaaaccgagaaagacgagaaagagttatataaagtccacctgaaaaatacagagatcgaaaataccaaactgatgtctgaggtacagacacttaagaaccttgacggaaacaaagaatccgtgatcacgcattttaaggaggaaatcggacggctccagctttgcctggcagagaaggagaatcttcaacgcacgttcctcctgaccacttcctcgaaagaggacacttgctttctgaaggagcagttgagaaaggctgaagaacaggtccaggcaacccgccaggaagtggttttcttggctaaggagctgtctgacgctgtcaacgtccgcgatagaacgatggccgatcttcacacagccagattggaaaacgagaaagtgaagaagcaactcgctgacgccgtggccgaacttaagctaaacgccatgaagaaggatcaggataagactgatacacttgagcatgaactgcggagagaggtggaggacttgaagctacggttacaaatggccgcggatcattacaaagagaaatttaaggaatgtcagaggttgcagaaacagataaacaaactaagcgatcagtcagcaaacaataacaacgtttttactaaaaagactggcaatcagcaaaaggtgaatgatgcgagtgttaacacagaccccgctaccagtgcgagcactgtggatgtgaaaccttctcctagcgctgcagaggccgattttgacatcgtgaccaaaggccaagtctgcgaaatgactaaggaaatcgccgacaagactgaaaagtataataagtgcaaacagctgctgcaggacgaaaaggccaaatgcaataagtatgccgacgagctggcaaagatggaactgaagtggaaagagcaggtgaaaatcgctgagaatgtcaagctggaattagccgaggtgcaagataactataaagaattaaaacgatcgcttgagaacccggccgaacgtaaaatggaagacggcgctgacggggccttctatcccgacgaaattcaaaggccccccgtgagagttcccagctgggggctggaagataatgtggtttgttctcagcccgctaggaatttctctaggccggacggcctggaggattccgaggattctaaggaggatgagaacgtgcccacagccccggacccaccgagccagcatctacgcgggcacgggacagggttctgtttcgattcatccttcgatgtccataaaaaatgtccattgtgtgagctgatgttccccccaaattacgatcagagcaagttcgaggaacatgtcgagtcccattggaaagtgtgcccaatgtgcagtgagcagtttcctcctgactatgatcaacaagtctttgagcgccatgtccagacccatttcgaccagaacgtgctgaatttcgattag

SEQ ID NO: 35889 - DNA, 2244 bp, Artificial Sequence
  derived and/or modified sequence
atgaccagcttccaggaggtgcccctgcagaccagcaactttgcccacgtgatcttccagaatgtggccaagagctacctgcccaatgcccacctggagtgccactacaccctgaccccctacatccacccccaccccaaggactgggtgggcatcttcaaggtgggctggagcacagcccgggactactacaccttcctgtggagccccatgcctgagcactacgtggagggcagcacagtgaactgtgtgctggccttccagggctactacctgcccaatgatgatggagagttctaccagttctgctacgtgacccacaagggggagatccggggggccagcacccccttccagttccgggccagcagccctgtggaggagctgctgaccatggaggatgagggcaacagcgacatgctggtggtgaccaccaaggccggcctgctggagctgaagattgagaagaccatgaaggagaaggaggagctgctgaagctgattgctgtgctggagaaggagacagcccagctgcgggagcaggtgggccgcatggagcgggagctgaaccacgagaaggagcgctgtgaccagctgcaggccgagcagaagggcctgacagaggtgacccagagcctgaagatggagaatgaggagttcaagaagcgcttcagtgatgccaccagcaaggcccaccagctggaggaggacatcgtgtctgtgacccacaaggccatcgagaaggagacagagctggacagcctgaaggacaagctgaagaaggcccagcacgagcgggagcagctggagtgccagctgaagacagagaaggatgagaaggagctgtacaaggtgcacctgaagaacacagaaattgagaacaccaagctgatgtctgaggtgcagaccctgaagaacctggatggcaacaaggagagcgtcatcacccacttcaaggaggagatcggccgcctgcagctgtgcctggccgagaaggagaacctgcagaggaccttcctgctgaccaccagcagcaaagaagacacctgcttcctgaaggagcagctgaggaaggccgaggagcaggtgcaggccacccggcaggaggtggtgttcctggccaaggagctgagtgatgctgtgaatgtgcgggacaggaccatggctgacctgcacacagcccggctggagaatgagaaggtgaagaagcagctggctgatgctgtggccgagctgaagctgaatgccatgaagaaggaccaggacaagacagacaccctggagcacgagctgcggcgggaggtggaggacctgaagctgcggctgcagatggctgctgaccactacaaggagaagttcaaggagtgccagaggctgcagaagcagatcaacaagctgagtgaccagagcgccaacaacaacaacgtgttcaccaagaagacaggcaaccagcagaaggtgaatgatgcctctgtgaacacagatcctgccaccagcgccagcacagtggatgtgaagcccagccccagcgctgctgaggccgactttgacatcgtgaccaagggccaggtgtgtgagatgaccaaggagattgctgacaagacagagaagtacaacaagtgcaagcagctgctgcaggatgagaaggccaagtgcaacaagtatgcagatgagctggccaagatggagctgaagtggaaggagcaggtgaagattgctgaaaatgtgaagctggagctggccgaggtgcaggacaactacaaggagctgaagaggagcctggagaacccagctgagaggaagatggaggatggagcagatggagccttctacccagatgagatccagaggcctcctgtgcgggtgcccagctggggcctggaggacaacgtggtgtgcagccagcctgccaggaacttcagcaggccagatggcctggaggacagcgaggacagcaaggaggatgaaaatgtgcccacagccccagacccccccagccagcacctgcggggccacggcaccggcttctgctttgacagcagctttgatgtgcacaagaagtgccccctgtgtgagctgatgttcccccccaactatgaccagagcaagtttgaggagcacgtggagagccactggaaggtgtgccccatgtgcagcgagcagtttcctccagactatgaccagcaggtgtttgagcggcacgtgcagacccactttgaccagaatgtgctgaactttgattag

SEQ ID NO: 35890 - DNA, 2244 bp, Artificial Sequence
  derived and/or modified sequence
atgaccagcttccaggaggtgcccctgcagaccagcaacttcgcccatgtcatctttcagaacgttgccaagtcgtacttaccaaatgcccatctggagtgccattacacattgacaccgtacatccacccacatccaaaagactgggtaggtatctttaaggtggggtggagcaccgcgagagactactatacattcctctggtctccgatgcccgagcactacgtggagggttcaaccgtcaattgcgtgttagcttttcaaggatactatctacccaatgatgacggggagttttatcagttctgttatgtaactcacaagggcgaaataaggggagcttctaccccattccagttccgggcttcaagcccggttgaagagttgctgaccatggaagatgagggaaattcagatatgcttgtcgtcactacaaaggctggccttctcgaactgaagatagaaaaaaccatgaaagaaaaggaggagttactgaaactgattgcagtgctggagaaagagaccgcacagcttcgcgagcaggtgggtcgcatggagcgtgagctaaaccatgagaaggaaaggtgtgatcagctacaggctgaacagaaaggcctgaccgaggtcactcagtcactaaaaatggagaacgaggaattcaagaaaaggttttccgacgctacaagtaaggcccatcagctggaggaggacattgtcagcgtgacccacaaggccattgagaaggaaaccgaactggactcactgaaagacaaacttaagaaagcccagcacgagagggaacagttagagtgtcagctgaagacagaaaaagatgagaaagaactgtacaaggttcatttgaagaacactgaaattgaaaatacaaaactgatgtccgaagtgcagactttaaagaatctcgatgggaacaaggagagcgtcattacgcattttaaagaggaaatcggacgactgcagttgtgcctggcagagaaggagaacctgcagaggactttccttttgacaacctcgtccaaagaggacacgtgctttctcaaggagcaactccggaaagctgaagagcaggtacaggcgacaagacaggaggtcgttttcctggccaaggaactgtccgacgctgtgaatgtccgcgacagaacaatggcagatcttcacacagcccgtctggagaacgaaaaggttaagaagcaattggcggatgcagtggcagaactcaaactgaatgctatgaagaaggaccaggacaagacagacaccttggagcatgagctgagaagagaagtcgaagatttaaagctgcgccttcagatggccgcagatcactacaaggaaaagtttaaggagtgtcagcggctgcagaaacagatcaataagctttccgatcagtcagccaacaacaataacgtgtttaccaaaaaaaccggcaatcaacaaaaggtgaatgatgcctccgtgaacaccgatcccgcgacttccgcctccaccgtcgatgtgaagccttctccatcagcagctgaagcggatttcgacatcgtaactaagggtcaggtgtgcgaaatgaccaaagagatcgcagacaagaccgaaaagtataataagtgcaagcagctgctgcaggacgagaaggccaaatgtaataagtatgcagacgagctagccaaaatggagctaaaatggaaagagcaggtaaagatcgccgaaaacgtaaaattggagctggctgaggtgcaggataattataaagagcttaaaaggtcccttgagaatcccgcggaaagaaaaatggaagacggagctgatggagctttttaccctgacgagattcaacgaccacccgtgcgagttccgtcatgggggctggaggacaatgtggtgtgtagtcagcctgctcgcaatttttccaggcctgacgggctcgaagactccgaggattctaaggaagatgaaaacgtccctactgcccctgaccccccttcgcagcatttacgtgggcacggcacgggcttctgctttgactcgtcattcgacgtgcacaaaaagtgccctctctgtgagctgatgttcccccctaattatgaccagtctaaatttgaggagcacgtcgagtcccattggaaggtgtgccccatgtgttctgagcagtttcctcctgattacgaccagcaagtatttgagcgccatgtacagactcacttcgatcaaaacgtgcttaacttcgactag

SEQ ID NO: 35891 - DNA, 2244 bp, Artificial Sequence
  derived and/or modified sequence
atgaccagcttccaggaggtgcccctgcagaccagcaacttcgcccatgtgatttttcagaacgtggcaaagagctatctccctaatgcgcaccttgagtgtcattacaccctgacgccctatatccatccacaccccaaggactgggtcggcattttcaaggtgggctggtctacggcgcgagactattataccttcttatggtccccaatgccggagcattatgtggaggggagcactgttaattgtgttcttgcattccaggggtattacctgccaaacgatgatggcgagttttaccaattctgttacgtgactcataagggcgaaattaggggggcatctaccccctttcaattccgggcctccagccccgtcgaggagctgcttaccatggaggatgaaggcaacagcgacatgctagttgtgaccacaaaggccggcttactcgaactcaagattgaaaagactatgaaagagaaagaggaactgctgaagctcatcgccgtcctagagaaagagacggcgcagctacgggaacaggtgggtagaatggagcgagagttgaatcatgaaaaggagagatgcgatcagctacaggctgagcagaaaggcctcactgaggtaacgcagtcactaaagatggaaaacgaggaatttaaaaagcgatttagcgacgccacaagcaaggcccaccagttagaagaggacatagtcagtgttactcataaggctatcgagaaggaaacggagctggacagcctcaaggacaaactgaaaaaagcacaacacgaacgagagcagctggaatgtcagttgaaaaccgaaaaagacgagaaagagctgtataaagtccacctgaaaaacacagaaatcgagaacactaaactgatgagcgaagtgcagaccctgaagaacctggatggcaacaaggaatctgtcattactcatttcaaagaagaaatcgggaggctgcaactatgcctggctgagaaggaaaatcttcagaggactttcttacttacaacttcatcaaaagaggatacatgctttctcaaagaacagctgaggaaagccgaggagcaggtgcaggctactcggcaggaggtggtttttctggccaaggagctatcagacgccgtgaacgttagagaccgcacaatggctgacctccatactgcaaggctggagaatgaaaaggtgaaaaagcaactggcagacgcagttgccgagctcaaacttaacgccatgaagaaggatcaggacaagacggacacacttgagcacgaactgcgccgtgaggttgaggatttgaagctccgactccagatggctgcagaccactacaaagagaaatttaaagaatgccagcggctgcagaaacagattaataaactgagcgatcaatccgctaataataataatgttttcactaagaaaactggcaaccaacagaaggtaaatgatgcgagcgtgaataccgaccccgccacctctgcttcgaccgttgacgtcaagccctctccgtccgccgctgaagccgatttcgatatcgtgaccaagggccaggtgtgcgagatgacgaaagaaattgctgacaagactgagaagtacaataaatgcaaacagctgctgcaggacgagaaagcaaagtgcaacaaatacgccgacgagttagctaaaatggagttaaaatggaaagagcaggtgaagattgccgagaacgtgaagctagaactggccgaagttcaggacaattacaaggagcttaagcggagcttagagaaccccgcagagaggaagatggaagacggggccgacggagccttctatcccgacgaaatacaaaggccacccgtcagggtcccctcttgggggttggaagacaacgtagtgtgctcacaacctgcccggaatttttctcggcctgacggcctagaggacagcgaggatagcaaagaagacgaaaatgtccccacggcccctgatcctccatcacaacatctgagaggacatgggacaggattctgtttcgactcaagcttcgacgtgcacaagaaatgtccgctgtgcgagttgatgttccctcccaactacgatcaatcgaaatttgaggaacacgtagaatcacattggaaagtttgccccatgtgctcggaacagttccccccagattatgaccaacaggtgtttgaacgacacgtgcaaacacattttgatcagaatgtcctgaattttgactag

SEQ ID NO: 35892 - DNA, 2244 bp, Artificial Sequence
  derived and/or modified sequence
atgacctcgtttcaggaagtaccactgcagacctccaactttgctcatgtaatcttccagaatgttgctaagtcgtatcttcccaatgcgcacctggaatgccattataccttgaccccatacattcacccacatcccaaggattgggtgggcatttttaaggtgggttggtctaccgccagggactattatacctttttgtggagccctatgcctgagcattacgtggaagggagcacagtgaactgcgtactggcgttccagggttattacctgccgaacgacgacggcgagttctaccagttctgttatgtcactcacaagggtgagatccgtggcgcttcaaccccctttcaattccgcgcaagctctccagtggaagagctcctgaccatggaagatgagggcaattccgacatgctggttgtgacaactaaggccggactgttggaattaaagatcgagaagacaatgaaggagaaggaagaactactgaagctcatcgccgtgctggagaaggagacagcccagcttagagaacaggtcggacggatggagcgggagctcaaccacgagaaggagaggtgtgatcagctgcaagcagagcaaaagggccttaccgaggtcacacagtccctgaaaatggaaaacgaggagtttaagaagagattcagcgacgctacttctaaggcccaccagctggaggaagatatcgtgtcagtcacacataaggcgatcgaaaaagaaaccgagctcgactctcttaaagataaattgaagaaggcgcagcacgaacgagagcagctcgaatgccagctcaaaaccgaaaaagacgagaaggagttatacaaggtgcacctgaaaaacaccgagattgaaaataccaagctaatgtcagaggtgcagacactaaagaatctggatgggaacaaagaaagcgttattactcactttaaggaagaaataggtagactgcagctgtgcttggcggagaaggagaacctccaaaggacattcctgctgaccacatcttctaaggaggacacttgtttcctgaaagagcagcttcgtaaagcggaagaacaggtgcaggcgaccagacaggaggtggtttttttggcaaaagagcttagcgacgccgtgaatgtaagagaccggactatggcggatctccacacagcacgcctggagaacgagaaggtaaaaaagcagctcgccgacgccgtcgctgaactgaagttgaatgctatgaaaaaagaccaagacaaaaccgatacactggagcatgagcttaggcgtgaggtggaggacctcaagctccgcttacagatggctgcagatcactacaaggaaaagtttaaagagtgccagcgcctgcaaaaacagataaataaactaagcgaccagagcgctaacaacaataacgtgttcactaagaagactggtaaccagcagaaggtgaatgacgcaagcgtcaatacggatcccgctacgagcgcttccaccgttgacgtcaagccaagcccttccgcggctgaagctgattttgatatcgtgactaaggggcaagtctgcgagatgaccaaagaaattgctgacaagaccgagaagtataacaaatgcaaacagttgctccaggacgagaaggctaagtgcaataaatatgccgatgagctggcaaagatggagctcaagtggaaagagcaggtgaaaatagcagagaacgtaaaactggagctagcagaggtgcaggacaattataaggaattgaagcgaagtcttgaaaacccggctgagcggaaaatggaagacggcgcagatggcgctttctaccctgatgaaatccagcgtcctccggtgcgcgttcctagctggggattggaggacaatgttgtatgttctcaacccgcaaggaattttagtcggcctgatggactcgaagattcagaagattccaaggaggacgaaaatgtgccaactgctcccgatccccctagccagcatctgcgaggtcacggtacaggcttctgctttgacagcagctttgacgtgcacaaaaagtgccctttgtgcgaactgatgtttccccctaactatgatcagtcaaaattcgaggagcacgtcgagagccattggaaagtttgtccaatgtgttcagagcaatttcctccagattacgatcagcaggtatttgagaggcacgtccagacccattttgaccaaaacgtgctgaactttgattag

SEQ ID NO: 35893 - DNA, 2244 bp, Artificial Sequence
  derived and/or modified sequence
atgaccagcttccaggaagttcccttgcagacgagcaattttgcccatgtgattttccagaacgtggccaagtcctatctgcccaacgctcacctggagtgccactacaccctgactccttatattcatcctcaccctaaggattgggtgggaatttttaaagtgggctggtcgaccgccagagactattatacttttctctggtccccgatgcccgaacactatgtagaggggtcaactgtcaattgtgtgctggcattccagggttactacctacccaacgatgacggcgaattctaccaattctgttacgtcactcacaaaggagagatcaggggggcttccaccccattccagttcagagcatcttcacccgtagaggaattactgactatggaagatgagggtaatagtgacatgttggtggttacaactaaagccggattgctggaactcaaaatcgagaagaccatgaaggagaaggaggagcttctgaagttgatcgccgttctcgagaaggagactgcccagctccgcgaacaggttggtaggatggagagagagctcaaccacgaaaaagagcggtgcgatcagctgcaggctgagcagaaagggctgacagaggtgactcaatcactcaagatggagaatgaggaattcaagaaacgcttctctgatgctacttctaaggcccaccagctggaggaagatatagtctcagttacccacaaagctatcgagaaggaaaccgagcttgattcgctcaaggataagttaaagaaagcccagcacgaacgcgagcagcttgaatgccaactgaaaaccgagaaggacgagaaggagctgtataaagttcacctgaaaaataccgagatcgagaacactaaactgatgtccgaagttcaaacccttaagaatctagatgggaacaaagagtcagtgatcactcactttaaggaggagattggccgtctccagctgtgtttagccgagaaggaaaatttacagcggacgttcctcctcaccacctctagcaaagaagacacgtgttttctgaaggagcaactgcggaaggctgaggagcaagtccaagcaacacggcaggaggtggtgttcctggctaaggagctgagtgacgccgtgaacgtgcgtgatcgcactatggcagatctgcatactgcgaggctcgagaatgagaaagtgaagaaacaactggccgatgctgttgcagagctgaaactgaacgccatgaagaaagatcaggataagaccgatacactcgagcacgagctgcgaagagaagttgaggatttgaaactgaggttgcagatggcagccgaccactacaaggaaaaatttaaggagtgtcaacgcttgcaaaagcagatcaacaaactgtctgaccagtcagctaacaacaataatgtttttacaaagaaaaccggaaaccagcagaaggtcaatgacgcttcagtgaataccgatccagctacctccgcctccaccgttgatgtcaaaccatctccatcagccgcagaagcagacttcgatatcgttacaaaaggccaggtctgtgagatgacgaaggaaatcgccgataagaccgagaagtataacaagtgcaagcagctgttgcaggatgaaaaagctaagtgtaataaatacgctgacgaactggctaagatggagctgaagtggaaagaacaggtgaagattgctgagaatgtcaaacttgaactggccgaagtgcaggacaactataaggagctaaaaagaagcttagagaaccccgcagagcgcaaaatggaggacggagcagacggcgctttctacccagacgagatccagagacctcctgttagagtcccttcttggggcctggaggacaacgtcgtgtgctcacaacctgctcggaattttagccggccagacggattggaagatagtgaagattccaaggaagacgagaatgtccccaccgctccggatcccccttcacagcatctgagggggcatggaaccgggttctgttttgactcgtcattcgacgttcacaagaaatgtcccttatgtgagcttatgtttccacccaattacgatcagtctaaatttgaggagcacgtcgagtctcactggaaagtgtgcccaatgtgtagcgagcagttcccacctgattatgatcagcaggtgttcgaacgccatgtgcagacccactttgaccaaaatgtcctgaactttgattag

SEQ ID NO: 35894 - DNA, 2478 bp, Artificial Sequence
  derived and/or modified sequence
ggaagagaccgccccgtgggcggaagtgacgcaaggcctactgtcggctgggaggggaggtgtagccggtctttgggggtaggcggtagtggcggaagaggttcggcggctgatggcggatcaggatcggaagcctgcgtaactttctcccttgatccgggagtctttccactggattcacaatgacatcctttcaagaagtcccattgcagacttccaactttgcccatgtcatctttcaaaatgtggccaagagttaccttcctaatgcacacctggaatgtcattacaccttaactccatatattcatccacatccaaaagattgggttggtatattcaaggttggatggagtactgctcgtgattattacacgtttttatggtcccctatgcctgaacattatgtggaaggatcaacagtcaattgtgtactagcattccaaggatattaccttccaaatgatgatggagaattttatcagttctgttacgttacccataagggtgaaattcgtggagcaagtacacctttccagtttcgagcttcttctccagttgaagagctgcttactatggaagatgaaggaaattctgacatgttagtggtgaccacaaaagcaggccttcttgagttgaaaattgagaaaaccatgaaagaaaaagaagaactgttaaagttaattgccgttctggaaaaagaaacagcacaacttcgagaacaagttgggagaatggaaagagaacttaaccatgagaaagaaagatgtgaccaactgcaagcagaacaaaagggtcttactgaagtaacacaaagcttaaaaatggaaaatgaagagtttaagaagaggttcagtgatgctacatccaaagcccatcagcttgaggaagatattgtgtcagtaacacataaagcaattgaaaaagaaaccgaattagacagtttaaaggacaaactcaagaaggcacaacatgaaagagaacaacttgaatgtcagttgaagacagagaaggatgaaaaggaactttataaggtacatttgaagaatacagaaatagaaaataccaagcttatgtcagaggtccagactttaaaaaatttagatgggaacaaagaaagcgtgattactcatttcaaagaagagattggcaggctgcagttatgtttggctgaaaaggaaaatctgcaaagaactttcctgcttacaacctcaagtaaagaagatacttgttttttaaaggagcaacttcgtaaagcagaggaacaggttcaggcaactcggcaagaagttgtctttctggctaaagaactcagtgatgctgtcaacgtacgagacagaacgatggcagacctgcatactgcacgcttggaaaacgagaaagtgaaaaagcagttagctgatgcagtggcagaacttaaactaaatgctatgaaaaaagatcaggacaagactgatacactggaacacgaactaagaagagaagttgaagatctgaaactccgtcttcagatggctgcagaccattataaagaaaaatttaaggaatgccaaaggctccaaaaacaaataaacaaactttcagatcaatcagctaataataataatgtcttcacaaagaaaacggggaatcagcagaaagtgaatgatgcttcagtaaacacagacccagccacttctgcctctactgtagatgtaaagccatcaccttctgcagcagaggcagattttgacatagtaacaaaggggcaagtctgtgaaatgaccaaagaaattgctgacaaaacagaaaagtataataaatgtaaacaactcttgcaggatgagaaagcaaaatgcaataaatatgctgatgaacttgcaaaaatggagctgaaatggaaagaacaagtgaaaattgctgaaaatgtaaaacttgaactagctgaagtacaggacaattataaagaacttaaaaggagtctagaaaatccagcagaaaggaaaatggaagatggagcagatggtgctttttacccagatgaaatacaaaggccacctgtcagagtcccctcttggggactggaagacaatgttgtctgcagccagcctgctcgaaactttagtcggcctgatggcttagaggactctgaggatagcaaagaagatgagaatgtgcctactgctcctgatcctccaagtcaacatttacgtgggcatgggacaggcttttgctttgattccagctttgatgttcacaagaagtgtcccctctgtgagttaatgtttcctcctaactatgatcagagcaaatttgaagaacatgttgaaagtcactggaaggtgtgcccgatgtgcagcgagcagttccctcctgactatgaccagcaggtgtttgaaaggcatgtgcagacccattttgatcagaatgttctaaattttgactagttactttttattatgagttaatatagtttagcagtaaaaaaaaaaaaaaaaa

SEQ ID NO: 35895 - DNA, 2693 bp, Artificial Sequence
  derived and/or modified sequence
acggcaacagaagactatgatgaattcgaatgggacacatttgcttctgtggagttacgattcaaactgaatgtccaatataggaaggcaacatatacaacaagcaaaagtgattttagaaataacagaacgcgggagaaaattcacacacggaaaatgatacggataacaaaagcagattcacaatgacatcctttcaagaagtcccattgcagacttccaactttgcccatgtcatctttcaaaatgtggccaagagttaccttcctaatgcacacctggaatgtcattacaccttaactccatatattcatccacatccaaaagattgggttggtatattcaaggttggatggagtactgctcgtgattattacacgtttttatggtcccctatgcctgaacattatgtggaaggatcaacagtcaattgtgtactagcattccaaggatattaccttccaaatgatgatggagaattttatcagttctgttacgttacccataagggtgaaattcgtggagcaagtacacctttccagtttcgagcttcttctccagttgaagagctgcttactatggaagatgaaggaaattctgacatgttagtggtgaccacaaaagcaggccttcttgagttgaaaattgagaaaaccatgaaagaaaaagaagaactgttaaagttaattgccgttctggaaaaagaaacagcacaacttcgagaacaagttgggagaatggaaagagaacttaaccatgagaaagaaagatgtgaccaactgcaagcagaacaaaagggtcttactgaagtaacacaaagcttaaaaatggaaaatgaagagtttaagaagaggttcagtgatgctacatccaaagcccatcagcttgaggaagatattgtgtcagtaacacataaagcaattgaaaaagaaaccgaattagacagtttaaaggacaaactcaagaaggcacaacatgaaagagaacaacttgaatgtcagttgaagacagagaaggatgaaaaggaactttataaggtacatttgaagaatacagaaatagaaaataccaagcttatgtcagaggtccagactttaaaaaatttagatgggaacaaagaaagcgtgattactcatttcaaagaagagattggcaggctgcagttatgtttggctgaaaaggaaaatctgcaaagaactttcctgcttacaacctcaagtaaagaagatacttgttttttaaaggagcaacttcgtaaagcagaggaacaggttcaggcaactcggcaagaagttgtctttctggctaaagaactcagtgatgctgtcaacgtacgagacagaacgatggcagacctgcatactgcacgcttggaaaacgagaaagtgaaaaagcagttagctgatgcagtggcagaacttaaactaaatgctatgaaaaaagatcaggacaagactgatacactggaacacgaactaagaagagaagttgaagatctgaaactccgtcttcagatggctgcagaccattataaagaaaaatttaaggaatgccaaaggctccaaaaacaaataaacaaactttcagatcaatcagctaataataataatgtcttcacaaagaaaacggggaatcagcagaaagtgaatgatgcttcagtaaacacagacccagccacttctgcctctactgtagatgtaaagccatcaccttctgcagcagaggcagattttgacatagtaacaaaggggcaagtctgtgaaatgaccaaagaaattgctgacaaaacagaaaagtataataaatgtaaacaactcttgcaggatgagaaagcaaaatgcaataaatatgctgatgaacttgcaaaaatggagctgaaatggaaagaacaagtgaaaattgctgaaaatgtaaaacttgaactagctgaagtacaggacaattataaagaacttaaaaggagtctagaaaatccagcagaaaggaaaatggaagatggagcagatggtgctttttacccagatgaaatacaaaggccacctgtcagagtcccctcttggggactggaagacaatgttgtctgcagccagcctgctcgaaactttagtcggcctgatggcttagaggactctgaggatagcaaagaagatgagaatgtgcctactgctcctgatcctccaagtcaacatttacgtgggcatgggacaggcttttgctttgattccagctttgatgttcacaagaagtgtcccctctgtgagttaatgtttcctcctaactatgatcagagcaaatttgaagaacatgttgaaagtcactggaaggtgtgcccgatgtgcagcgagcagttccctcctgactatgaccagcaggtgtttgaaaggcatgtgcagacccattttgatcagaatgttctaaattttgactagttactttttattatgagttaatatagtttagcagtaaaaaaaaaaaaaaaaaccacacctaaaatagaccactgaggagaccatagagcggatgctttcatgcaccctttactgcactttctgaccaggagctactttgagtttggtgttactaggatcagggtcagtctttggcttatcaataaattttaatctctgttaatcttacctgctttaaaaaaaagttcttgtgtgttcgtatctttatttattccctagtttgca

SEQ ID NO: 35896 - protein, 419 aa, Artificial Sequence
  derived and/or modified sequence
MPLSDFILALKDNPYFGAGFGLVGVGTALALARKGVQLGLVAFRRHYMITLEVPARDRSYAWLLSWLTRHSTRTQHLSVETSYLQHESGRISTKFEFVPSPGNHFIWYRGKWIRVERSREMQMIDLQTGTPWESVTFTALGTDRKVFFNILEEARELALQQEEGKTVMYTAVGSEWRPFGYPRRRRPLNSVVLQQGLADRIVRDVQEFIDNPKWYTDRGIPYRRGYLLYGPPGCGKSSFITALAGELEHSICLLSLTDSSLSDDRLNHLLSVAPQQSLVLLEDVDAAFLSRDLAVENPVKYQGLGRLTFSGLLNALDGVASTEARIVFMTTNHVDRLDPALIRPGRVDLKEYVGYCSHWQLTQMFQRFYPGQAPSLAENFAEHVLRATNQISPAQVQGYFMLYKNDPVGAIHNAESLRR

SEQ ID NO: 35897 - protein, 110 aa, Artificial Sequence
  derived and/or modified sequence
MPLSDFILALKDNPYFGAGFGLVGVGTALALARKGVQLGLVAFRRHYMITLEVPARDRSYAWLLSWLTRHSTRTQHLSVETSYLQHESGRISTKFEFVPSPGNHFIWYRG

SEQ ID NO: 35898 - protein, 77 aa, Artificial Sequence
  derived and/or modified sequence
MPLSDFILALKDNPYFGAGFGLVGVGTALALARKGVQLGLVAFRRHYMITLEVPARDRSYAWLLSWLTRHSTRTQHL

SEQ ID NO: 35899 - protein, 206 aa, Artificial Sequence
  derived and/or modified sequence
MPLSDFILALKDNPYFGAGFGLVGVGTALALARKGVQLGLVAFRRHYMITLEVPARDRSYAWLLSWLTRHSTRTQHLSVETSYLQHESGRISTKFEFVPSPGNHFIWYRGKWIRVERSREMQMIDLQTGTPWESVTFTALGTDRKVFFNILEEARELALQQEEGKTVMYTAVGSEWRPFGYPRRRRPLNSVVLQQGLADRIVRDVQ

SEQ ID NO: 35900 - DNA, 1260 bp, Artificial Sequence
  derived and/or modified sequence
atgccactgtcagatttcatcttagcactgaaagataacccttatttcggcgcgggatttgggctcgtcggggtcggcactgctctggccctggcccgcaaaggagtacagctcggccttgtggccttcagacgccattatatgattactttagaggttccagcgcgggacagatcatatgcatggttactttcatggctcactcggcacagtacaaggactcagcatctctccgtggagactagctatctccagcacgagtcaggccgcatctccactaagttcgagtttgtgccatctccgggcaaccattttatctggtacagaggaaagtggattcgggttgagcgatcccgcgagatgcaaatgatagacctgcaaactggaaccccgtgggaaagcgtgacattcactgctcttggcaccgacaggaaggtgtttttcaacattcttgaagaggctcgagagttggctttacagcaggaggaaggcaagaccgtgatgtacaccgcagtgggcagtgaatggcggccatttgggtatccacgacgtagaagaccattgaatagtgtggttctgcaacagggcctggcggaccgtatcgtgagagatgtccaggaattcattgacaatccaaagtggtacactgataggggcattccctatcgcagaggatacctgttgtacggtcctcccgggtgcgggaagtccagcttcatcacagccttggctggagagctggagcattccatctgcctgcttagtctgacagactcaagtttatcagatgaccgactcaatcacctgctgtccgtggccccccagcaatccctggtgcttctggaggacgtggacgccgcgtttcttagcagagatctcgctgttgagaacccggtgaagtaccaggggttaggcaggctgaccttttcaggactgttgaacgccctggatggcgtggcgagcactgaggctcgcatcgtgttcatgacgacaaatcatgtggaccgactagatcccgctttgattcgccccggccgggtggatctgaaggagtacgttggttactgctcccactggcaactcacgcagatgtttcagcgattctaccctggacaagcccccagcctcgcggaaaacttcgctgagcacgtgttacgcgctaccaaccaaatttctcctgctcaggttcaggggtattttatgctgtataaaaacgaccccgttggtgcaattcataatgcagagtccttgcggaggtag

SEQ ID NO: 35901 - DNA, 1260 bp, Artificial Sequence
  derived and/or modified sequence
atgcccctgtctgattttatcctggccctgaaagacaatccttactttggagcaggctttggccttgttggagtggggactgcactggctctggcacgcaaaggcgtgcagctggggctcgtggccttcaggagacactatatgattacgctggaggtacctgcccgggacagatcttatgcctggctgctgagctggctaactcgtcattcgacccgtacccaacacctatctgtggagacctcctatttacaacatgagtccggcagaattagcaccaaattcgaatttgtaccttcacccgggaaccacttcatctggtacaggggaaagtggatcagagtagagcgctcccgcgagatgcagatgattgacctccaaacaggcacaccttgggagtccgtgacgttcactgcgctcggaaccgatcggaaagtcttttttaatatcctggaggaggcaagggagctggcattgcagcaggaagaagggaaaacagtaatgtacaccgcggtgggatctgaatggcgtccattcggttacccacgtaggcggcggccgctgaactccgtcgtactccagcagggactggccgaccgtatcgtccgggatgtgcaggaattcatcgataacccaaagtggtataccgatcggggaattccctataggcgggggtacctactgtatggcccgcctggctgcgggaaaagctctttcattaccgcccttgcgggcgaactggagcactctatctgcctattgtccttgaccgactctagcctctccgatgacagacttaaccacttattgtccgtggcaccccagcagagcctcgtcttactcgaggacgtcgatgcagccttcctgagccgagatctcgcggtggagaatcccgtaaaataccaaggcttgggccgactgacattcagcggactcttgaatgctttggacggtgtcgcgtccacagaggctcggatagttttcatgacaacgaatcatgtggataggctggaccctgctttgatacgcccaggtagggttgatctgaaagagtatgtcggatactgttcacattggcagttgacgcaaatgttccaacgtttctatcccggacaggcaccctccctggccgaaaatttcgctgagcatgtgctcagggctacaaaccagatttcccccgctcaggtgcaaggctatttcatgctgtacaaaaatgatcctgtgggtgccatccataatgccgaatccctcagacgctag

SEQ ID NO: 35902 - DNA, 1260 bp, Artificial Sequence
  derived and/or modified sequence
atgcctttaagtgactttatcctggcccttaaagataatccttacttcggagccggattcggactggttggggtgggaactgctcttgccctggcccgaaagggcgttcagctcggtttggtagcgtttcgcagacactacatgatcacattggaggtgcctgctagagaccgcagctacgcctggctgctcagctggctgacacgccactctactcgcacacaacatctctccgtcgagacatcttatttgcaacacgaatctggcaggatctccacgaaatttgagttcgtcccctcacctgggaaccattttatctggtaccgtggcaagtggattagggttgaacggtctcgagagatgcagatgattgacctgcagaccggcacaccctgggagtctgtgacttttaccgcattgggaactgacaggaaggtttttttcaatatactggaagaggctcgtgagcttgccctccagcaggaggagggtaagacagttatgtacaccgcggtgggaagcgagtggcggcccttcggatatccgagaaggagaaggccactgaacagcgtggtgctgcagcaaggactggccgaccgcatcgtgcgggatgtgcaggagttcattgataatccaaaatggtatacagacagaggaatcccttataggcgcggctatctactgtacggcccacccgggtgcggtaagagcagtttcattaccgccttggctggagagctggagcacagtatatgcctcctttcactgacagactcctccctgtctgacgacaggctgaaccatcttttatcagttgccccgcaacaaagtctggtgctgctggaagatgtcgatgccgcctttttatccagggatctggccgtcgaaaacccggtaaagtatcagggattgggccggttgacatttagtggactgcttaatgcacttgacggagttgcctctacagaggcccgcatcgtatttatgaccacaaaccacgttgatcgtttggacccggcgctgattaggccaggtcgcgtcgacctgaaggaatatgttggctactgctcacactggcaactcactcagatgtttcagagattctatcccgggcaggccccgtccctggctgagaacttcgccgagcacgtgctgcgcgctaccaaccaaatttccccggcccaggttcagggctacttcatgctgtacaaaaatgaccccgttggcgctatccacaatgcagagtcactgcgcaggtag

SEQ ID NO: 35903 - DNA, 1260 bp, Artificial Sequence
  derived and/or modified sequence
atgccactgagtgattttatcctcgccctaaaagataatccatacttcggcgccggctttggacttgtcggcgtgggcacagctctggccctggcgcgtaaaggggtgcagctcggacttgtggcttttcgtcgccattatatgattacactagaggtgccggccagggataggagctatgcttggctcctgtcctggcttactcggcactcaacccggacacagcatctttctgtggaaacttcctacttgcagcatgaaagcggaaggatctctacaaagttcgaattcgtgccttcccctgggaatcatttcatttggtaccgcgggaagtggatccgggtggagagaagtcgggagatgcagatgatcgacctgcaaacgggcaccccttgggagtcagtaacattcacagcattgggcacggatcgcaaagtgttcttcaatattctggaagaggccagagaactcgccctgcagcaggaggaggggaaaacggtcatgtacaccgccgtgggctctgagtggaggccatttggttatcctaggcgtaggcggcccctgaatagcgtggtcctgcaacagggccttgccgatcggatcgtgagagatgttcaggaatttatcgacaaccccaagtggtacaccgatagagggattccatacagacgcggttacctgctctatgggccccctggatgcggcaaatctagcttcatcactgctcttgcaggagagctcgagcacagtatctgcctgctgtctttgacagacagttcactgtcagatgatcgcctgaatcatttacttagcgtggcaccacagcagtcgctggtgctactcgaggatgtggacgccgcctttctctctcgtgatcttgctgtggaaaatccagttaagtaccagggcctcgggaggctgaccttcagcggtctgcttaatgccctggatggcgtcgcctcaacagaggctcgtattgtgtttatgactactaaccacgtggacagacttgatccggcgctaattaggcctggccgcgtggatctcaaggaatacgtgggatactgcagtcattggcagcttacacagatgttccaacgattttacccgggacaagcaccttctctggcagaaaacttcgcggaacacgtgttgagggctaccaaccagatttctcctgcacaggtccaaggctacttcatgctatacaaaaacgatcccgttggagctatacacaatgcagaatcactaaggagatag

SEQ ID NO: 35904 - DNA, 1260 bp, Artificial Sequence
  derived and/or modified sequence
atgcctctctcagacttcattctcgcactgaaggacaacccctactttggtgcaggcttcgggttagtgggggtggggaccgcccttgctcttgcgagaaagggggttcaactgggtctagttgcgtttcgtcgccactacatgataactctcgaagtcccagcccgagatcggtcttatgcctggctgctttcctggctcacccggcacagcacaagaacccagcacctgtcagtggagaccagctacttgcagcacgagagtgggcgtatcagcacaaagttcgaatttgtgccttcccccggtaaccatttcatctggtataggggtaagtggatccgggttgagcgcagtcgtgagatgcagatgattgacctgcagaccgggaccccctgggaatctgtcacctttaccgccctgggcactgatcggaaggtgttctttaacatcttagaagaggccagagaactggctctccagcaagaagaagggaagacagtgatgtacaccgctgtgggttctgagtggcgcccgtttgggtatcccagaagacgccgacccctgaatagcgtggttctccagcagggcttagcagacagaatcgtgagggatgtgcaggagttcatcgataacccgaagtggtacactgaccgtggcattccctatcgcaggggctaccttttatatgggccacctgggtgtggtaaaagttcattcatcactgcactggccggagaactggagcacagcatttgcctgctgtccctgacagattcatcactatccgatgacagactcaatcatctgctgagtgtggctcctcagcagagcctggtgttgctggaagacgtcgacgcggctttcctgtccagagatctagctgtggagaatccagtgaaataccagggactggggcggctcacctttagtgggttgctcaatgccctcgatggggtggcgtcgaccgaggccaggatcgtattcatgacaactaaccacgttgacaggttagacccggccctcatacgacccggccgcgtcgacctgaaggaatacgttggatactgtagtcactggcagttgacacagatgttccagcggttctatcccggccaggccccctcgctggctgagaacttcgctgaacatgtacttcgggcaacgaatcagatctctccagcccaggtgcagggttatttcatgctgtataaaaacgatccagtgggcgctatacacaatgcagagagtctgaggcgctag

SEQ ID NO: 35905 - DNA, 333 bp, Artificial Sequence
  derived and/or modified sequence
atgcccttatccgattttatcctggcacttaaagacaacccctacttcggagcggggttcgggctggtgggggttggcacagctttggctcttgcaaggaagggggtgcagcttggactcgtagcatttaggcgacattatatgatcacactggaggtccctgcacgggacagaagctatgcttggctgctttcatggttgacaaggcatagcacccgcacacaacaccttagcgtggaaacaagctacttacagcacgagagtgggagaatttctactaaattcgagttcgttccgtcccctgggaaccactttatatggtataggggatag

SEQ ID NO: 35906 - DNA, 234 bp, Artificial Sequence
  derived and/or modified sequence
atgccgctgtctgactttatactagctctgaaggacaatccctatttcggcgcgggctttggcctcgtgggcgttggaaccgccctcgcactggctagaaagggtgtccaacttggtctcgttgcatttcgaagacattatatgatcacgctcgaagttccagcacgcgacaggagttacgcctggctgcttagctggttaactaggcacagtacgaggacccaacacttatag

SEQ ID NO: 35907 - DNA, 621 bp, Artificial Sequence
  derived and/or modified sequence
atgccactgagcgacttcatcctggccctgaaggacaacccttacttcggagctggcttcggcctggtgggagtggggaccgccctggccctggcacgcaaaggagtgcaactggggctcgttgcatttaggaggcactatatgataaccctggaggtcccagcaagagacaggagctacgcttggctcctctcatggcttactcgccactcaaccaggacgcagcacctgagcgtcgaaacaagctatctgcagcacgaatcaggcaggatttccaccaaattcgagttcgtgccctcccctggcaaccactttatttggtatcgcggcaaatggatcagggtggaaagaagtcgcgagatgcagatgatagacctgcagaccggtaccccttgggagtcagtgacctttacagctctaggcacagataggaaggttttctttaatattctcgaagaggcgagggaactggcattgcaacaagaggaaggtaaaaccgtcatgtacactgctgtggggagcgaatggagacccttcggctatccgagacgtcgtaggcctctcaacagcgtggtgctacagcagggtctggctgaccgaatcgtgagagacgttcagtag

SEQ ID NO: 35908 - DNA, 1260 bp, Artificial Sequence
  derived and/or modified sequence
atgcctctgtccgactttattctggcactgaaagataatccctacttcggggcaggattcgggctcgtgggagtggggactgcgctggccctggctcgaaaaggcgtacagctgggactggttgctttcaggagacactatatgatcaccttagaggtgcctgctcgtgaccgcagctatgcttggctcctaagttggctgacccggcactcaactcggacgcagcacctttcagtagagacatcatacttacagcacgagagtggccgcataagcaccaagtttgaattcgttccctcccctgggaaccacttcatctggtaccgggggaaatggataagagttgagcgatctcgggagatgcagatgatcgatctccagacaggtactccttgggaatctgtaacctttactgctttagggacagatagaaaagtgtttttcaacatcctcgaagaggctcgagagctggccctgcagcaagaggagggcaaaactgtgatgtacacagccgttggcagcgagtggagacccttcggctatccacgtagacggcggcctctgaactctgtggtgctgcagcaagggctcgcagatagaatcgtgcgcgatgtgcaggagtttatcgataacccaaaatggtataccgatcggggcatcccatatcggaggggatacttgctgtacggcccaccgggatgcggtaagagtagctttattacagccctggccggagaactggagcatagcatctgcctcttatcccttacagattcctctctgtctgatgacagactgaatcacctgctcagtgtggcaccccaacagtcgttagttcttctagaggacgtcgacgctgctttcttatcaagagatctggccgttgaaaatcctgtgaaatatcaggggttgggcagactaaccttttcaggactgttgaatgccctggatggcgtcgcgagcactgaggcccgaattgtgtttatgacaacgaatcacgtcgacagactagaccccgccctgatacgacccggccgcgtcgacctgaaggaatatgtgggatactgttcccattggcaattgacacagatgttccagcgtttctatccaggacaggctcctagcttagcggagaatttcgctgaacacgtcctccgcgccacgaaccagatttcccccgcacaagtgcaaggctacttcatgctgtacaagaacgacccagttggagccatccataacgctgagagtctccgcaggtag

SEQ ID NO: 35909 - DNA, 1260 bp, Artificial Sequence
  derived and/or modified sequence
atgcccctgtctgatttcatcctggccctcaaagataatccttacttcggcgccggtttcggacttgtgggcgttgggactgctttggccctggctcgaaagggtgtgcagttgggactcgtggctttccggcgacactatatgatcactctcgaggtgcccgccagggacagatcctacgcctggcttctgtcatggctcacccggcatagtactaggacacagcatctatcagtcgagacttcatacctccaacatgaatctggaaggatctcaaccaagttcgaatttgtaccatcaccagggaaccattttatttggtaccgggggaagtggatcagagtagagaggagtcgcgaaatgcagatgattgacttgcagacaggtaccccatgggagtccgtcaccttcaccgcactcggtactgataggaaagtattctttaatatcttggaggaagctcgggagctagcccttcaacaagaggaaggaaagacagtgatgtatacagctgttggcagcgagtggcggccattcgggtacccacgacgcaggcgccctcttaattccgtcgtgctgcagcagggcttagcagaccgcatagtgagggacgttcaggaatttatcgacaaccccaaatggtatactgatcgtggaattccttatcgaagaggctatttgctctacgggcctccaggctgtggtaagtcctctttcattaccgcactggcaggtgaactggagcactcaatttgcctgctttccctgaccgactcttccctctcagatgacaggctgaatcacctgctgtccgtcgctccacaacaaagcctggtactgctcgaggatgttgacgcagctttcctgtcacgagaccttgctgtggaaaacccagttaaatatcagggattgggcaggctgaccttttcagggctcctgaatgctctggacggagttgcaagtacggaagcccggattgtgttcatgacgactaaccatgtggatagactcgaccctgctctgatccgcccgggcagagtggacttaaaggaatatgtgggctactgcagccactggcagcttacccagatgttccagcggttttatccaggccaggcacccagtctcgctgaaaatttcgccgagcacgtgctgcgggcaactaatcagatctctcccgcacaggttcagggttacttcatgctttacaagaacgatcctgtaggggcgattcataacgctgagtctttacggcggtag

SEQ ID NO: 35910 - DNA, 621 bp, Artificial Sequence
  derived and/or modified sequence
atgccactgtccgactttattctggctctgaaagataatccttattttggcgcaggcttcggcctcgtcggcgtggggacagccctagccctggcccgcaaaggcgtccaactggggctcgtcgccttccgaaggcattacatgataacacttgaggttccagccagagatagatcttacgcctggctgctgtcttggctgacccgccactctacgagaacccagcatttatcggtggagacaagctacctgcagcatgaatctggacgcatttctactaagttcgagttcgtaccatctcctgggaaccattttatttggtatcgcggcaagtggatccgtgtggagcgctctagggaaatgcagatgatagatctccagaccggcacaccctgggagtccgtgacttttaccgctcttgggactgaccggaaggtgtttttcaacattctggaggaggcgagagaactggctctgcagcaggaggagggcaaaacggtgatgtataccgcagttggcagcgaatggcgaccattcggctaccctaggagaaggcggccattaaatagcgtcgtcttacagcaaggcctggccgaccgcatcgtgagggacgtacagtag

SEQ ID NO: 35911 - DNA, 1260 bp, Artificial Sequence
  derived and/or modified sequence
atgcccctgagtgacttcatcctggccctgaaggacaacccctactttggagctggcttcggcctggtgggcgtgggcacagccctggccctggccaggaagggcgtgcagctgggcctggtggccttccgccgccactacatgatcaccctggaggtgcctgcccgggacaggagctatgcctggctgctgtcctggctgaccaggcacagcaccaggacccagcacctgtctgtggagaccagctacctgcagcacgagagcggccgcatcagcaccaagtttgaatttgtgcccagccctggcaaccacttcatctggtaccggggcaagtggatccgggtggagaggagccgggagatgcagatgattgacctgcagacaggcaccccctgggagagcgtgaccttcaccgccctgggcacagacaggaaggtgttcttcaacatcctggaggaggcccgggagctggccctgcagcaggaggagggcaagacagtgatgtacacagctgtgggcagcgagtggaggcccttcggctaccccaggagaagaagacccctgaacagcgtggtgctgcagcagggcctggccgacagaattgtgagagatgtgcaggagttcatcgacaaccccaagtggtacacagaccggggcatcccctacagaagaggctacctgctgtatggccccccaggctgtgggaagagcagcttcatcacagccctggccggggagctggagcacagcatctgcctgctgagcctgacagacagcagcctgagtgatgaccggctgaaccacctgctgtctgtggccccccagcagagcctggtgctgctggaggatgtggatgctgccttcctgagccgggacctggccgtggagaaccctgtgaagtaccagggcctgggccgcctgaccttcagcggcctgctgaatgccctggatggagtggccagcacagaggcccgcatcgtgttcatgaccaccaaccacgtggaccggctggaccctgccctgatccggcccggccgggtggacctgaaggagtatgtgggctactgcagccactggcagctgacccagatgttccagcgcttctacccaggccaggcccccagcctggccgagaactttgctgagcacgtgctgcgggccaccaaccagatcagccctgcccaggtgcagggctacttcatgctgtacaagaatgaccctgtgggcgccatccacaatgctgagagcctgcggaggtag

SEQ ID NO: 35912 - DNA, 333 bp, Artificial Sequence
  derived and/or modified sequence
atgcccctgagtgacttcatcctggccctgaaggacaacccctactttggagctggcttcggcctggtgggcgtgggcacagccctggccctggccaggaagggcgtgcagctgggcctggtggccttccgccgccactacatgatcaccctggaggtgcctgcccgggacaggagctatgcctggctgctgtcctggctgaccaggcacagcaccaggacccagcacctgtctgtggagaccagctacctgcagcacgagagcggccgcatcagcaccaagtttgaatttgtgcccagccctggcaaccacttcatctggtaccggggctag

SEQ ID NO: 35913 - DNA, 234 bp, Artificial Sequence
  derived and/or modified sequence
atgcccctgagtgacttcatcctggccctgaaggacaacccctactttggagctggcttcggcctggtgggcgtgggcacagccctggccctggccaggaagggcgtgcagctgggcctggtggccttccgccgccactacatgatcaccctggaggtgcctgcccgggacaggagctatgcctggctgctgtcctggctgaccaggcacagcaccaggacccagcacctgtag

SEQ ID NO: 35914 - DNA, 621 bp, Artificial Sequence
  derived and/or modified sequence
atgcccctgagtgacttcatcctggccctgaaggacaacccctactttggagctggcttcggcctggtgggcgtgggcacagccctggccctggccaggaagggcgtgcagctgggcctggtggccttccgccgccactacatgatcaccctggaggtgcctgcccgggacaggagctatgcctggctgctgtcctggctgaccaggcacagcaccaggacccagcacctgtctgtggagaccagctacctgcagcacgagagcggccgcatcagcaccaagtttgaatttgtgcccagccctggcaaccacttcatctggtaccggggcaagtggatccgggtggagaggagccgggagatgcagatgattgacctgcagacaggcaccccctgggagagcgtgaccttcaccgccctgggcacagacaggaaggtgttcttcaacatcctggaggaggcccgggagctggccctgcagcaggaggagggcaagacagtgatgtacacagctgtgggcagcgagtggaggcccttcggctaccccaggagaagaagacccctgaacagcgtggtgctgcagcagggcctggccgacagaattgtgagagatgtgcagtag

SEQ ID NO: 35915 - DNA, 1260 bp, Artificial Sequence
  derived and/or modified sequence
atgcccctgagcgacttcatcctggccctgaaggacaacccctactttggagctggtttcggactcgttggagtgggcaccgctctggcccttgctcgtaagggcgttcaactcggcctggtagcatttcgtagacactatatgataaccttggaggttcctgctagggaccggtcctacgcctggcttctgtcctggttgactaggcactccacacgcacccaacacttgagcgtggaaacatcctatctccagcatgagtccggtagaatcagcacgaagttcgagtttgtccctagtcccggaaatcactttatctggtaccgcggaaagtggattcgtgtagaacgaagccgggaaatgcagatgatcgatttacagacgggtaccccttgggagtccgtgactttcacagctctgggaactgaccgaaaagtgtttttcaatatcctagaagaggcccgcgaattggccctccaacaggaggaaggcaagacagtgatgtataccgctgtgggctccgagtggcgcccctttggctaccccaggcgccgacgtcccttgaattcagtggtgctgcaacaggggctcgccgatagaattgtcagggacgtacaggagttcatcgataatccaaaatggtatacagatcggggaattccttatagaaggggctacctgttatacggcccaccaggctgtggcaaaagctctttcatcactgctctcgcaggagagctggaacactcgatctgtttgctgagtctcactgacagctccctctccgacgatcgcctgaatcacctcctgtccgtggcaccccaacagtcactcgtgctcttagaagatgttgatgccgcctttttgagccgggacctggccgtggagaaccccgtgaaataccagggcctaggcagattgacattttcggggttactgaatgccctggatggagtggcctccaccgaggctcgtatcgtcttcatgacaaccaaccatgtggataggctggaccctgccctgattcgcccaggcagggttgatcttaaggaatatgtaggatattgttcccactggcagctgacacagatgtttcagagattctacccgggacaagctccgtcgctggctgagaatttcgccgaacacgtcctcagggccactaatcagatttcacctgcacaagtccagggctacttcatgctctataagaacgaccctgtgggcgctatccacaacgccgagagcctgcggcggtag

SEQ ID NO: 35916 - DNA, 1260 bp, Artificial Sequence
  derived and/or modified sequence
atgcccctgagcgacttcatcctggccctgaaggacaacccctacttcggagctggcttcggcctcgtgggtgttgggactgctctggccctggcccgcaagggcgtgcaactaggtctcgtggccttccgaagacattatatgatcaccctggaggtcccggccagggaccggagctacgcctggctgctgagctggctgactcgacattctaccagaacccagcacctctccgtagagacctcatacctccagcacgagtctggccgtatttctactaaattcgaattcgttccctcgccagggaaccattttatctggtacaggggtaagtggatcagggttgagagatcccgagagatgcagatgattgatctccaaacagggaccccatgggaatcagtaaccttcacagcactgggcaccgatagaaaggtatttttcaatatccttgaggaggcccgtgaactagcactccagcaggaggaagggaagacagtgatgtataccgcagtaggctctgagtggcgcccattcgggtacccgagacgaagaagacccctgaatagcgtggtccttcagcagggtctggcagacaggattgtccgcgacgtacaggaatttatcgacaatcccaagtggtataccgatcgagggataccttacagaagaggatatcttctctacggcccccctgggtgcggcaagtcaagcttcattacggcactagcaggagaacttgagcatagtatatgtctcctctcgttgaccgatagttctctctctgacgatcgcctgaaccatcttttatctgtagcaccacagcagtctctcgtgctcctcgaggatgtggatgctgctttcttatctcgcgacctggccgtggagaacccagtaaaatatcagggtctaggccgattgacattctcagggctacttaacgctctggatggggtggcctccaccgaagccaggattgtcttcatgactactaaccacgtggataggcttgaccctgctctgatcagaccggggcgcgtggaccttaaggaatacgttgggtactgtagtcattggcaattgactcagatgttccaacgattctatcccggccaggccccatctttagctgaaaattttgccgagcatgtgctgcgcgccacaaaccaaatttcccccgctcaggtgcaggggtatttcatgctatataaaaatgaccccgttggcgccatccacaatgctgagagcttgaggcgctag

SEQ ID NO: 35917 - DNA, 1260 bp, Artificial Sequence
  derived and/or modified sequence
atgcccctgagcgacttcatcctggccctgaaggacaacccctactttggcgccggattcgggttggtgggagtggggaccgccctggctctcgcccggaagggcgtgcagctgggcctagtggcctttaggcggcattacatgatcacactcgaagtgccggctagggaccgttcttatgcatggctcctgtcttggctcactcgccatagtaccaggactcagcatctctctgtagagacgtcctatctgcagcatgaaagtggccgaatctctacaaaattcgaatttgtccccagccccggcaatcattttatttggtacagagggaagtggatcagggttgagcgaagtagagaaatgcagatgatagacctgcagacaggaacgccatgggaatctgtgacattcacagcgttaggtactgacagaaaagtattctttaatatcctggaggaagctcgcgagctcgccctccagcaggaggagggcaaaaccgtgatgtatacggcggtggggtccgaatggcgcccttttggataccccaggcgcagaaggcctctcaacagcgtggtgctccaacagggactggcggataggatcgtgcgggacgtccaggaattcatcgacaaccccaagtggtatactgacagggggattccgtacagacgaggctacctgttgtacggtcctccagggtgcgggaaatccagtttcatcaccgccctcgctggcgaactcgaacacagcatttgtctgctttctcttacagactcgagcttaagcgatgaccgcctgaatcatctcctcagtgtcgctccacaacagtcactggttctgctggaggacgtggatgcggccttcttgagtcgtgatctggccgtagaaaacccagtgaagtatcaggggttaggacgattaaccttctccggcctgctgaatgcactcgacggtgtggcctccactgaggcccggattgttttcatgaccacaaatcacgttgatcggctggatccagcactcatccggcccgggagagtagacctgaaagagtatgtgggttactgctcccattggcaactaacgcagatgttccagcggttttacccggggcaagcaccaagccttgccgagaattttgctgaacacgttctgcgcgctacgaaccagataagtccggcacaggtccaggggtactttatgctgtataagaatgatccagtgggagctatccacaatgctgaatccctgcggcggtag

SEQ ID NO: 35918 - DNA, 1260 bp, Artificial Sequence
  derived and/or modified sequence
atgcccctgagcgacttcatcctggccctgaaggacaacccctactttggcgccggctttggattagtcggggtaggcactgcgctggcgttggcccgcaagggcgtgcagctcggtctcgtcgcttttcgcaggcattacatgattacgttggaggtgcctgcccgcgacaggtcctatgcttggctgcttagctggttaactcggcacagcacccgaacacagcacctgtccgtcgagacatcttacttgcaacacgaatctggacgcatttcaacaaagtttgagtttgtgccctcccctggtaatcattttatctggtaccgcggtaagtggatccgcgttgagaggagtcgagagatgcaaatgatcgacctgcagaccggtacaccatgggagtcagttacttttacggctctcggcaccgatcgcaaggtgtttttcaacatcctggaagaggccagagagttagccctccagcaggaagagggcaagactgtaatgtacacggccgtagggagcgagtggcgtccctttggatatccacgaaggcgcagacccttgaactccgtggtgctgcagcaaggcctggcagaccgaatagtccgcgacgttcaagaattcattgacaaccccaagtggtacactgatcggggcattccatatagaaggggctatctgctgtacggccccccgggatgtggcaagagctccttcatcactgcattggctggtgagctagagcactccatttgtcttctcagcctgacagactccagcctttcagacgacagactaaaccacctcctgtccgtagcgcctcagcagtctttggttctcctggaagacgtggacgccgcgtttctatcacgtgacctggccgtcgaaaaccctgtcaaatatcaaggattgggcagactgaccttcagtggcttattaaacgctctggatggagtcgcctccacagaggccagaattgttttcatgactactaaccacgttgacaggctggaccccgctcttattaggccagggagggtggatttgaaagaatatgtgggatattgctcccattggcagctcactcagatgtttcaaaggttttacccagggcaggcccccagtttggctgagaactttgcagaacacgttcttcgcgctaccaaccagatctcgcccgcccaggtccaagggtatttcatgctctataaaaacgaccccgtaggggccatccacaacgcggagtccttgcgccgatag

SEQ ID NO: 35919 - DNA, 1260 bp, Artificial Sequence
  derived and/or modified sequence
atgcccctgagcgacttcatcctggccctgaaggacaacccctacttcggcgctggatttggccttgtcggggttggcacggccttggcattagcccgcaaaggcgtgcagctggggctggtggctttccgtcggcattatatgatcaccttggaagttcctgctcgagatcgctcctatgcttggctgctaagctggttgacgcggcactcaacccgtactcagcatttgtccgtggaaacttcttatctgcagcacgaatcagggcggattagcactaaatttgagttcgtccccagcccagggaaccactttatatggtaccggggtaagtggatcagggtcgaaaggtcacgggaaatgcagatgatcgatcttcagaccgggaccccctgggaaagtgttacttttacagctttgggaactgacaggaaggtcttctttaacatcctcgaagaggctcgggagttggctctgcagcaggaagaaggaaagactgtgatgtatacggccgttgggagtgagtggagaccattcggctatccaaggcggcgccgaccacttaacagcgtggttctgcagcaggggctcgctgaccgcatcgtgcgcgacgtccaagaattcattgataaccccaagtggtacacagatcggggcattccctaccgacgcggttacctcctttacggcccgccagggtgcggcaagtcaagcttcatcacagctttggctggagaattagagcactcaatttgtcttctttccctcactgactcaagtctgagcgatgatcggcttaatcatctcctgtctgtggctcctcagcagagtttggttctgttggaggacgttgatgccgcgtttctgagcagagatcttgctgtcgagaatcctgtcaaatatcagggcctaggaaggttgacttttagcggtctgttgaatgcccttgacggggttgcctccactgaagcgagaatcgtgttcatgactacaaatcacgtcgacaggctggaccccgctctcatcaggccaggccgggtcgaccttaaggagtatgtcggctactgttcacattggcagttgacccaaatgttccagcgcttctaccccgggcaagcaccgagcttagccgagaacttcgctgaacacgtcctgagggccacaaatcaaatcagcccggcacaggtgcagggctacttcatgctttataagaatgaccctgttggcgcaatccacaacgccgaatctttgcggagatag

SEQ ID NO: 35920 - DNA, 333 bp, Artificial Sequence
  derived and/or modified sequence
atgcccctgagcgacttcatcctggccctgaaggacaacccctacttcggagccggatttggcctagtgggggttggcacagcgcttgctctcgctcggaaaggagtccagttgggactggtcgcctttagacggcactacatgattacactcgaagtgcccgcacgcgatcgatcctatgcctggttactgagctggttaaccagacacagcacacgaacccaacacctgagtgtcgaaacatcctatctgcagcacgagagcggtcgcatttccaccaaattcgaatttgttccgagccccgggaatcatttcatatggtatcgtgggtag

SEQ ID NO: 35921 - DNA, 234 bp, Artificial Sequence
  derived and/or modified sequence
atgcccctgagcgacttcatcctggccctgaaggacaacccctacttcggtgccggcttcggcctcgtcggggtgggaacggccctagcactagctcggaagggcgttcaattgggactcgtggcattccgtcgacattatatgattacactcgaggtgccggcccgagaccggtcttacgcttggttattgtcttggttgaccagacactcaaccagaacccagcacctttag

SEQ ID NO: 35922 - DNA, 621 bp, Artificial Sequence
  derived and/or modified sequence
atgcccctgagcgacttcatcctggccctgaaggacaacccctactttggtgccggcttcggccttgtaggggtgggtaccgcactggcattagcccgaaaaggcgtgcagctgggcctcgtcgctttcaggaggcactacatgattaccctggaagtacccgcaagggaccggagttacgcttggcttctatcttggctcacaagacactctacccggacgcagcacctctctgtggaaacctcatatctgcagcacgaaagcggaaggatcagcactaaatttgaattcgtccccagtccaggtaatcacttcatctggtatagaggcaagtggatcagagtggagcggagccgggagatgcagatgatcgacttgcagaccggcactccatgggagtctgtgactttcacagccttgggaactgaccgcaaagtgtttttcaatatcctggaggaggccagagagttagctctgcagcaggaagaaggaaaaacggtcatgtacaccgccgtgggaagcgagtggaggccttttggctaccctcgccggaggcgccccctcaatagcgtcgtcctgcagcagggactggccgatcggatagttagggatgttcaatag

SEQ ID NO: 35923 - DNA, 1260 bp, Artificial Sequence
  derived and/or modified sequence
atgcccctgagcgacttcatcctggccctgaaggacaacccctactttggggcgggcttcggcctggtaggcgtggggactgctctggcactagctagaaagggtgtgcagcttggattagtggcctttagacgacactatatgatcaccctggaggtgccagcacgcgatcgatcttatgcttggctgctgtcctggctgacccgccatagtaccaggacacagcatttgagcgttgaaacctcatacctccagcatgagtcaggcaggatttcaactaaatttgaattcgtgccaagccccggtaatcattttatttggtacagggggaaatggattagggtggaacggagtcgggagatgcagatgatagatcttcagactggcacgccttgggagagtgttaccttcactgcactcggcacagatcggaaggttttcttcaatattctggaggaggcaagagagctggcactgcagcaggaagaggggaagactgtgatgtacacagccgtgggatccgaatggcggcccttcggttacccacggaggcggcgtccactcaattccgtggttcttcaacaagggctcgccgacagaatcgtcagggacgtgcaggagtttatcgataatccaaaatggtacaccgatcggggtatcccatacaggaggggttacctgctatatggaccaccggggtgcggcaaatcatcttttattactgctttggctggcgagctggagcacagcatctgcctgctctctcttacagattccagcttgtctgatgaccggctgaatcacctgctgtccgttgcaccacagcagtccttagtcctcctcgaagacgtggatgcggcgtttctgagccgcgacctggcggtggaaaatccggtgaagtatcaaggccttggaagattgaccttcagcgggctactcaatgcgttagatggggtcgccagcactgaagcaaggattgtgttcatgaccaccaaccatgttgatcgcttagaccctgccttgattcgccctggacgggtggaccttaaggagtatgtaggatattgcagtcattggcaactgacacagatgtttcaacgcttctaccccggacaagccccaagcctcgcagagaatttcgccgagcatgtactcagggccaccaaccagatttcaccggctcaagtgcagggatattttatgttgtacaaaaacgacccagtgggcgccatccacaacgcggagtctcttcgtcggtag

SEQ ID NO: 35924 - DNA, 1260 bp, Artificial Sequence
  derived and/or modified sequence
atgcccctgagcgacttcatcctggccctgaaggacaacccctacttcggtgcaggcttcggccttgtaggtgtcggtactgctttggcactggcaaggaagggagttcagctgggactggtggccttccgcagacactacatgatcactctagaggttcctgcccgtgaccggagttacgcctggttactctcttggctgacacgccactcaacccggacccagcatctaagtgtggagacttcttacctccagcacgagagcggacgtatttctacaaagtttgagttcgtgccatcgccggggaaccacttcatctggtaccggggcaagtggatcagggtcgaacggtcacgggagatgcagatgattgatcttcaaacaggaactccatgggaatcagttacatttactgctctgggtactgatcggaaagtgttctttaacatcctcgaagaagcgcgcgaactcgccttgcagcaggaggaaggcaagaccgtgatgtacaccgctgtgggaagcgaatggcggccattcggataccctagacgtaggaggcctctgaacagtgtggtcctgcagcagggcctagccgaccggatagtccgagacgttcaggaattcatagataacccaaaatggtacaccgatcggggaatcccatatcgcagaggctatttactgtatggacctcctggctgcggaaagagctccttcataacagcccttgccggggagctggagcactcgatttgcctcctgagccttactgattcttcactgagcgatgaccggctcaatcacctgctttcggtggccccacagcagtccctggtgcttcttgaggacgtagacgctgcatttttgagcagagacttggccgtggagaaccccgttaaatatcagggcttgggccggcttaccttcagtggattgctcaatgctttggacggcgtcgcctccaccgaagcaagaatagtgttcatgaccaccaaccatgtggatcgtcttgatcccgccttgattcgtcccggacgcgtcgacttaaaagaatatgtggggtactgctcacactggcagcttacccagatgttccagaggttctaccctggccaggctccgtctctggcagaaaactttgcagagcacgttctcagagccacgaaccaaattagtccagcacaggttcaggggtacttcatgctgtacaaaaacgatcctgtgggcgctatccataacgcggagtccctccggagatag

SEQ ID NO: 35925 - DNA, 621 bp, Artificial Sequence
  derived and/or modified sequence
atgcccctgagcgacttcatcctggccctgaaggacaacccctactttggcgcaggcttcggcttggtcggcgttggtactgcgctggcacttgccaggaaaggcgtccagctcggcctagtcgccttcagaagacattacatgattacccttgaagtgcccgcgcgcgatagatcgtacgcatggcttctaagctggctcacccgccacagcacaagaacccaacatctctcggttgagactagttaccttcaacatgagtcaggtcggatttccactaaattcgagttcgtgcccagtccaggaaaccatttcatatggtacagggggaagtggattcgagttgagcggagccgtgaaatgcagatgattgacttacagactggaacaccctgggagtcagttacattcacagcgctgggtactgaccgaaaagtattcttcaatattctcgaggaggctagggaactggcgctgcagcaggaagaaggcaagacagtgatgtacacagccgtgggctccgagtggagaccattcggctatcctagaaggcgaaggccacttaatagcgtcgtacttcagcaggggctggcagatcggatagttagggatgtccagtag

SEQ ID NO: 35926 - DNA, 1260 bp, Artificial Sequence
  derived and/or modified sequence
atgccgctgagtgactttatcctggctctgaaggacaacccctattttggcgcagggttcggcctcgtcggggtgggtactgctctggcactggcacgtaagggagtccagctgggcctggtggcatttcgacgccactacatgattacgctggaagtgccggctagagaccgatcatatgcttggctactgtcctggctgacgcgacattccacccgaacccaacatctgtccgtggaaacttcctatttacagcacgagtctggcaggatcagcactaagtttgaattcgtgccgtcgcccggaaaccattttatatggtaccgcggaaagtggatccgggttgagcggtcccgcgagatgcagatgatcgacctccagactggaaccccttgggagagcgtcaccttcaccgccctggggaccgatcgcaaagtgtttttcaatatcctggaagaggccagagagctcgcattacaacaagaagaggggaagaccgtgatgtacaccgctgttggcagtgagtggcggccttttgggtatccgaggaggcgtcgccctctcaattctgttgtgctacagcaggggttggcagaccggatcgtgcgggacgtccaggagttcatcgacaatcccaagtggtatacggacaggggaatcccatatagaagaggatacctcctgtatggaccacctgggtgcgggaaatcgtcctttattactgcactggccggagagctggagcacagcatttgtctcctgagcctgacagactcatctctgtcagacgatagattaaatcaccttctctccgttgcacctcagcagtccctcgtgcttctcgaagatgtcgacgctgcgttcctaagtcgggatctggctgtcgagaatcctgttaaataccaaggactcgggagattgacattttctggcctcctgaatgctctcgatggagttgcatcaactgaggccaggatcgtgtttatgaccaccaaccacgtcgatcggctggacccagccttgatccggccagggagagtggatctcaaagagtacgtcgggtactgcagccattggcaactgacccaaatgttccagaggttttaccccggacaggctccaagcctggcagagaactttgcagagcacgtactgcgggcaaccaatcagatcagccctgctcaggtgcagggctattttatgttatacaaaaacgatcccgtgggcgctattcacaatgctgaaagcttgcgacggtag

SEQ ID NO: 35927 - DNA, 1260 bp, Artificial Sequence
  derived and/or modified sequence
atgccactcagtgatttcatcctggcactgaaggataacccatatttcggagcaggctttgggctcgtcggtgtcggcaccgctctcgccctagccaggaagggggtccagctgggactggtggccttccgcagacactatatgattactcttgaagtgcctgctcgcgatagatcctacgcttggctcctctcctggctcaccagacacagcactcgcactcagcatcttagcgttgagaccagctatttgcagcacgagtccggacgtatatcaacgaaattcgagttcgtcccttcaccagggaatcatttcatttggtatagaggtaaatggattcgggtcgaacgtagcagggagatgcagatgatagatttacagaccgggactccctgggaaagtgtgactttcaccgccctgggcacagatcggaaggttttttttaatatcctggaggaggcccgagaactggccctacagcaggaagagggaaaaacagtgatgtacactgcagtggggtccgagtggagaccctttggataccctcggaggagaaggcccctgaattctgtcgtattacaacaagggctggctgaccgcattgtgcgggatgtgcaggaatttatagacaaccccaagtggtacactgatcgcggaatcccctatcggaggggctacctgctctacggccctcctggctgcggcaaatcaagttttatcacagccctggctggtgaattagaacacagtatctgccttctcagcctcaccgattcctctttgtctgacgatcggctgaatcatctcctgagtgtcgcaccacagcagtccttggttctgctggaggacgttgacgcagccttcctctccagggacttagcagttgagaacccggttaagtatcagggccttggtcggctgaccttctctgggctccttaatgccctcgacggtgtagccagtacagaagctcgtatcgtcttcatgacaactaatcacgtggacaggctggaccctgctcttattagaccgggtcgtgtggatctaaaagaatacgtgggctattgctctcactggcagttgacccagatgttccagaggttttaccctggacaagcgccaagcctggcagagaatttcgccgagcatgttctccgtgcaactaatcagattagccccgcacaggttcagggttatttcatgctgtataaaaacgatcccgtgggagcgattcacaacgctgagtctctgagaaggtag

SEQ ID NO: 35928 - DNA, 1260 bp, Artificial Sequence
  derived and/or modified sequence
atgcctttatccgatttcattctggcgctgaaagataatccgtatttcggggctggattcgggttggtgggagtgggcacggcacttgccttggcccgaaagggtgtgcaactggggctggttgcattcagacgacattacatgataacactcgaagtgcctgcccgagatcgatcttatgcctggttgctgtcctggcttacccggcactccaccaggacacagcatctgtctgtggaaacctcctaccttcagcacgagagtggacgtatatctactaaattcgagttcgtccctagccctggtaaccactttatatggtaccgcggaaagtggattcgtgtcgagcgtagtagagaaatgcagatgatcgatctccagactggcacaccttgggaatccgtgacattcacggctctgggaacggaccggaaagtgttcttcaacattcttgaggaggccagggaactcgccctacagcaggaggaaggtaaaactgtgatgtataccgccgtgggaagcgagtggcggcctttcggctacccaagacggagacgaccactgaatagtgtggtattacaacagggcctagcagataggatcgtacgcgacgtgcaggagtttatcgacaatcctaaatggtataccgaccgtggaatcccgtacaggcgtggctatctgttatacggcccacccggatgtggtaaatccagcttcattaccgctctagccggagagctggaacacagtatctgcttactgtctcttaccgatagctcactgagcgacgacagactaaatcatctactatcagtcgcccctcagcagtcactggtactactggaggacgtcgatgctgcctttctgtcaagagatctggctgtcgagaatccagtgaagtatcaaggtcttggacggttgacattctcaggactcctgaacgccctggatggagtggcgtcaactgaggcccgtattgtgtttatgacaacaaatcatgtggaccgacttgacccagccttgattaggccaggcagagtggatctgaaggagtacgtaggctactgctcccattggcaactcactcaaatgtttcagcgcttttaccccggacaggctccatcacttgccgagaatttcgccgagcacgtgctccgcgcaaccaaccagatttcaccagcccaggtacagggttacttcatgctgtacaaaaacgaccccgtaggcgctatccacaacgccgaaagcctcagacgatag

SEQ ID NO: 35929 - DNA, 1260 bp, Artificial Sequence
  derived and/or modified sequence
atgccattgtctgattttattctggcactgaaagacaacccttatttcggcgctgggttcggccttgtgggagtgggaacagccctcgccctggcacgaaaaggggtccaattaggcctggttgcattccgcagacactatatgataactctggaagttccagcgagagaccgcagttatgcatggttacttagctggctcacaagacacagtactaggacacagcacctgtccgtcgagacatcttatctgcagcacgagtccggcagaatcagcaccaagttcgagtttgtcccaagccctgggaatcatttcatttggtacagaggcaagtggattcgggtggagcgcagtagagaaatgcagatgatcgatctgcagacgggtactccttgggagtctgtaacatttacagcgcttgggactgacaggaaggttttcttcaacattcttgaagaagcgagagaactggctctgcaacaggaggaagggaaaacggttatgtatacagcagtgggctctgaatggcgacccttcggatacccgaggcgcagacgccctctgaactccgtggtcctccagcagggactggctgatcgaatagtccgggatgtccaggagtttatcgacaatcccaaatggtacaccgataggggaatcccataccgacgcggatacttactctatggccctccaggctgcggaaagtcaagctttatcaccgctcttgctggcgaactggaacactctatttgcctgctgtccctgaccgattctagtctgagcgacgatcgtctcaaccacctcttgagcgtggcaccacaacagagcctcgtccttttggaggacgtcgacgccgcattcttaagcagagatctggctgttgaaaatcctgtcaagtatcaaggacttggcaggctaacattcagcgggttgctcaacgccctcgacggggtagcaagtactgaagccaggatcgtgtttatgacgactaaccacgtggaccggctggatcccgctctcattcgcccaggcagggtggatctcaaagagtacgtggggtactgcagccattggcagctgacccaaatgttccaacgcttctatcccggacaggcaccctccctcgcagaaaattttgccgaacatgtacttcgggcaaccaatcagatctcccctgcccaagtgcagggatatttcatgttgtataaaaatgaccccgtcggagcgattcacaatgcagaaagcctccgacggtag

SEQ ID NO: 35930 - DNA, 1260 bp, Artificial Sequence
  derived and/or modified sequence
atgcccctgagcgatttcatccttgccctgaaagacaatccctatttcggagccggtttcggactggtgggagtgggcaccgcccttgctctggcgaggaagggagtgcaactaggtctggtggcttttcggcgtcactacatgatcacccttgaagtgcccgctcgggatcggtcttacgcttggcttctctcctggctaacaagacattctacaaggacgcagcatttatctgtggagacctcctatctgcagcatgagagcggacggatctcaaccaaatttgagtttgtgcccagcccagggaatcatttcatctggtaccgcggaaagtggatcagggtcgagaggtctagagaaatgcagatgatagaccttcagacgggcaccccatgggagtcggtgactttcaccgcactgggcaccgaccggaaagtgttttttaacatcttggaagaagcacgcgagctcgcgcttcagcaagaggagggcaaaacagtgatgtacacggctgtaggatccgagtggaggccatttgggtatccaagacgccgaaggccactgaactccgtggttctgcagcagggcctggccgatcgaatagtacgcgatgtgcaggagttcatagataacccaaagtggtatactgatcgcggaattccttatcgacgcggttatctgttgtatggcccaccaggctgcgggaagtcttctttcattaccgccctggccggagaactggagcattccatttgtctgctgagtcttactgacagcagcttgtcagatgatcggctgaatcatctgctgtccgtggctccccaacagtcccttgtgctgcttgaagatgtggacgccgcttttctcagtagagatctcgcagtggaaaacccggtcaagtatcagggattgggaagactaacgtttagtgggttgcttaacgctctagacggggtggcctctacggaggccagaatcgtgtttatgaccacaaatcacgtggacagactcgaccccgcactgatcaggcccggacgggttgatcttaaggagtatgtcggatattgttctcattggcagcttacgcagatgttccagcggttttaccctggccaggctccttccctagccgaaaatttcgcagaacacgtattgcgtgctaccaaccagataagtcccgcacaagtgcagggatatttcatgctatataaaaacgacccggtaggagcaattcataacgctgaatctttgagaagatag

SEQ ID NO: 35931 - DNA, 333 bp, Artificial Sequence
  derived and/or modified sequence
atgccccttagcgactttattctggcactgaaggataatccttactttggagccggatttggactcgtgggcgtgggtactgccttagccctagccagaaagggtgtgcagctgggattggttgcattccggagacactatatgattacactcgaggtaccagccagagaccgcagctatgcttggctgctctcctggcttactcgccacagcaccagaacccagcatctctccgttgaaacgagctacctgcaacatgagagcggccgaataagcactaagttcgaattcgtaccctcccccggaaaccactttatttggtacaggggatag

SEQ ID NO: 35932 - DNA, 234 bp, Artificial Sequence
  derived and/or modified sequence
atgcccttgtctgacttcattctggcactgaaggataatccctattttggcgctggattcggcttagttggcgtgggaaccgccctagcactcgctcgaaagggtgttcagctggggttggtggcgttccggcgtcactatatgattacgctggaagtgccagctagagataggtcttacgcctggctactttcctggctgacacggcactcgacccggactcagcacctgtag

SEQ ID NO: 35933 - DNA, 621 bp, Artificial Sequence
  derived and/or modified sequence
atgcccctgagtgacttcattcttgcactcaaggacaacccttacttcggggcaggcttcggtctggtgggcgtcggaactgcattagccttagctcggaagggagttcagctgggactcgtggccttccggagacattatatgataaccctagaggttccagcacgggaccgcagttacgcttggctgctttcctggctgacacgccattcaactcgtactcagcatctctctgtggagacctcgtatctccaacacgagagcggcaggatttccacaaaatttgagttcgttcctagccccggaaaccattttatttggtaccgaggcaagtggattcgcgttgaaagatccagagagatgcagatgatcgatctgcaaacaggcactccgtgggaaagcgtgacattcactgcgctaggcacagaccgaaaggtattctttaacattctcgaagaggctagagaattggcgttgcagcaggaagaggggaaaactgtcatgtacacagctgtagggtcagaatggcggccattcggataccctagaaggcgcaggcctctcaacagcgtggtgctacagcagggcctggcagacagaattgtgagagatgtacagtag

SEQ ID NO: 35934 - DNA, 1260 bp, Artificial Sequence
  derived and/or modified sequence
atgcccctgtccgacttcatactagcactcaaggacaacccttatttcggagcaggattcgggttagtcggagtgggcactgcacttgcgttggcgagaaaaggagtccagttagggctggtcgcttttcgccgacattatatgattacattagaggtcccggcacgggatcggagctacgcttggctacttagttggctcacccgacactctactagaacccagcatctgtcagtcgagacctcttacctccaacacgagagcggacgcataagcacgaaatttgaatttgtcccctccccgggtaaccacttcatctggtatcggggtaaatggataagggtcgagaggtcgagggagatgcagatgatcgacctccagactggaactccttgggaaagtgtcactttcactgccttgggcaccgatagaaaagtgttctttaacattttagaagaagcaagagagctcgcccttcagcaagaagaggggaagacggtgatgtacacagcagtgggcagcgagtggaggccctttggctatcccagaagaagacgccctttaaattcagtggtcctgcagcaaggtctggccgaccgtatagtcagagatgtgcaagagttcatcgacaaccccaagtggtacaccgatagaggaataccgtatcgccgaggatatctgctttacggtcccccagggtgcggaaagagctcatttatcaccgctctggcgggtgagttagagcattccatttgtctgttgtcactaacagattcatccctgtccgatgacaggttgaaccatcttctgtccgtggcaccgcagcagagcttggtgctcctcgaagatgtggatgcagccttcttgtcacgtgacctggctgtcgaaaaccctgtgaagtaccagggtttggggagactcacatttagcggcctcctgaatgccctggatggtgtcgcctcaacggaagctagaattgtgtttatgactacgaaccatgtggacaggctggatcctgccctcataagacctggccgtgtggatctgaaagagtacgtgggctactgcagccactggcagctgacccaaatgttccaacggttctatcctggccaggcccctagccttgccgagaacttcgctgagcatgttcttagagcaactaaccaaatctcgcccgctcaggtccagggatatttcatgctctacaaaaacgacccggtgggagccatacacaacgcagaaagcttgaggcggtag

SEQ ID NO: 35935 - DNA, 1260 bp, Artificial Sequence
  derived and/or modified sequence
atgcctctgtctgactttatacttgcactgaaggacaatccttacttcggggcaggctttggcctcgtcggagtgggcaccgctttggccctggcgcgaaaaggtgtgcagctgggattggttgcattccggagacactacatgatcacactggaggtgccagccagggataggtcttatgcctggctgcttagttggttgacccgccactccactaggactcagcatcttagtgtggaaacgagctacctgcagcacgagtctggaaggatctctaccaagtttgaatttgtaccttcaccaggcaaccattttatatggtacagggggaagtggattcgggtagaaaggtcaagagagatgcagatgatcgatctgcaaacgggaacgccgtgggaatcagttaccttcaccgctctcggcacagataggaaagttttcttcaatatccttgaggaagcacgcgagctagcattacaacaggaagagggcaaaaccgtgatgtatacagccgtcggatccgagtggcggcctttcggatatcccagacggcgacggcctctgaattctgttgtactccagcaaggccttgccgaccggatcgtacgggacgtgcaggagttcatagataacccaaagtggtacacggatagaggaattccctacagacgcggatatttgctatacggccctccgggttgcgggaaaagtagtttcatcactgccctcgctggagagctggagcactctatttgcctgttgagcctcaccgatagctccctcagcgacgacagacttaatcatctgctgtcagtcgctccccagcagtctcttgttctgctggaggatgtagatgctgcgtttctgtcacgtgacctggcagtcgagaatccggttaagtatcagggacttggcaggctgacattctcgggacttcttaacgctctggacggggtagcatcaactgaggctaggatcgtatttatgaccaccaaccacgtcgacagactggatcctgcgctgatcaggccaggtcgagtggatctgaaggaatacgtgggctattgttcacactggcagcttactcaaatgttccagcggttttacccaggacaagctccgtccctcgccgagaactttgccgagcatgtgttgcgagccaccaaccagataagtcccgctcaagtccaaggatatttcatgctgtataaaaatgaccccgttggcgctatccacaatgctgagtcattacggcgttag

SEQ ID NO: 35936 - DNA, 621 bp, Artificial Sequence
  derived and/or modified sequence
atgccgctatctgactttatactcgccttgaaggataatccatattttggggctggattcgggctggtcggggtaggaactgctctcgctctcgcgagaaaaggggtccaactgggactggttgctttccggagacactacatgatcacgttggaagtacccgctcgcgaccgttcgtacgcatggcttttaagctggttgacgagacatagtaccaggacccagcatttgagcgtcgagacatcctatctgcagcacgagagcggacggattagtactaagttcgagttcgtcccatcgcccggaaaccatttcatctggtacagaggtaaatggattagggtcgaaaggagcagagaaatgcagatgatcgacttacaaacaggtaccccatgggaaagcgtgacctttacagctctgggaactgatcgcaaagtgtttttcaacatcctggaagaagcccgtgaattggccctgcagcaggaagaagggaagaccgttatgtacacagccgtcggatccgagtggagaccctttgggtacccacgtcggcgaagacctcttaattctgttgtactacaacagggtctggccgatcggatcgtccgggacgtgcagtag

SEQ ID NO: 35937 - DNA, 1454 bp, Artificial Sequence
  derived and/or modified sequence
gaaaggacccggggcggggccgaacgcagcttccccaaggtgcaggcgcggtgaaaccatcgagacggagggccagagagtcacggcggttttcgtaacaccccagggcctgtaaggtttggtgtttccctttcaagatgccactttcagactttattctggctctgaaggacaatccctactttggggctggatttgggctggtgggtgtgggcacagccctggccctggcccggaagggtgtccaactgggcctggtggcattccggcgccattacatgatcacactggaagtccctgctcgagacaggagctatgcctggttgcttagctggctcacccgccacagtacccgtactcagcacctcagtgtcgagacttcgtaccttcagcatgagagtggccgcatttccactaagtttgaatttgtccccagccctggaaaccattttatctggtatcgggggaaatggattcgggtagaacgaagtcgagagatgcagatgatagacttgcagacggggactccttgggaatctgtcaccttcacggccctgggcactgaccgaaaggttttcttcaacatcctggaggaagctcgagagctagccttgcagcaggaggaagggaagaccgtgatgtacacagctgtgggctctgaatggcgtccctttggctatccacgccgccggcgaccactgaattctgtggttctacaacagggtctggctgaccgaattgtcagagacgtccaggaattcatcgataaccccaagtggtacactgacagaggcattccttacagacgtggctacctgctttatgggccccctggttgcggaaagagcagttttatcacagccctggctggggaactggagcacagcatctgcctgctgagcctcacggactccagcctctctgatgaccgactcaaccacctgctgagcgtggccccgcagcagagcctggtactcctggaggatgtggatgctgcttttctcagtcgagacttggctgtggagaacccagtaaagtaccaaggcctaggtcgcctcaccttcagtggactgctcaatgccttggatggtgtggcttccaccgaggcccgcatcgtgttcatgaccaccaaccacgttgacaggctggaccctgccctgatacgcccggggcgagtggacctgaaggagtacgtgggctactgctcacactggcagctgacccagatgttccagaggttctatccagggcaggcaccttccttagctgagaactttgcagaacatgtccttcgagctacaaaccagatcagtcctgcccaggtgcagggctacttcatgctgtataaaaatgaccctgtaggggcaattcacaatgctgagtctctgaggaggtgatcaggctgggctcagctcagctctcctcctctagctcaataaacatctgccacacta

SEQ ID NO: 35938 - DNA, 1583 bp, Artificial Sequence
  derived and/or modified sequence
aaaccatcgagacggagggccagagagtcacggcggatcttattgtctacgatgtgacgatccgtggagaaagtagcagatgggcagattttcatttggggagaatgagggagaaaagaacgggcattccgagccaagagcactgcatgagcaaggagttgggaggttgcttacttgttgaacatatttgttgcgtatttgcatatttgctaaacaggttttcgtaacaccccagggcctgtaaggtttggtgtttccctttcaagatgccactttcagactttattctggctctgaaggacaatccctactttggggctggatttgggctggtgggtgtgggcacagccctggccctggcccggaagggtgtccaactgggcctggtggcattccggcgccattacatgatcacactggaagtccctgctcgagacaggagctatgcctggttgcttagctggctcacccgccacagtacccgtactcagcacctcagtgtcgagacttcgtaccttcagcatgagagtggccgcatttccactaagtttgaatttgtccccagccctggaaaccattttatctggtatcgggggaaatggattcgggtagaacgaagtcgagagatgcagatgatagacttgcagacggggactccttgggaatctgtcaccttcacggccctgggcactgaccgaaaggttttcttcaacatcctggaggaagctcgagagctagccttgcagcaggaggaagggaagaccgtgatgtacacagctgtgggctctgaatggcgtccctttggctatccacgccgccggcgaccactgaattctgtggttctacaacagggtctggctgaccgaattgtcagagacgtccaggaattcatcgataaccccaagtggtacactgacagaggcattccttacagacgtggctacctgctttatgggccccctggttgcggaaagagcagttttatcacagccctggctggggaactggagcacagcatctgcctgctgagcctcacggactccagcctctctgatgaccgactcaaccacctgctgagcgtggccccgcagcagagcctggtactcctggaggatgtggatgctgcttttctcagtcgagacttggctgtggagaacccagtaaagtaccaaggcctaggtcgcctcaccttcagtggactgctcaatgccttggatggtgtggcttccaccgaggcccgcatcgtgttcatgaccaccaaccacgttgacaggctggaccctgccctgatacgcccggggcgagtggacctgaaggagtacgtgggctactgctcacactggcagctgacccagatgttccagaggttctatccagggcaggcaccttccttagctgagaactttgcagaacatgtccttcgagctacaaaccagatcagtcctgcccaggtgcagggctacttcatgctgtataaaaatgaccctgtaggggcaattcacaatgctgagtctctgaggaggtgatcaggctgggctcagctcagctctcctcctctagctcaataaacatctgccacacta

SEQ ID NO: 35939 - DNA, 1525 bp, Artificial Sequence
  derived and/or modified sequence
atcgagacggagggccagagagtcacggcggatcttattgtctacgatgtgacgatccgtggagaaagtagcagatgggcagattttcatttggggagaatgagggagaaaagaacgggcattccgagccaagagcactgcatgagcaaggagttgggaggttttcgtaacaccccagggcctgtaaggtttggtgtttccctttcaagatgccactttcagactttattctggctctgaaggacaatccctactttggggctggatttgggctggtgggtgtgggcacagccctggccctggcccggaagggtgtccaactgggcctggtggcattccggcgccattacatgatcacactggaagtccctgctcgagacaggagctatgcctggttgcttagctggctcacccgccacagtacccgtactcagcacctcagtgtcgagacttcgtaccttcagcatgagagtggccgcatttccactaagtttgaatttgtccccagccctggaaaccattttatctggtatcgggggaaatggattcgggtagaacgaagtcgagagatgcagatgatagacttgcagacggggactccttgggaatctgtcaccttcacggccctgggcactgaccgaaaggttttcttcaacatcctggaggaagctcgagagctagccttgcagcaggaggaagggaagaccgtgatgtacacagctgtgggctctgaatggcgtccctttggctatccacgccgccggcgaccactgaattctgtggttctacaacagggtctggctgaccgaattgtcagagacgtccaggaattcatcgataaccccaagtggtacactgacagaggcattccttacagacgtggctacctgctttatgggccccctggttgcggaaagagcagttttatcacagccctggctggggaactggagcacagcatctgcctgctgagcctcacggactccagcctctctgatgaccgactcaaccacctgctgagcgtggccccgcagcagagcctggtactcctggaggatgtggatgctgcttttctcagtcgagacttggctgtggagaacccagtaaagtaccaaggcctaggtcgcctcaccttcagtggactgctcaatgccttggatggtgtggcttccaccgaggcccgcatcgtgttcatgaccaccaaccacgttgacaggctggaccctgccctgatacgcccggggcgagtggacctgaaggagtacgtgggctactgctcacactggcagctgacccagatgttccagaggttctatccagggcaggcaccttccttagctgagaactttgcagaacatgtccttcgagctacaaaccagatcagtcctgcccaggtgcagggctacttcatgctgtataaaaatgaccctgtaggggcaattcacaatgctgagtctctgaggaggtgatcaggctgggctcagctcagctctcctcctctagctcaataaacatctgccacact

SEQ ID NO: 35940 - DNA, 1584 bp, Artificial Sequence
  derived and/or modified sequence
gtcacggcggatcttattgtctacgatgtgacgatccgtggagaaagtagcagatgggcagattttcatttggggagaatgagggagaaaagaacgggcattccgagccaagagcactgcatgagcaaggagttgggaggttgcttacttgttgaacatatttgttgcgtatttgcatatttgctaaacaggtagtgttaggagctaatccatgaaaggttttcgtaacaccccagggcctgtaaggtttggtgtttccctttcaagatgccactttcagactttattctggctctgaaggacaatccctactttggggctggatttgggctggtgggtgtgggcacagccctggccctggcccggaagggtgtccaactgggcctggtggcattccggcgccattacatgatcacactggaagtccctgctcgagacaggagctatgcctggttgcttagctggctcacccgccacagtacccgtactcagcacctcagtgtcgagacttcgtaccttcagcatgagagtggccgcatttccactaagtttgaatttgtccccagccctggaaaccattttatctggtatcgggggaaatggattcgggtagaacgaagtcgagagatgcagatgatagacttgcagacggggactccttgggaatctgtcaccttcacggccctgggcactgaccgaaaggttttcttcaacatcctggaggaagctcgagagctagccttgcagcaggaggaagggaagaccgtgatgtacacagctgtgggctctgaatggcgtccctttggctatccacgccgccggcgaccactgaattctgtggttctacaacagggtctggctgaccgaattgtcagagacgtccaggaattcatcgataaccccaagtggtacactgacagaggcattccttacagacgtggctacctgctttatgggccccctggttgcggaaagagcagttttatcacagccctggctggggaactggagcacagcatctgcctgctgagcctcacggactccagcctctctgatgaccgactcaaccacctgctgagcgtggccccgcagcagagcctggtactcctggaggatgtggatgctgcttttctcagtcgagacttggctgtggagaacccagtaaagtaccaaggcctaggtcgcctcaccttcagtggactgctcaatgccttggatggtgtggcttccaccgaggcccgcatcgtgttcatgaccaccaaccacgttgacaggctggaccctgccctgatacgcccggggcgagtggacctgaaggagtacgtgggctactgctcacactggcagctgacccagatgttccagaggttctatccagggcaggcaccttccttagctgagaactttgcagaacatgtccttcgagctacaaaccagatcagtcctgcccaggtgcagggctacttcatgctgtataaaaatgaccctgtaggggcaattcacaatgctgagtctctgaggaggtgatcaggctgggctcagctcagctctcctcctctagctcaataaacatctgccacacta

SEQ ID NO: 35941 - DNA, 1430 bp, Artificial Sequence
  derived and/or modified sequence
cacggcggtgagagggctgagtgacgggttaccccaaaccatgtggctggaggcgcgagctggggttttcgtaacaccccagggcctgtaaggtttggtgtttccctttcaagatgccactttcagactttattctggctctgaaggacaatccctactttggggctggatttgggctggtgggtgtgggcacagccctggccctggcccggaagggtgtccaactgggcctggtggcattccggcgccattacatgatcacactggaagtccctgctcgagacaggagctatgcctggttgcttagctggctcacccgccacagtacccgtactcagcacctcagtgtcgagacttcgtaccttcagcatgagagtggccgcatttccactaagtttgaatttgtccccagccctggaaaccattttatctggtatcgggggaaatggattcgggtagaacgaagtcgagagatgcagatgatagacttgcagacggggactccttgggaatctgtcaccttcacggccctgggcactgaccgaaaggttttcttcaacatcctggaggaagctcgagagctagccttgcagcaggaggaagggaagaccgtgatgtacacagctgtgggctctgaatggcgtccctttggctatccacgccgccggcgaccactgaattctgtggttctacaacagggtctggctgaccgaattgtcagagacgtccaggaattcatcgataaccccaagtggtacactgacagaggcattccttacagacgtggctacctgctttatgggccccctggttgcggaaagagcagttttatcacagccctggctggggaactggagcacagcatctgcctgctgagcctcacggactccagcctctctgatgaccgactcaaccacctgctgagcgtggccccgcagcagagcctggtactcctggaggatgtggatgctgcttttctcagtcgagacttggctgtggagaacccagtaaagtaccaaggcctaggtcgcctcaccttcagtggactgctcaatgccttggatggtgtggcttccaccgaggcccgcatcgtgttcatgaccaccaaccacgttgacaggctggaccctgccctgatacgcccggggcgagtggacctgaaggagtacgtgggctactgctcacactggcagctgacccagatgttccagaggttctatccagggcaggcaccttccttagctgagaactttgcagaacatgtccttcgagctacaaaccagatcagtcctgcccaggtgcagggctacttcatgctgtataaaaatgaccctgtaggggcaattcacaatgctgagtctctgaggaggtgatcaggctgggctcagctcagctctcctcctctagctcaataaacatctgccacacta

SEQ ID NO: 35942 - DNA, 583 bp, Artificial Sequence
  derived and/or modified sequence
gagacggagggccagagagtcacggcggggtctgctgggagccagccattgaaggtgctggagcagagagagatatggtattggagctgatccctatgatgaaagatctggacccttgtgtagatgttccgtgaagcaggaggtgaagacctattaaaatgccatttcaagaactacgattttaaagacagtttaggtgggaggttttcgtaacaccccagggcctgtaaggtttggtgtttccctttcaagatgccactttcagactttattctggctctgaaggacaatccctactttggggctggatttgggctggtgggtgtgggcacagccctggccctggcccggaagggtgtccaactgggcctggtggcattccggcgccattacatgatcacactggaagtccctgctcgagacaggagctatgcctggttgcttagctggctcacccgccacagtacccgtactcagcacctcagtgtcgagacttcgtaccttcagcatgagagtggccgcatttccactaagtttgaatttgtccccagccctggaaaccattttatctggtatcggggga

SEQ ID NO: 35943 - DNA, 804 bp, Artificial Sequence
  derived and/or modified sequence
aaggaggacgctgagccgtcaagattaagaaccttcacctgcgggagggcagggtgaggtaggagacaggtgggcaccagagaagaaatacgcttatcttccgggcaggagggctgaggaagagaaaggacagactaaggcagagagaaggcctggagaaacaacgggccccggcctagcgacccaggttcccacctgcctctggctctgactcaccgcgtggtcttggacagacacagtcgcttcgcttctctgggcctcagctttcctatctgtaaaatggaggtgatgacagtgtccacatcgtcgggcaggagctggatcataagagccagcgaactggaaaggcggtttgtaacctggaaggcttgggatggagcatcgtcatgattttgtcctgagagcagcaggggtctgctgggagccagccattgaaggtgctggagcagagagagatatggtattggagctgatccctatgatgaaagatctggacccttgtgtagatgttccgtgaagcaggaggttttcgtaacaccccagggcctgtaaggtttggtgtttccctttcaagatgccactttcagactttattctggctctgaaggacaatccctactttggggctggatttgggctggtgggtgtgggcacagccctggccctggcccggaagggtgtccaactgggcctggtggcattccggcgccattacatgatcacactggaagtccctgctcgagacaggagctatgcctggttgcttagctggctcacccgccacagtacccgtactcagcacct

SEQ ID NO: 35944 - DNA, 1036 bp, Artificial Sequence
  derived and/or modified sequence
cgggagggcagggtgaggtaggagacaggtgggcaccagagaagaaatacgcttatcttccgggcaggagggctgaggaagagaaaggacagactaaggcagagagaaggcctggagaaacaacgggccccggcctagcgacccaggttcccacctgcctctggctctgactcaccgcgtggtcttggacagacacagtcgcttcgcttctctgggcctcagctttcctatctgtaaaatggaggtgatgacagtgtccacatcgtcgggcaggagctggatcataagagccagcgaactggaaaggcggtttgtaacctggaaggcttgggatggagcatcgtcatgattttgtcctgagagcagcaggttttcgtaacaccccagggcctgtaaggtttggtgtttccctttcaagatgccactttcagactttattctggctctgaaggacaatccctactttggggctggatttgggctggtgggtgtgggcacagccctggccctggcccggaagggtgtccaactgggcctggtggcattccggcgccattacatgatcacactggaagtccctgctcgagacaggagctatgcctggttgcttagctggctcacccgccacagtacccgtactcagcacctcagtgtcgagacttcgtaccttcagcatgagagtggccgcatttccactaagtttgaatttgtccccagccctggaaaccattttatctggtatcgggggaaatggattcgggtagaacgaagtcgagagatgcagatgatagacttgcagacggggactccttgggaatctgtcaccttcacggccctgggcactgaccgaaaggttttcttcaacatcctggaggaagctcgagagctagccttgcagcaggaggaagggaagaccgtgatgtacacagctgtgggctctgaatggcgtccctttggctatccacgccgccggcgaccactgaattctgtggttctacaacagggtctggctgaccgaattgtcagagacgtccag

SEQ ID NO: 35945 - DNA, 2015 bp, Artificial Sequence
  derived and/or modified sequence
aaaccatgtggctggaggcgcgagctggggtgtgggcgaggttcaggagggggttcctgggtgtcgcggaggggccggggacgggagagctttgtctgtggccttccatgcataggtgttttggaattctggatcccagttctgaggctcagccgaggtcactgctgtcagctcacctccctgcatgccaggcgcagggcaaagtggccggggttcggggttggaggagaggtgtactagaaacaactttgctcttgtccctcaggatcttattgtctacgatgtgacgatccgtggagaaagtagcagatgggcagattttcatttggggagaatgagggagaaaagaacgggcattccgagccaagagcactgcatgagcaaggagttgggaggttgcttacttgttgaacatatttgttgcgtatttgcatatttgctaaacaggtagtgttaggagctaatccatgaaaggtaggtgggcgccgtattgtagagagccttgagtaccaggctgagtttatacccaattcaggggtctgctgggagccagccattgaaggtgctggagcagagagagatatggtattggagctgatccctatgatgaaagatctggacccttgtgtagatgttccgtgaagcaggaggttttcgtaacaccccagggcctgtaaggtttggtgtttccctttcaagatgccactttcagactttattctggctctgaaggacaatccctactttggggctggatttgggctggtgggtgtgggcacagccctggccctggcccggaagggtgtccaactgggcctggtggcattccggcgccattacatgatcacactggaagtccctgctcgagacaggagctatgcctggttgcttagctggctcacccgccacagtacccgtactcagcacctcagtgtcgagacttcgtaccttcagcatgagagtggccgcatttccactaagtttgaatttgtccccagccctggaaaccattttatctggtatcgggggaaatggattcgggtagaacgaagtcgagagatgcagatgatagacttgcagacggggactccttgggaatctgtcaccttcacggccctgggcactgaccgaaaggttttcttcaacatcctggaggaagctcgagagctagccttgcagcaggaggaagggaagaccgtgatgtacacagctgtgggctctgaatggcgtccctttggctatccacgccgccggcgaccactgaattctgtggttctacaacagggtctggctgaccgaattgtcagagacgtccaggaattcatcgataaccccaagtggtacactgacagaggcattccttacagacgtggctacctgctttatgggccccctggttgcggaaagagcagttttatcacagccctggctggggaactggagcacagcatctgcctgctgagcctcacggactccagcctctctgatgaccgactcaaccacctgctgagcgtggccccgcagcagagcctggtactcctggaggatgtggatgctgcttttctcagtcgagacttggctgtggagaacccagtaaagtaccaaggcctaggtcgcctcaccttcagtggactgctcaatgccttggatggtgtggcttccaccgaggcccgcatcgtgttcatgaccaccaaccacgttgacaggctggaccctgccctgatacgcccggggcgagtggacctgaaggagtacgtgggctactgctcacactggcagctgacccagatgttccagaggttctatccagggcaggcaccttccttagctgagaactttgcagaacatgtccttcgagctacaaaccagatcagtcctgcccaggtgcagggctacttcatgctgtataaaaatgaccctgtaggggcaattcacaatgctgagtctctgaggaggtgatcaggctgggctcagctcagctctcctcctctagctcaataaacatctgccacact

SEQ ID NO: 35946 - DNA, 1483 bp, Artificial Sequence
  derived and/or modified sequence
acgggttaccccaaaccatgtggctggaggcgcgagctggggggtctgctgggagccagccattgaaggtgctggagcagagagagatatggtattggagctgatccctatgatgaaagatctggacccttgtgtagatgttccgtgaagcaggaggttttcgtaacaccccagggcctgtaaggtttggtgtttccctttcaagatgccactttcagactttattctggctctgaaggacaatccctactttggggctggatttgggctggtgggtgtgggcacagccctggccctggcccggaagggtgtccaactgggcctggtggcattccggcgccattacatgatcacactggaagtccctgctcgagacaggagctatgcctggttgcttagctggctcacccgccacagtacccgtactcagcacctcagtgtcgagacttcgtaccttcagcatgagagtggccgcatttccactaagtttgaatttgtccccagccctggaaaccattttatctggtatcgggggaaatggattcgggtagaacgaagtcgagagatgcagatgatagacttgcagacggggactccttgggaatctgtcaccttcacggccctgggcactgaccgaaaggttttcttcaacatcctggaggaagctcgagagctagccttgcagcaggaggaagggaagaccgtgatgtacacagctgtgggctctgaatggcgtccctttggctatccacgccgccggcgaccactgaattctgtggttctacaacagggtctggctgaccgaattgtcagagacgtccaggaattcatcgataaccccaagtggtacactgacagaggcattccttacagacgtggctacctgctttatgggccccctggttgcggaaagagcagttttatcacagccctggctggggaactggagcacagcatctgcctgctgagcctcacggactccagcctctctgatgaccgactcaaccacctgctgagcgtggccccgcagcagagcctggtactcctggaggatgtggatgctgcttttctcagtcgagacttggctgtggagaacccagtaaagtaccaaggcctaggtcgcctcaccttcagtggactgctcaatgccttggatggtgtggcttccaccgaggcccgcatcgtgttcatgaccaccaaccacgttgacaggctggaccctgccctgatacgcccggggcgagtggacctgaaggagtacgtgggctactgctcacactggcagctgacccagatgttccagaggttctatccagggcaggcaccttccttagctgagaactttgcagaacatgtccttcgagctacaaaccagatcagtcctgcccaggtgcagggctacttcatgctgtataaaaatgaccctgtaggggcaattcacaatgctgagtctctgaggaggtgatcaggctgggctcagctc

SEQ ID NO: 35947 - DNA, 815 bp, Artificial Sequence
  derived and/or modified sequence
cccagagccggcgggagccgcatctctatggtcggccgcggctggaacggcccccggggcccgctttgtgcgaccgcctccggctcagccgcctctaggatattggggatgtggaagccactctctcttcctcttgccggctgccggggttttcgtaacaccccagggcctgtaaggtttggtgtttccctttcaagatgccactttcagactttattctggctctgaaggacaatccctactttggggctggatttgggctggtgggtgtgggcacagccctggccctggcccggaagggtgtccaactgggcctggtggcattccggcgccattacatgatcacactggaagtccctgctcgagacaggagctatgcctggttgcttagctggctcacccgccacagtacccgtactcagcacctcagtgtcgagacttcgtaccttcagcatgagagtggccgcatttccactaagtttgaatttgtccccagccctggaaaccattttatctggtatcgggggaaatggattcgggtagaacgaagtcgagagatgcagatgatagacttgcagacggggactccttgggaatctgtcaccttcacggccctgggcactgaccgaaaggttttcttcaacatcctggaggaagctcgagagctagccttgcagcaggaggaagggaagaccgtgatgtacacagctgtgggctctgaatggcgtccctttggctatccacgccgccggcgaccactgaattctgtggttctacaacagggtctggctgaccgaattgtcagagacgtccag

SEQ ID NO: 35948 - DNA, 1260 bp, Artificial Sequence
  derived and/or modified sequence
atgcccctgagcgacttcatcctggccctgaaggacaacccctacttcggcgccggcttcggcctggtgggcgtgggcaccgccctggccctggccagaaagggcgtgcagctgggcctggtggccttcagaagacactacatgatcaccctggaggtgcccgccagagacagaagctacgcctggctgctgagctggctgaccagacacagcaccagaacccagcacctgagcgtggagaccagctacctgcagcacgagagcggcagaatcagcaccaagttcgagttcgtgcccagccccggcaaccacttcatctggtacagaggcaagtggatcagagtggagagaagcagagagatgcagatgatcgacctgcagaccggcaccccctgggagagcgtgaccttcaccgccctgggcaccgacagaaaggtgttcttcaacatcctggaggaggccagagagctggccctgcagcaggaggagggcaagaccgtgatgtacaccgccgtgggcagcgagtggagacccttcggctaccccagaagaagaagacccctgaacagcgtggtgctgcagcagggcctggccgacagaatcgtgagagacgtgcaggagttcatcgacaaccccaagtggtacaccgacagaggcatcccctacagaagaggctacctgctgtacggcccccccggctgcggcaagagcagcttcatcaccgccctggccggcgagctggagcacagcatctgcctgctgagcctgaccgacagcagcctgagcgacgacagactgaaccacctgctgagcgtggccccccagcagagcctggtgctgctggaggacgtggacgccgccttcctgagcagagacctggccgtggagaaccccgtgaagtaccagggcctgggcagactgaccttcagcggcctgctgaacgccctggacggcgtggccagcaccgaggccagaatcgtgttcatgaccaccaaccacgtggacagactggaccccgccctgatcagacccggcagagtggacctgaaggagtacgtgggctactgcagccactggcagctgacccagatgttccagagattctaccccggccaggcccccagcctggccgagaacttcgccgagcacgtgctgagagccaccaaccagatcagccccgcccaggtgcagggctacttcatgctgtacaagaacgaccccgtgggcgccatccacaacgccgagagcctgagaagatag

SEQ ID NO: 35949 - DNA, 333 bp, Artificial Sequence
  derived and/or modified sequence
atgcccctgagcgacttcatcctggccctgaaggacaacccctacttcggcgccggcttcggcctggtgggcgtgggcaccgccctggccctggccagaaagggcgtgcagctgggcctggtggccttcagaagacactacatgatcaccctggaggtgcccgccagagacagaagctacgcctggctgctgagctggctgaccagacacagcaccagaacccagcacctgagcgtggagaccagctacctgcagcacgagagcggcagaatcagcaccaagttcgagttcgtgcccagccccggcaaccacttcatctggtacagaggctag

SEQ ID NO: 35950 - DNA, 234 bp, Artificial Sequence
  derived and/or modified sequence
atgcccctgagcgacttcatcctggccctgaaggacaacccctacttcggcgccggcttcggcctggtgggcgtgggcaccgccctggccctggccagaaagggcgtgcagctgggcctggtggccttcagaagacactacatgatcaccctggaggtgcccgccagagacagaagctacgcctggctgctgagctggctgaccagacacagcaccagaacccagcacctgtag

SEQ ID NO: 35951 - DNA, 621 bp, Artificial Sequence
  derived and/or modified sequence
atgcccctgagcgacttcatcctggccctgaaggacaacccctacttcggcgccggcttcggcctggtgggcgtgggcaccgccctggccctggccagaaagggcgtgcagctgggcctggtggccttcagaagacactacatgatcaccctggaggtgcccgccagagacagaagctacgcctggctgctgagctggctgaccagacacagcaccagaacccagcacctgagcgtggagaccagctacctgcagcacgagagcggcagaatcagcaccaagttcgagttcgtgcccagccccggcaaccacttcatctggtacagaggcaagtggatcagagtggagagaagcagagagatgcagatgatcgacctgcagaccggcaccccctgggagagcgtgaccttcaccgccctgggcaccgacagaaaggtgttcttcaacatcctggaggaggccagagagctggccctgcagcaggaggagggcaagaccgtgatgtacaccgccgtgggcagcgagtggagacccttcggctaccccagaagaagaagacccctgaacagcgtggtgctgcagcagggcctggccgacagaatcgtgagagacgtgcagtag

SEQ ID NO: 35952 - protein, 602 aa, Artificial Sequence
  derived and/or modified sequence
MRPKRLGRCCAGSRLGPGDPAALTCAPSPSASPAPEPSAQPQARGTGQRVGSRATSGSQFLSEARTGARPASEAGAKAGARRPSAFSAIQGDVRSMPDNSDAPWTRFVFQGPFGSRATGRGTGKAAGIWKTPAAYVGRRPGVSGPERAAFIRELEEALCPNLPPPVKKITQEDVKVMLYLLEEVCTAFLIQLLPPVWESVTYGMVLQRERDLNTAARIGQSLVKQNSVLMEENSKLEALLGSAKEEILYLRHQVNLRDELLQLYSDSDEEDEDEEEEEEEKEAEEEQEEEEAEEDLQCAHPCDAPKLISQEALLHQHHCPQLEALQEKLRLLEEENHQLREEASQLDTLEDEEQMLILECVEQFSEASQQMAELSEVLVLRLENYERQQQEVARLQAQVLKLQQRCRMETLPGFQETLAEELRTSLRRMISDPVYFMERNYEMPRGDTSSLRYDFRYSEDREQVRGFEAEEGLMLAADIMRGEDFTPAEEFVPQEELGAAKKVPAEEGVMEEAELVSEETEGWEEVELELDEATRMNVVTSALEASGLGPSHLDMNYVLQQLANWQDAHYRRQLRWKMLQKGECPHGALPAASRTSCRSSCR

SEQ ID NO: 35953 - DNA, 1809 bp, Artificial Sequence
  derived and/or modified sequence
atgcgccctaagagactggggagatgctgtgccggttcccgccttggtcctggagatcccgcggcactgacctgcgcccccagcccttcagctagccccgccccggagccatctgcgcaacctcaggccaggggaacaggacagagggtgggatcacgtgcaacctcgggatctcagttcctatccgaggccagaaccggagccagacctgcaagtgaagccggcgccaaagccggagctaggcgcccctccgcttttagcgccatacagggcgacgttcgttcgatgccagataactccgatgctccctggacccgattcgtctttcagggaccttttggaagcagagctactggtcgtggcaccgggaaggccgccgggatctggaagacaccggccgcttatgtaggcagacgtcctggggtgagtggccccgagagggctgctttcatacgcgagctagaggaagcactgtgtcctaacttgcccccccccgttaaaaagattacgcaggaggatgtgaaggttatgctctacctgctggaggaggtgtgcaccgctttcttgattcagctcctaccccctgtctgggagtccgtcacatatgggatggtactgcagagggaacgggacttgaacactgccgcccggattggccagagcctggtcaagcagaacagtgtactcatggaagagaatagcaaactggaagcactcttagggtccgccaaagaggagatcctgtacctccgccaccaggttaacttgagggatgaactcctgcaactgtactcagatagcgacgaagaggatgaggatgaggaagaagaggaggaggaaaaagaggcagaggaggagcaggaagaagaggaggccgaggaggatctccaatgcgcacacccctgcgatgcccccaagctgatcagtcaagaggccctgctacatcagcatcactgtccacagctggaggcccttcaggaaaagcttcgcttgctggaggaggagaatcaccagctccgggaagaagcatcccagcttgacacactggaagacgaggagcagatgcttattctggagtgcgtggagcagttctcagaagcatcccaacagatggccgaactgagcgaagtactggttttaagacttgaaaattatgagcggcagcagcaagaggtggctagattacaggctcaggtgttaaaactgcagcagcgctgccgtatggaaacgctcccaggatttcaggagaccctggcagaagagctccgaaccagcctgagaagaatgatcagtgatcccgtctatttcatggaaagaaactatgagatgcctaggggggatactagtagcttgaggtacgatttccggtattccgaagaccgcgagcaggtgcggggttttgaagctgaggagggtttgatgctggcagctgatattatgcgtggtgaggacttcacaccagccgaggagtttgtacctcaggaggaactcggtgcagctaagaaggtgcctgcagaagagggagtcatggaagaagcagagcttgtaagtgaggagaccgaggggtgggaagaagtagaattggagctggatgaggcaactcggatgaatgtggtcacctctgccctggaggcgagtggcttgggtccttctcacctggacatgaactacgttcttcaacagctggctaattggcaagacgctcactatcggcgccagctgcgctggaagatgctgcagaagggtgaatgtcctcatggcgccctaccggcggcaagtcgcacctcatgccgcagctcttgcagatag

SEQ ID NO: 35954 - DNA, 3880 bp, Artificial Sequence
  derived and/or modified sequence
cagactcgagatgcgcccgaagaggttgggccggtgctgcgcggggagccggctcggacccggggacccagcagcactcacctgtgcaccttcgccctcagccagtcccgctccggagccctctgcgcagccgcaggcacggggcactggacagagagtaggatcccgagccacctctggatcccagttcctctcggaagcccgcaccggagctcgcccggcctcggaggctggagccaaggcaggagcccggcgcccgtccgcattctcggccatccaaggggatgtccggtctatgcccgacaattcggacgcgccgtggacccgcttcgtattccaagggccgtttggttcccgggccactggccgggggactggaaaggcagcgggcatctggaagacgccagccgcctacgttggccggcgacccggggtgtccggccctgagcgcgccgcctttattcgggagctggaggaagcactgtgtcctaacctacctccgccagtcaaaaagatcacccaggaagacgtcaaagtgatgttatatttgctggaggaggtgtgtactgccttcctgatccagcttctcccacctgtctgggagagcgttacctatgggatggtcctgcagagagagagggacctgaacactgcagctcgcatcggccagtccctggtgaaacagaacagtgttttgatggaggagaacagcaagctggaagccctgctgggctcagccaaggaggagattttatacctcagacaccaggtgaacttgcgggatgagctcctccagctctactcagattctgatgaggaggatgaggatgaagaagaggaggaggaagaaaaggaggcagaagaggaacaggaagaagaagaagcagaggaagacctgcagtgtgctcatccctgtgatgcccctaagctgatttcgcaggaggcattgctgcaccagcaccactgcccacagctggaagccttgcaggagaagctgaggctgctggaggaggagaatcatcagctgagagaagaggcctctcaactcgacactcttgaggatgaggaacagatgctcattctggagtgtgtggagcagttttcggaggccagccaacagatggctgagctgtcggaggtgctggtgctcaggctggaaaactatgaacggcagcagcaggaggtcgctcggctgcaggcccaggtgctgaagctgcagcagcgctgccggatggagactcttcctggtttccaggagacgctggctgaggagctcagaacgtctctaaggaggatgatctcagaccctgtgtattttatggagaggaattatgagatgcccagaggggacacatccagcctaaggtatgattttcgctacagtgaggatcgagagcaggtgcgggggtttgaggctgaggaagggttgatgctggcagcggatatcatgcggggggaagatttcacgcctgcggaggagttcgtgccccaggaggagctgggggctgccaagaaggtgccggctgaggaaggggtgatggaagaggcagagctggtgtcagaggagaccgagggctgggaggaggtggaactggagctggatgaggcaacgcggatgaacgtggtgacatcagccctggaggccagcggcttgggcccttcacacctggacatgaattatgtcctccagcagctggccaactggcaagatgcccattacaggcggcagctgaggtggaagatgctccagaaaggtgagtgcccccacggggccctccctgccgccagccggacaagctgcagatcgtcgtgccgatgaaaagagagggtggataagctccccgagtgctcacctgccccagcctggctctacctgctgtgcttatttgcatggactttgcatatcatttgcatagacacctctgatccccttcagtgggaaccgtagtgtcagtgctcatttatgtggcatttgcttaggattccagatctccatccacttttctcctgggggctgggctgggggttagggctgggactgtgcccccacactgcgcctcagcttcccatctctgcccgcttgcttcccctgcccccaacccctgcctcctctatcccccaggctctccaactctgcagcagtggcagcagcagtcaaaacaaacacggggggcggtgggtgggatggtggagcagcccgggggctgacccaggctggaggacagggccagccaccctcccacggcctgggaggaagagaggccttctgggactgcccaggctatggggacaaaggccttcaccagcaagggccacagttggaacagtcccctgggtgtcagaaggtgggctagggcctcctgcagggttgtggggtggaacagggtctcctctccccagccagaaaccccaaagtctgggagctgcaccttccgagtgcaggccatgtgagccctgcctctttaaggagccgcaggacatgaaagatgaccttgtgacactcatgcacagcagccattgcacgtgcatcagctcccatcagcctcattccgtggcaggtgatgtgtccccattggttaggtgaggagggtgaggctcagagagctaaggacacttgtttggggccacacagccggggtagatctgagcccgtcctctctactcctgtgctgtagcaccttcactggcccatccctcccctctagtgctgtcctggtacccgtcccagcctgtccccattctcatggccctttggtcactgccgggtggaatagcactggcttcagcaggcgtgtcatgtaagcttgtgcaggttataaactgaaccatgacctttatggcgcatgcagggggcaacctgcataattatcaatggcgactttccgtgtccttctgatacagttgatcagacccctgcccaccgcccaggccaggcctgtggtcatcaatgccccagttcacatccacctgcttctcttccaggctttgctgttccccagcagcctgcagaggccccacagacagcttgaggcccctccttctgctgcctggccaagccccacacccgcagaccctccttcccatcctctgaaatgggaccctgtgtctgtcaccagcccaccctctgtgttcatgaacctgggctggagcttggggacccctccctgcccctggcttcctcttccatgttctgccctttcccacatgttggaggcttttccaacgtcttcagggacaggcggtaggaaccccggccctcgctctgcagctggtgcaaaagctgtggctgccaggtctgggccacatggcagcccagggggcaggagaagcccgggagaggcccactggctaccagactcagccctgagcagggaacagggcccagcttccaccggcagggagttgtgagcgccttcccaacaatgtgcccctcaccccttgatgcccatgctaatggtagccaccctggttcttgttgacttgagggacctggctgtcttccctgttcttcatcctttcttctcagtccctacctactgtttgtaaccacaagtgtctctgtgtgtgggtgggtgagggcccctctgcccagtggtgtgtctcctctccctccctccctcttctgccagtggcctgggggtgtccaggctcccatccgtggcccagcccctctcccctctgtcttgatccccccctccctgcccctggcttcctcttccatgttctgccctttcccacacctttgttcctcaatagctgggggctgggactgaggcctcctgcaggtacctgccccccttcacacagcacctctcaatctcctattgcttgtcagcctgtgtgcgtgtggtgcaggaaataaaggatctataccctcctg

SEQ ID NO: 35955 - DNA, 1809 bp, Artificial Sequence
  derived and/or modified sequence
atgaggcccaagaggctgggccgctgctgtgccggcagccggctgggccctggggaccctgctgccctgacctgtgcccccagccccagcgccagccctgcccctgagcccagcgcccagccccaggcccggggcaccggccagagggtgggcagccgggccaccagcggcagccagttcctgtctgaggccaggactggagcccggcctgccagcgaggccggggccaaggccggggcccggcggcccagcgccttcagcgccatccagggagatgtgcgctccatgccagacaacagtgatgccccctggaccaggtttgtgttccagggccccttcggcagccgggccaccggccggggcaccgggaaggccgccggcatctggaagaccccagctgcctacgtgggccggcggcctggggtgtctggccctgagcgggccgccttcatccgggagctggaggaggccctgtgccccaacctgcccccacctgtgaagaagatcacccaggaggatgtgaaggtgatgctgtacctgctggaggaggtgtgcacagccttcctgatccagctgctgccccctgtgtgggagagcgtgacctacggcatggtgctgcagcgggagcgggacctgaacacagctgcccgcatcggccagagcctggtgaagcagaacagcgtgctgatggaggagaacagcaagctggaggccctgctgggcagcgccaaggaggagatcctgtacctgcggcaccaggtgaacctgagagatgagctgctgcagctgtacagcgacagtgatgaggaggatgaagatgaggaggaggaggaggaggagaaggaggccgaggaggagcaggaggaggaggaggccgaggaggacctgcagtgtgcccacccctgtgatgcccccaagctgatcagccaggaggccctgctgcaccagcaccactgcccccagctggaggccctgcaggagaagctgcggctgctggaggaggagaaccaccagctgcgggaggaggccagccagctggacaccctggaggatgaggagcagatgctgatcctggagtgtgtggagcagttcagcgaggccagccagcagatggccgagctgtctgaggtgctggtgctgcggctggagaactatgagcggcagcagcaggaggtggcccggctgcaggcccaggtgctgaagctgcagcagcgctgcaggatggagaccctgcccggcttccaggagaccctggccgaggagctgcggaccagcctgcggaggatgatcagtgaccctgtgtacttcatggagagaaattatgagatgcccaggggggacaccagcagcctgcgctatgacttccgctacagtgaagatcgggagcaggtgcggggctttgaagctgaggagggcctgatgctggccgctgacatcatgagaggagaggacttcaccccagctgaggagtttgtgccccaggaggagctgggcgccgccaagaaggtgcctgctgaggagggcgtgatggaggaggccgagctggtgtctgaggagacagagggctgggaggaggtggagctggagctggatgaggccaccaggatgaatgtggtgaccagcgccctggaggccagcggcctgggccccagccacctggacatgaactacgtgctgcagcagctggccaactggcaggatgcccactaccgccggcagctgcgctggaagatgctgcagaagggagaatgtccccacggggccctgcctgctgccagcaggaccagctgccgcagcagctgcaggtag

SEQ ID NO: 35956 - DNA, 1809 bp, Artificial Sequence
  derived and/or modified sequence
atgcggcccaagcggctgggccggtgctgcgccggcagccggctgggtcctggagaccctgcagcactgacgtgcgctccttcgcctagtgcatcacccgctcccgagcccagcgcccaaccgcaggctaggggaactgggcagcgcgtgggatcccgcgcaacctccggaagccaattcctctctgaagctagaaccggagccagaccagcctcggaggcgggggctaaagccggggcaagaagaccgtccgcgttttcagctatccagggcgatgtgcgaagcatgccagacaattccgacgccccctggacgagattcgtattccagggcccatttggctcgcgggccactggtaggggtaccggaaaggctgcaggtatttggaaaacaccggccgcctatgtgggcagaagaccgggggtgagcggcccagagcgtgcagctttcataagagagctcgaggaagccctgtgtccgaacctgcctcctccggtcaaaaaaatcacacaagaagacgtcaaggtaatgctgtatctgctagaagaagtgtgcaccgcatttctcatccagctgctccctccagtgtgggagtctgtgacatacggaatggtgctgcagagggaaagagacctgaatactgcagcccgaattggacagtcgcttgtgaaacagaatagcgtgctcatggaggagaattcgaaacttgaggcgttgctgggctctgccaaggaggaaattctatatctgcggcatcaggtcaacctgcgagatgagttgctgcagttgtattcagacagcgatgaggaggacgaggacgaagaggaggaagaggaagaaaaagaggccgaggaggaacaagaagaagaggaggcagaggaggacctgcagtgcgcacacccctgtgacgccccaaagttgatcagtcaggaagcgctccttcatcagcatcactgcccacagctcgaagctttgcaggagaaactgcgcttgctcgaggaagagaaccaccagctgagagaagaggcttcacagctggatactctggaagacgaggaacagatgctcatcctggagtgcgtggaacagttctccgaggcttcacagcaaatggcggagcttagcgaggtgctggtgcttaggctggagaattacgagagacagcaacaggaagtggcgcggcttcaggcacaggttctcaaactgcagcagaggtgcaggatggagactttgcccggtttccaggaaactctggccgaggagctccggacatctctgagacgtatgatcagcgatcctgtgtatttcatggagaggaattacgaaatgccgagaggagacaccagctctctgcggtatgattttaggtatagcgaagatagggagcaggtccgtgggtttgaggcggaagagggcctgatgctggccgccgacattatgcgcggggaggacttcaccccagctgaggagttcgttccacaggaagagctgggagccgctaagaaggttcccgcagaagagggcgtaatggaagaggcagagttagtcagcgaggagacagagggatgggaagaagtggaattggaactggacgaagctaccagaatgaacgtcgtgacatccgcactggaagccagcggtctgggcccaagtcaccttgatatgaactatgtcctccagcaactggccaattggcaggacgctcactatagaaggcagcttcggtggaagatgcttcagaaaggggagtgcccacacggtgcacttccagcagccagcaggacatcatgcaggtctagttgccgctag

SEQ ID NO: 35957 - DNA, 1809 bp, Artificial Sequence
  derived and/or modified sequence
atgaggccaaaaagactgggcagatgttgcgcaggatctcgcctcggcccaggggacccggctgctctgacctgtgccccatccccttccgcaagtccggcacctgagccgtcagcacagccacaggcgagaggcacagggcagcgggtgggctccagggcaacgagtggtagccagttcctgtcagaggctaggaccggagcaaggcccgcaagcgaggctggcgctaaggccggagccaggagaccctctgctttttcagccatccagggcgatgtgagatcaatgcctgataactccgacgccccatggactcgctttgttttccaggggccttttggcagtagggctacaggcagggggactggcaaggccgcaggaatttggaaaaccccagcggcttatgtgggcaggcggcctggcgtttcgggacccgagagggctgcattcattcgggagctcgaggaggcattatgccctaatctgccaccaccagtaaagaagatcacccaggaagatgtgaaggtgatgctgtacttgttagaggaggtctgtaccgcctttctgatccaactgctcccaccggtgtgggaaagcgtgacatacggaatggtcttgcagcgcgagcgcgatttgaacaccgctgctagaataggccagtctctcgttaagcagaacagcgttcttatggaggaaaactccaaactggaggccctccttggctcggccaaagaagagatcctttatctgcgacaccaggtcaacctgagggatgaattactgcagctgtactccgattccgatgaggaggatgaagacgaggaggaggaggaagaggagaaagaagccgaggaggagcaggaggaagaagaagctgaggaagacctccagtgcgctcatccttgcgatgcacccaagctcatatcacaagaagcactccttcatcaacaccactgcccacagctggaggcattacaagagaaactgcgactgctggaggaggagaaccaccagttgcgcgaggaagctagccagctcgacactctggaggacgaagagcagatgctgattcttgaatgtgtggagcaattttccgaggcctctcaacagatggcggagctttcggaagtgctcgtcctgcggctggagaattacgagcgccagcaacaagaggtcgccaggctgcaagcccaggtactcaaactgcaacagcggtgtaggatggagactctccccggattccaagagactcttgcagaggagctgcgtacctctctcaggcggatgatctcagacccagtgtacttcatggagaggaactacgaaatgccacggggtgatacttcctccctgaggtatgatttcaggtacagcgaggacagagaacaggtgcggggtttcgaggcagaagaggggctgatgctcgccgcagacattatgcggggtgaggacttcaccccggcagaagagttcgtgcctcaggaagagctgggagccgcaaaaaaggtgccagccgaggagggggtgatggaagaagccgagctggttagcgaggaaacggagggatgggaggaagtggagctggagctggatgaagcaacaaggatgaacgtggtgacatctgctctggaggccagcgggctcggccctagccatctggatatgaattacgtgctgcagcaactcgctaattggcaagacgcacattatagaaggcaacttcggtggaaaatgctccaaaaaggcgaatgcccccacggagccctgcccgctgcctcaaggactagctgtcggtcctcttgtcgctag

SEQ ID NO: 35958 - DNA, 1809 bp, Artificial Sequence
  derived and/or modified sequence
atgagacccaagagactgggcagatgctgcgccggcagcagactgggccccggcgaccccgccgccctgacctgcgcccccagccccagcgccagccccgcccccgagcccagcgcccagccccaggccagaggcaccggccagagagtgggcagcagagccaccagcggcagccagttcctgagcgaggccagaaccggcgccagacccgccagcgaggccggcgccaaggccggcgccagaagacccagcgccttcagcgccatccagggcgacgtgagaagcatgcccgacaacagcgacgccccctggaccagattcgtgttccagggccccttcggcagcagagccaccggcagaggcaccggcaaggccgccggcatctggaagacccccgccgcctacgtgggcagaagacccggcgtgagcggccccgagagagccgccttcatcagagagctggaggaggccctgtgccccaacctgcccccccccgtgaagaagatcacccaggaggacgtgaaggtgatgctgtacctgctggaggaggtgtgcaccgccttcctgatccagctgctgccccccgtgtgggagagcgtgacctacggcatggtgctgcagagagagagagacctgaacaccgccgccagaatcggccagagcctggtgaagcagaacagcgtgctgatggaggagaacagcaagctggaggccctgctgggcagcgccaaggaggagatcctgtacctgagacaccaggtgaacctgagagacgagctgctgcagctgtacagcgacagcgacgaggaggacgaggacgaggaggaggaggaggaggagaaggaggccgaggaggagcaggaggaggaggaggccgaggaggacctgcagtgcgcccacccctgcgacgcccccaagctgatcagccaggaggccctgctgcaccagcaccactgcccccagctggaggccctgcaggagaagctgagactgctggaggaggagaaccaccagctgagagaggaggccagccagctggacaccctggaggacgaggagcagatgctgatcctggagtgcgtggagcagttcagcgaggccagccagcagatggccgagctgagcgaggtgctggtgctgagactggagaactacgagagacagcagcaggaggtggccagactgcaggcccaggtgctgaagctgcagcagagatgcagaatggagaccctgcccggcttccaggagaccctggccgaggagctgagaaccagcctgagaagaatgatcagcgaccccgtgtacttcatggagagaaactacgagatgcccagaggcgacaccagcagcctgagatacgacttcagatacagcgaggacagagagcaggtgagaggcttcgaggccgaggagggcctgatgctggccgccgacatcatgagaggcgaggacttcacccccgccgaggagttcgtgccccaggaggagctgggcgccgccaagaaggtgcccgccgaggagggcgtgatggaggaggccgagctggtgagcgaggagaccgagggctgggaggaggtggagctggagctggacgaggccaccagaatgaacgtggtgaccagcgccctggaggccagcggcctgggccccagccacctggacatgaactacgtgctgcagcagctggccaactggcaggacgcccactacagaagacagctgagatggaagatgctgcagaagggcgagtgcccccacggcgccctgcccgccgccagcagaaccagctgcagaagcagctgcagatag

SEQ ID NO: 35959 - protein, 594 aa, Artificial Sequence
  derived and/or modified sequence
MRPKRLGRCCAGSRLGPGDPAALTCAPSPSASPAPEPSAQPQARGTGQRVGSRATSGSQFLSEARTGARPASEAGAKAGARRPSAFSAIQGDVRSMPDNSDAPWTRFVFQGPFGSRATGRGTGKAAGIWKTPAAYVGRRPGVSGPERAAFIRELEEALCPNLPPPVKKITQEDVKVMLYLLEELLPPVWESVTYGMVLQRERDLNTAARIGQSLVKQNSVLMEENSKLEALLGSAKEEILYLRHQVNLRDELLQLYSDSDEEDEDEEEEEEEKEAEEEQEEEEAEEDLQCAHPCDAPKLISQEALLHQHHCPQLEALQEKLRLLEEENHQLREEASQLDTLEDEEQMLILECVEQFSEASQQMAELSEVLVLRLENYERQQQEVARLQAQVLKLQQRCRMETLPGFQETLAEELRTSLRRMISDPVYFMERNYEMPRGDTSSLRYDFRYSEDREQVRGFEAEEGLMLAADIMRGEDFTPAEEFVPQEELGAAKKVPAEEGVMEEAELVSEETEGWEEVELELDEATRMNVVTSALEASGLGPSHLDMNYVLQQLANWQDAHYRRQLRWKMLQKGECPHGALPAASRTSCRSSCR

SEQ ID NO: 35960 - DNA, 1785 bp, Artificial Sequence
  derived and/or modified sequence
atgcgccctaaacgtctcggaaggtgctgcgctggaagtcgactcggcccgggcgacccggccgccttaacatgtgccccatccccatccgcatcccccgccccggagccctccgctcagccccaagcccgggggactgggcaacgagttgggtcccgagcgacctcaggctcccagttcctgagtgaagcccgcaccggggctagacccgcgtcagaagcgggagccaaggccggcgctcggcggccctcggcattctcagcaatccaaggcgacgtgcggagcatgcccgacaacagtgatgccccctggactagattcgtgttccagggccccttcggaagccgagcaacaggcaggggcacgggaaaagctgcggggatctggaagaccccagctgcttacgtcggacgacgcccaggggtctccggcccagaacgggccgcgttcattcgggagctcgaagaggccctgtgtccaaacctacccccccctgttaaaaagattactcaggaggatgtgaaagtaatgctctacttgctcgaggaactgctgccacctgtctgggagtctgtcacatacggcatggtgctacagcgcgagagagacctcaataccgcggctaggatcgggcagagcctggtgaagcaaaatagcgtgttgatggaggaaaactccaagctcgaggctttactcggcagcgcaaaggaagagatcctgtaccttagacatcaggtgaacctgcgcgacgagctcttgcagctttacagcgattctgatgaggaggacgaggatgaggaagaggaggaagaggagaaggaagcagaggaggagcaagaagaagaggaggcggaagaggacttacagtgcgctcatccgtgcgatgctccaaagctgataagtcaagaggcattactgcaccagcaccactgtccacagctggaggccctgcaagagaaacttaggctgcttgaggaggagaaccaccaactgcgggaagaggcaagccagctggatactctggaagatgaggagcagatgctcattctagagtgtgtcgagcagttctcagaggcaagtcagcagatggctgagctctccgaagtgctggtgttacgacttgaaaactacgaacggcagcagcaggaagtcgcccgtttgcaggctcaggtgttgaagcttcagcagaggtgccggatggaaacgctgccaggctttcaagaaaccctcgcggaggagctgaggacctccctccgcagaatgatttccgatccagtctatttcatggaaaggaattatgaaatgccccggggggatactagctccctgcggtatgacttcaggtactcggaggatagagaacaagtgagggggtttgaagccgaagagggattgatgctagctgctgacatcatgaggggcgaggactttacacctgcagaggagttcgtccctcaagaagagctgggggctgcaaagaaggtgccagcagaggaaggcgtcatggaagaagctgagctggtgtccgaagaaaccgaagggtgggaggaggtagaacttgaactggatgaggccaccagaatgaatgttgtcacatcagcactggaggccagcggactggggccctcccacttggatatgaattacgtcttacaacaactggcgaactggcaggatgcgcattaccgtcgccagttgcgttggaagatgctgcagaagggcgagtgtcctcacggagccctgccagccgcgagccgaacatcctgtcggtcctcatgccggtag

SEQ ID NO: 35961 - DNA, 5683 bp, Artificial Sequence
  derived and/or modified sequence
cagactcgagatgcgcccgaagaggttgggccggtgctgcgcggggagccggctcggacccggggacccagcagcactcacctgtgcaccttcgccctcagccagtcccgctccggagccctctgcgcagccgcaggcacggggcactggacagagagtaggatcccgagccacctctggatcccagttcctctcggaagcccgcaccggagctcgcccggcctcggaggctggagccaaggcaggagcccggcgcccgtccgcattctcggccatccaaggggatgtccggtctatgcccgacaattcggacgcgccgtggacccgcttcgtattccaagggccgtttggttcccgggccactggccgggggactggaaaggcagcgggcatctggaagacgccagccgcctacgttggccggcgacccggggtgtccggccctgagcgcgccgcctttattcgggagctggaggaagcactgtgtcctaacctacctccgccagtcaaaaagatcacccaggaagacgtcaaagtgatgttatatttgctggaggagcttctcccacctgtctgggagagcgttacctatgggatggtcctgcagagagagagggacctgaacactgcagctcgcatcggccagtccctggtgaaacagaacagtgttttgatggaggagaacagcaagctggaagccctgctgggctcagccaaggaggagattttatacctcagacaccaggtgaacttgcgggatgagctcctccagctctactcagattctgatgaggaggatgaggatgaagaagaggaggaggaagaaaaggaggcagaagaggaacaggaagaagaagaagcagaggaagacctgcagtgtgctcatccctgtgatgcccctaagctgatttcgcaggaggcattgctgcaccagcaccactgcccacagctggaagccttgcaggagaagctgaggctgctggaggaggagaatcatcagctgagagaagaggcctctcaactcgacactcttgaggatgaggaacagatgctcattctggagtgtgtggagcagttttcggaggccagccaacagatggctgagctgtcggaggtgctggtgctcaggctggaaaactatgaacggcagcagcaggaggtcgctcggctgcaggcccaggtgctgaagctgcagcagcgctgccggatggagactcttcctggtttccaggagacgctggctgaggagctcagaacgtctctaaggaggatgatctcagaccctgtgtattttatggagaggaattatgagatgcccagaggggacacatccagcctaaggtatgattttcgctacagtgaggatcgagagcaggtgcgggggtttgaggctgaggaagggttgatgctggcagcggatatcatgcggggggaagatttcacgcctgcggaggagttcgtgccccaggaggagctgggggctgccaagaaggtgccggctgaggaaggggtgatggaagaggcagagctggtgtcagaggagaccgagggctgggaggaggtggaactggagctggatgaggcaacgcggatgaacgtggtgacatcagccctggaggccagcggcttgggcccttcacacctggacatgaattatgtcctccagcagctggccaactggcaagatgcccattacaggcggcagctgaggtggaagatgctccagaaaggtgagtgcccccacggggccctccctgccgccagccggacaagctgcagatcgtcgtgccgatgaaaagagagggtggataagctccccgagtgctcacctgccccagcctggctctacctgctgtgcttatttgcatggactttgcatatcatttgcatagacacctctgatccccttcagtgggaaccgtagtgtcagtgctcatttatgtggcatttgcttaggattccagatctccatccacttttctcctgggggctgggctgggggttagggctgggactgtgcccccacactgcgcctcagcttcccatctctgcccgcttgcttcccctgcccccaacccctgcctcctctatcccccaggctctccaactctgcagcagtggcagcagcagtcaaaacaaacacggggggcggtgggtgggatggtggagcagcccgggggctgacccaggctggaggacagggccagccaccctcccacggcctgggaggaagagaggccttctgggactgcccaggctatggggacaaaggccttcaccagcaagggccacagttggaacagtcccctgggtgtcagaaggtgggctagggcctcctgcagggttgtggggtggaacagggtctcctctccccagccagaaaccccaaagtctgggagctgcaccttccgagtgcaggccatgtgagccctgcctctttaaggagccgcaggacatgaaagatgaccttgtgacactcatgcacagcagccattgcacgtgcatcagctcccatcagcctcattccgtggcaggtgatgtgtccccattggttaggtgaggagggtgaggctcagagagctaaggacacttgtttggggccacacagccggggtagatctgagcccgtcctctctactcctgtgctgtagcaccttcactggcccatccctcccctctagtgctgtcctggtacccgtcccagcctgtccccattctcatggccctttggtcactgccgggtggaatagcactggcttcagcaggcgtgtcatgtaagcttgtgcaggttataaactgaaccatgacctttatggcgcatgcagggggcaacctgcataattatcaatggcgactttccgtgtccttctgatacagttgatcagacccctgcccaccgcccaggccaggcctgtggtcatcaatgccccagttcacatccacctgcttctcttccaggctttgctgttccccagcagcctgcagaggccccacagacagcttgaggcccctccttctgctgcctggccaagccccacacccgcagaccctccttcccatcctctgaaatgggaccctgtgtctgtcaccagcccaccctctgtgttcatgaacctgggctggagcttggggacccctccctgcccctggcttcctcttccatgttctgccctttcccacatgttggaggcttttccaacgtcttcagggacaggcggtaggaaccccggccctcgctctgcagctggtgcaaaagctgtggctgccaggtctgggccacatggcagcccagggggcaggagaagcccgggagaggcccactggctaccagactcagccctgagcagggaacagggcccagcttccaccggcagggagttgtgagcgccttcccaacaatgtgcccctcaccccttgatgcccatgctaatggtagccaccctggttcttgttgacttgagggacctggctgtcttccctgttcttcatcctttcttctcagtccctacctactgtttgtaaccacaagtgtctctgtgtgtgggtgggtgagggcccctctgcccagtggtgtgtctcctctccctccctccctcttctgccagtggcctgggggtgtccaggctcccatccgtggcccagcccctctcccctctgtcttgatccccccctccctgcccctggcttcctcttccatgttctgccctttcccacacctttgttcctcaatagctgggggctgggactgaggcctcctgcaggtacctgccccccttcacacagcacctctcaatctcctattgcttgtcagcctgtgtgcgtgtggtgcaggaaataaaggatctataccctcctggcccagcctccagctgtctctctagggagtgtgtgtgtgcacttggcagggcgaagttgtagagaaagggtggatgctaatattgaagtatgtgccgaggactcctattaaatacgccgtttaatcatagcagcagctcctagagggcggtgggtgatgtcataagtgtctgttggatggagaaactcaggccagagtaggttaagtgatgccctcaccagcagatcatggctagtgtggagctgggatttgagctcatgcttccctgatcctttcaccccagagactgactcagtggcctggctgtgaaagataggatgggagagagtcacccactgtcttagggtgaagtccccagagcagacctggaacagggtttaggaacaagtatagtcgccctccgtatcctcaggctctgcatccgtggagtcaactaaccacagatagaaaatatttgggggaggctgggtgcagtggctcatgcctgtaatcctagcactttgggaggccgaggtgggtggatcatttgaggtcaggagttcgagaccagcctggccaacatggtgaaaccccgtctccactaaaaatacaaaaattagctgggcgtggtggtgggtgcctgtaatcccagctacttgggaggctgaggcaggaggatcacttgaacccaggaggcagaggttgcagtgagcggagatcatgccactgcactccagtctgggcaacaacagcgagactccatttgaaaacacaagaaaatatctgggggaggccaggcgcggtggctcatgcctgtaatcccagcactttgggaggctgaggtgggtggatcacttgaggtcaggagttcgagaccagcctggtcaacatggtgaaaccccgtctctactaaaaatacaaaaaaaattagctgggcatggtggcagcccctgtaatcccagctacttgggaggctgaggtgagaggatcacttgagcttggaaggttgaggttgcagtgagctgaggttgcaccactgtactccaacctgggtgacagagtaagaccctgtctcaaaaaaagagaaaagaaaatgacagacaaaccagacatgggggaaattgccagctttgataaagctttgaaggaaacggagatgcaggagaacaccttgtggaccagagaccactgagcaggagaagcagtgaaatttcctaaaatctggaggattccctgcccctgttatcttcaagtccccagtggtgatgtggaagaaaagcaacctgcaaggtggatgcaagccacaagctgctctgtgaacctgggcacctcacacagatgccactggcctgtgggtctctgaggggacccgcaaatgggactgccaaattctctggtttgctccaggatattatagaaaattatttatatgaatagtaaaaataaaacacactttgtggcccccctgccaaaagaatatcattgagaagattattgctgtggctaaccgggtctcagtcctgctgggaactctgggggacagtagaatatatctcagagtagcctgggtgaggtggctcacacctgtaatcccagcacattgggagggcgaggcaggtggatcacctgaggtcaggagttcgagaccagcctgaccaatggagaaaccccgtctccactaaagatacaaaattaactgggcatggtggcacacatgcctgtaatcccagctactcgggaggctgagacaggagaatcgcttgaatccaggaggtggaggttgcggtgagctgagattgcaccattacaccccagcctgggcaataagagtgaaactccgtctcaagg

SEQ ID NO: 35962 - DNA, 1785 bp, Artificial Sequence
  derived and/or modified sequence
atgaggcccaagaggctgggccgctgctgtgccggcagccggctgggccctggggaccctgctgccctgacctgtgcccccagccccagcgccagccctgcccctgagcccagcgcccagccccaggcccggggcaccggccagagggtgggcagccgggccaccagcggcagccagttcctgtctgaggccaggactggagcccggcctgccagcgaggccggggccaaggccggggcccggcggcccagcgccttcagcgccatccagggagatgtgcgctccatgccagacaacagtgatgccccctggaccaggtttgtgttccagggccccttcggcagccgggccaccggccggggcaccgggaaggccgccggcatctggaagaccccagctgcctacgtgggccggcggcctggggtgtctggccctgagcgggccgccttcatccgggagctggaggaggccctgtgccccaacctgcccccacctgtgaagaagatcacccaggaggatgtgaaggtgatgctgtacctgctggaggagctgctgccccctgtgtgggagagcgtgacctacggcatggtgctgcagcgggagcgggacctgaacacagctgcccgcatcggccagagcctggtgaagcagaacagcgtgctgatggaggagaacagcaagctggaggccctgctgggcagcgccaaggaggagatcctgtacctgcggcaccaggtgaacctgagagatgagctgctgcagctgtacagcgacagtgatgaggaggatgaagatgaggaggaggaggaggaggagaaggaggccgaggaggagcaggaggaggaggaggccgaggaggacctgcagtgtgcccacccctgtgatgcccccaagctgatcagccaggaggccctgctgcaccagcaccactgcccccagctggaggccctgcaggagaagctgcggctgctggaggaggagaaccaccagctgcgggaggaggccagccagctggacaccctggaggatgaggagcagatgctgatcctggagtgtgtggagcagttcagcgaggccagccagcagatggccgagctgtctgaggtgctggtgctgcggctggagaactatgagcggcagcagcaggaggtggcccggctgcaggcccaggtgctgaagctgcagcagcgctgcaggatggagaccctgcccggcttccaggagaccctggccgaggagctgcggaccagcctgcggaggatgatcagtgaccctgtgtacttcatggagagaaattatgagatgcccaggggggacaccagcagcctgcgctatgacttccgctacagtgaagatcgggagcaggtgcggggctttgaagctgaggagggcctgatgctggccgctgacatcatgagaggagaggacttcaccccagctgaggagtttgtgccccaggaggagctgggcgccgccaagaaggtgcctgctgaggagggcgtgatggaggaggccgagctggtgtctgaggagacagagggctgggaggaggtggagctggagctggatgaggccaccaggatgaatgtggtgaccagcgccctggaggccagcggcctgggccccagccacctggacatgaactacgtgctgcagcagctggccaactggcaggatgcccactaccgccggcagctgcgctggaagatgctgcagaagggagaatgtccccacggggccctgcctgctgccagcaggaccagctgccgcagcagctgcaggtag

SEQ ID NO: 35963 - DNA, 1785 bp, Artificial Sequence
  derived and/or modified sequence
atgcggcccaagcggctgggccggtgctgcgccggcagccggctgggaccaggtgatccagccgctctgacatgcgccccatccccttccgcgtcacccgcacctgaaccgtcggctcagccacaagcaagggggaccggccagcgtgtgggctctcgagccacctccggctctcagttcctgagcgaggcccgaactggtgccagaccagcctctgaggcaggagcaaaagcgggcgcccgcaggccttccgctttttccgcaattcaaggcgacgtgcggagcatgccggacaattcagacgcgccttggacccgattcgtcttccagggcccattcggctcacgcgccactgggaggggcactgggaaagctgcaggaatttggaagacccctgcagcgtacgtcgggcgacggccgggagtgagcggtccggagagggccgccttcatacgggaattagaggaagcactctgtcctaatcttccccccccagtgaagaagatcacccaggaagacgtgaaggtaatgctgtatctcctcgaggagcttctgcctcctgtatgggaaagcgtcacatatgggatggtcctccagagagagcgggatctcaacaccgcagcccgcattgggcagagcctggtgaagcagaacagcgtgctaatggaggagaactccaaactggaggccctgcttggtagtgcaaaggaggaaatcctgtacctcagacaccaggtgaatctgcgcgacgaactgcttcaactctacagcgacagtgatgaagaggatgaggacgaagaggaggaggaggaagagaaggaagctgaagaggagcaagaggaggaggaggcggaggaggacctacagtgtgcccacccatgcgacgctcccaagcttatcagtcaggaggccttgctgcatcagcatcactgtccccagctggaagccttacaagaaaagctgcgcctcctggaggaagagaatcatcagctacgggaggaggcctcacaacttgatacactggaggatgaggagcaaatgcttatcctggagtgtgtggaacagtttagtgaagcctcgcagcagatggccgaactcagcgaggtgttggttctccgacttgaaaactacgagcgccaacagcaagaggtagcccgtctccaggcacaggtcctcaaactgcaacaaaggtgcaggatggaaacccttccaggcttccaagaaactctggccgaggaattaagaacttcattgagacggatgatctcagatcctgtctactttatggagaggaattatgagatgccacgcggtgacacgtcaagtctcagatatgactttagatattcggaggacagagaacaagtccgagggttcgaagcggaggaaggtctgatgctcgcagctgacattatgaggggcgaggactttacacctgctgaagagttcgtcccacaagaagagttgggcgccgctaagaaagtgcctgctgaagaaggtgtgatggaggaagccgaattggtgtccgaggagaccgagggatgggaggaggtcgagttggagttagatgaggccacgaggatgaatgtggtgacgtcagctttggaagcatctggcttaggaccgtcgcatctggatatgaattacgtgctccaacagctggctaactggcaggatgcccattacagaagacagttaagatggaaaatgttgcagaagggcgagtgtcctcacggggcgctgccagcggcctctcggacaagctgccggtctagctgtaggtag

SEQ ID NO: 35964 - DNA, 1785 bp, Artificial Sequence
  derived and/or modified sequence
atgcgacccaagcgcttgggcagatgttgtgccggttcccggctgggtcccggagacccagcagcactgacctgtgccccttccccctctgcgtcccctgcccctgaaccgtccgcccagccccaggctaggggcacgggccaacgagtgggcagtcgagctacttcaggaagccagttcctgtctgaagcccgtacaggcgctcggcctgcctcggaagcaggagccaaagccggtgccaggaggccctctgccttttctgcaatacagggggacgtgagaagcatgcctgacaactccgatgctccctggacgcgcttcgtgttccagggacctttcggaagcagagcaacaggcaggggtacaggtaaggccgcaggtatctggaagactccggcagcctacgttgggagacggccaggggtgagcggccctgaacgggcagctttcattcgggagctcgaggaagcgctgtgtccgaacctcccccctccagtcaagaagattactcaggaggacgtgaaagtcatgctgtatctgctcgaggagctgctgcccccagtctgggagtctgtcacttatgggatggtcctgcaacgggaacgcgacctgaataccgccgctaggattggccagtccctggtgaagcaaaactcagttttaatggaggaaaatagcaagctggaagctctactcggtagtgcaaaagaggagattctgtatctcagacatcaggttaatctacgtgacgaattgttacagctgtatagcgatagcgacgaagaagatgaggatgaggaagaagaagaggaggagaaagaggctgaggaagagcaggaggaggaagaggcagaagaggaccttcagtgtgcacatccatgtgatgcacccaagcttatttctcaagaggctctcctccatcagcaccattgcccccagcttgaggcactacaggaaaagctaagattattggaggaggaaaaccaccagctccgagaggaggccagccagttggacacattagaagatgaggagcagatgcttatccttgagtgtgttgaacagttctcggaggcatcccaacaaatggccgagctgagcgaagtactggttttgcggctggaaaactacgagcgccagcagcaggaggttgcacgacttcaggcgcaggttctcaagttgcagcagcgatgccgaatggaaacgcttcctgggttccaggaaacactggcagaggaattgcggacttcactgagaaggatgatctccgacccagtgtattttatggagcggaattacgagatgcctcgaggcgacacatcaagcctgcgttacgacttccggtactctgaagatagggaacaggtcaggggatttgaagcggaagaaggtctgatgctggcggcagatataatgagaggagaggatttcacgccggcagaagaattcgttccacaggaggaactgggggctgccaagaaggttcctgcagaagaaggggtgatggaagaggctgagctggtgagcgaggagactgagggatgggaagaggttgaactcgagctggatgaggccacaaggatgaatgtcgtaacgtccgccctggaggcctccggtttaggaccaagtcacctcgacatgaactacgttcttcagcagctggccaattggcaggatgcccactataggcgccaactccgttggaagatgctgcagaagggcgaatgcccgcacggggctctacctgctgcaagtagaaccagctgcagatcatcctgtagatag

SEQ ID NO: 35965 - DNA, 1785 bp, Artificial Sequence
  derived and/or modified sequence
atgagacccaagagactgggcagatgctgcgccggcagcagactgggccccggcgaccccgccgccctgacctgcgcccccagccccagcgccagccccgcccccgagcccagcgcccagccccaggccagaggcaccggccagagagtgggcagcagagccaccagcggcagccagttcctgagcgaggccagaaccggcgccagacccgccagcgaggccggcgccaaggccggcgccagaagacccagcgccttcagcgccatccagggcgacgtgagaagcatgcccgacaacagcgacgccccctggaccagattcgtgttccagggccccttcggcagcagagccaccggcagaggcaccggcaaggccgccggcatctggaagacccccgccgcctacgtgggcagaagacccggcgtgagcggccccgagagagccgccttcatcagagagctggaggaggccctgtgccccaacctgcccccccccgtgaagaagatcacccaggaggacgtgaaggtgatgctgtacctgctggaggagctgctgccccccgtgtgggagagcgtgacctacggcatggtgctgcagagagagagagacctgaacaccgccgccagaatcggccagagcctggtgaagcagaacagcgtgctgatggaggagaacagcaagctggaggccctgctgggcagcgccaaggaggagatcctgtacctgagacaccaggtgaacctgagagacgagctgctgcagctgtacagcgacagcgacgaggaggacgaggacgaggaggaggaggaggaggagaaggaggccgaggaggagcaggaggaggaggaggccgaggaggacctgcagtgcgcccacccctgcgacgcccccaagctgatcagccaggaggccctgctgcaccagcaccactgcccccagctggaggccctgcaggagaagctgagactgctggaggaggagaaccaccagctgagagaggaggccagccagctggacaccctggaggacgaggagcagatgctgatcctggagtgcgtggagcagttcagcgaggccagccagcagatggccgagctgagcgaggtgctggtgctgagactggagaactacgagagacagcagcaggaggtggccagactgcaggcccaggtgctgaagctgcagcagagatgcagaatggagaccctgcccggcttccaggagaccctggccgaggagctgagaaccagcctgagaagaatgatcagcgaccccgtgtacttcatggagagaaactacgagatgcccagaggcgacaccagcagcctgagatacgacttcagatacagcgaggacagagagcaggtgagaggcttcgaggccgaggagggcctgatgctggccgccgacatcatgagaggcgaggacttcacccccgccgaggagttcgtgccccaggaggagctgggcgccgccaagaaggtgcccgccgaggagggcgtgatggaggaggccgagctggtgagcgaggagaccgagggctgggaggaggtggagctggagctggacgaggccaccagaatgaacgtggtgaccagcgccctggaggccagcggcctgggccccagccacctggacatgaactacgtgctgcagcagctggccaactggcaggacgcccactacagaagacagctgagatggaagatgctgcagaagggcgagtgcccccacggcgccctgcccgccgccagcagaaccagctgcagaagcagctgcagatag

SEQ ID NO: 35966 - protein, 895 aa, Artificial Sequence
  derived and/or modified sequence
MFPTGFSSPSPSAAAAAQEVRSATDGNTSTTPPTSAKKRKLNSSSSSSSNSSNEREDFDSTSSSSSTPPLQPRDSASPSTSSFCLGVSVAASSHVPIQKKLRFEDTLEFVGFDAKMAEESSSSSSSSSPTAATSQQQQLKNKSILISSVASVHHANGLAKSSTTVSSFANSKPGSAKKLVIKNFKDKPKLPENYTDETWQKLKEAVEAIQNSTSIKYNLEELYQAVENLCSYKISANLYKQLRQICEDHIKAQIHQFREDSLDSVLFLKKIDRCWQNHCRQMIMIRSIFLFLDRTYVLQNSMLPSIWDMGLELFRAHIISDQKVQNKTIDGILLLIERERNGEAIDRSLLRSLLSMLSDLQIYQDSFEQRFLEETNRLYAAEGQKLMQEREVPEYLHHVNKRLEEEADRLITYLDQTTQKSLIATVEKQLLGEHLTAILQKGLNNLLDENRIQDLSLLYQLFSRVRGGVQVLLQQWIEYIKAFGSTIVINPEKDKTMVQELLDFKDKVDHIIDICFLKNEKFINAMKEAFETFINKRPNKPAELIAKYVDSKLRAGNKEATDEELEKMLDKIMIIFRFIYGKDVFEAFYKKDLAKRLLVGKSASVDAEKSMLSKLKHECGAAFTSKLEGMFKDMELSKDIMIQFKQYMQNQNVPGNIELTVNILTMGYWPTYVPMEVHLPPEMVKLQEIFKTFYLGKHSGRKLQWQSTLGHCVLKAEFKEGKKELQVSLFQTLVLLMFNEGEEFSLEEIKQATGIEDGELRRTLQSLACGKARVLAKNPKGKDIEDGDKFICNDDFKHKLFRIKINQIQMKETVEEQASTTERVFQDRQYQIDAAIVRIMKMRKTLSHNLLVSEVYNQLKFPVKPADLKKRIESLIDRDYMERDKENPNQYNYIA

SEQ ID NO: 35967 - DNA, 2688 bp, Artificial Sequence
  derived and/or modified sequence
atgtttcccaccgggttcagctccccttctccttctgccgccgctgcagcccaggaggtacggtcggctacagatggcaacacatcgaccacgccccccacctctgccaagaaacggaagctgaacagctctagtagcagctccagcaatagctccaatgaaagagaagacttcgacagcacgagttccagtagcagtaccccacctctacagcctagggacagcgctagtccatccactagctctttttgcctgggcgtttccgttgccgcctccagccacgtgcctatccagaagaaattgcggttcgaggacaccttggaatttgtgggattcgatgccaaaatggcagaagagtcttccagctctagctctagcagttcgcccactgctgccacatcccagcagcaacagctgaaaaacaagagcatcctgatctcatcagtcgccagcgtgcaccacgccaacggcctggccaaatcctcaacaacggtttccagtttcgcaaattccaaaccaggttccgcaaagaaactagtgatcaaaaactttaaggacaaaccgaaactccctgaaaactacacagacgaaacatggcaaaagctgaaggaggctgtggaagccattcagaatagcactagtattaaatataacctggaggagctttatcaagcggtggagaacctgtgttcttataaaatctcagccaacctatacaaacagctgcgtcagatatgcgaggatcacattaaggcacaaattcatcagtttagggaagactcgctggactcggtgctttttctgaagaagatagaccgctgttggcaaaatcactgtagacaaatgatcatgattcgaagcatcttccttttccttgaccgaacttatgtgctacaaaattccatgctcccttcaatctgggatatgggcttagagctgtttcgggcacatattatcagtgaccagaaggtccagaacaagacgatcgacgggatacttcttttgatagagagggagcgaaatggggaggctatcgaccggagtctgctgaggagcctcctgtcaatgctcagcgacctccagatataccaggatagctttgaacaaagatttttggaggagacgaatcggctctacgcagcagagggtcaaaagctaatgcaggagagagaagtacctgaatacctccatcatgtgaacaaaagacttgaagaagaggctgacagattgattacctatctggatcagacaactcagaaatcactcatagctaccgtggagaaacaattgcttggagagcaccttaccgccatcctgcagaaagggctcaataaccttttggacgagaaccggatccaagacctctctctcctataccagctgttttctcgtgtccgaggtggagtacaggttcttctgcagcaatggattgaatatatcaaagcattcggcagcactatcgtgattaatcccgagaaggacaagaccatggttcaggagctgctggatttcaaggacaaagtggaccacattatcgatatctgcttcctcaaaaacgagaagttcatcaatgccatgaaggaggcatttgagactttcattaacaagcggccaaataaaccggcagagcttattgcgaaatatgtagattctaagcttcgggctgggaacaaagaagccactgatgaagagttggagaagatgctggataaaatcatgatcatctttagatttatatatggtaaagatgttttcgaagcattctacaagaaggatctcgccaagcgcctgctggtagggaaatcggcaagcgtggacgcagaaaagtcgatgctcagtaaactaaagcacgagtgcggagcagccttcacttccaagcttgaaggtatgttcaaagatatggaattaagtaaagatatcatgatacagttcaagcaatacatgcagaaccagaacgtcccgggcaacattgagctgaccgtaaacatcttaacaatgggttactggcccacctatgtcccaatggaggtgcatctgccacctgagatggttaaattgcaggaaatcttcaagacattctatttgggcaaacatagtgggaggaagcttcagtggcaatctactttgggacactgtgtgttgaaggctgagtttaaagagggcaagaaggagctccaagtctcacttttccagaccctggtgctgcttatgttcaacgagggcgaagaattctctttagaagaaataaagcaggccacggggattgaggacggtgagcttaggcggacgctgcagtcattggcatgcggtaaagccagggtgctggctaaaaatcccaagggcaaggacattgaggacggggacaagttcatttgcaacgatgacttcaaacacaaattatttagaattaagataaatcagatccagatgaaagagacagtagaggagcaagccagcaccacagaaagagtgtttcaggatcggcaataccaaatcgacgctgccatagtgcggatcatgaagatgagaaagacattgagccacaacctgctggtttccgaggtctacaaccagctcaagttcccggtgaagccagctgacctgaaaaagagaatcgaatccttgatagaccgcgactacatggagcgggataaagaaaatcctaaccaatataactatatcgcgtag

SEQ ID NO: 35968 - DNA, 2688 bp, Artificial Sequence
  derived and/or modified sequence
atgttccccaccggcttcagcagccccagccccagcgctgctgctgctgcccaggaggtgcgcagcgccacagatggcaacaccagcaccaccccacccaccagcgccaagaagaggaagctgaacagcagcagcagcagcagcagcaacagcagcaatgaaagagaggactttgacagcaccagcagcagcagcagcaccccacccctgcagccccgggacagcgccagccccagcaccagcagcttctgcctgggcgtgtctgtggccgccagcagccacgtgcccatccagaagaagctgcgctttgaggacaccctggagtttgtgggctttgatgccaagatggccgaggagagcagcagcagcagcagcagcagcagccccacagctgccaccagccagcagcagcagctgaagaacaagagcatcctgatcagctctgtggcctctgtgcaccacgccaacggcctggccaagagcagcaccaccgtgtcctcctttgccaacagcaagccaggcagcgccaagaagctggtgatcaagaacttcaaggacaagcccaagctgcctgagaactacacagatgagacctggcagaagctgaaggaggccgtggaggccatccagaacagcaccagcatcaagtacaacctggaggagctgtaccaggccgtggagaacctgtgcagctacaagatcagcgccaacctgtacaagcagctgcggcagatctgtgaggaccacatcaaggcccagatccaccagttccgggaggacagcctggacagcgtgctcttcctgaagaagattgaccgctgctggcagaaccactgccggcagatgatcatgatccgcagcatcttcctgttcctggacaggacctacgtgctgcagaacagcatgctgcccagcatctgggacatgggcctggagctgttccgggcccacatcatcagtgaccagaaggtgcagaacaagaccattgatggcatcctgctgctgattgaaagagaaagaaatggagaggccatcgacaggagcctgctgcggagcctgctgtccatgctgagtgacctgcagatctaccaggacagctttgagcagcgcttcctggaggagaccaaccggctgtatgctgctgagggccagaagctgatgcaggagcgggaggtgcctgagtacctgcaccacgtgaacaagaggctggaggaggaggccgacaggctcatcacctacctggaccagaccacccagaagagcctgattgccaccgtggagaagcagctgctgggggagcacctgacagccatcctgcagaagggcctgaacaacctgctggatgaaaatcgcatccaggacctgagcctgctgtaccagctgttcagccgggtgcggggcggcgtgcaggtgctgctgcagcagtggattgagtacatcaaggccttcggcagcaccatcgtcatcaaccctgagaaggacaagaccatggtgcaggagctgctggacttcaaggacaaggtggaccacatcatcgacatctgcttcctgaagaatgagaagttcatcaatgccatgaaggaggcctttgagaccttcatcaacaagaggcccaacaagccagctgagctgattgccaagtatgtggacagcaagctgcgggccggcaacaaggaggccacagatgaggagctggagaagatgctggacaagatcatgatcatcttccgcttcatctacggcaaggatgtgtttgaggccttctacaagaaggacctggccaagaggctgctggtgggcaagagcgcctctgtggatgctgagaagtccatgctgagcaagctgaagcatgaatgtggggccgccttcaccagcaagctggagggcatgttcaaggacatggagctgagcaaggacatcatgatccagttcaagcagtacatgcagaaccagaatgtgcccggcaacatcgagctgactgtgaacatcctgaccatgggctactggcccacctacgtgcccatggaggtgcacctgcccccagagatggtgaagctgcaggagatcttcaagaccttctacctgggcaagcacagcggcaggaagctgcagtggcagagcaccctgggccactgtgtgctgaaggccgagttcaaggagggcaagaaggagctgcaggtgtccctcttccagaccctggtgctgctgatgtttaatgaaggagaggagttcagcctggaggagatcaagcaggccactggaattgaagatggagagctgcggaggaccctgcagagcctggcctgtgggaaggcccgggtgctggccaagaaccccaagggcaaggacattgaagatggagacaagttcatctgcaatgatgacttcaagcacaagctgttccgcatcaagatcaaccagatccagatgaaggagaccgtggaggagcaggccagcaccacagagagggtcttccaggaccggcagtaccagattgatgctgccatcgtgcgcatcatgaagatgaggaagaccctgagccacaacctgctggtgtctgaggtgtacaaccagctgaagtttcctgtgaagccagctgacctgaagaagagaattgagagcctgattgaccgggactacatggagcgggacaaggagaaccccaaccagtacaactacatcgcctag

SEQ ID NO: 35969 - DNA, 2688 bp, Artificial Sequence
  derived and/or modified sequence
atgttccccaccggcttcagcagccccagccccagcgccgccgccgccgcccaggaggtgagatctgctacggatgggaacacttcgacgacacctcctacgagtgcaaaaaagcgcaaattaaactcaagttccagctctagtagtaactcaagcaacgagagggaagatttcgatagcacttcatcttcgtcctctacccccccgctccagccgagagacagcgcttccccgagcacatccagcttttgtctcggcgtctctgtggcagcaagttctcacgtgccgatccaaaagaaactgaggttcgaagatacactggaattcgtcggttttgacgccaaaatggccgaggagtcctcctcgagctcatcatcttccagccccaccgctgccacatctcagcagcaacagctaaaaaacaagtctatcttaatatcctccgtggcctctgttcatcatgccaatggattggccaagtcatccactactgtgagttcctttgccaattcaaagcccggttcagccaagaagttggtgattaaaaattttaaagataagccaaagctgcccgagaattataccgatgaaacctggcaaaaactgaaggaagcggtcgaggcaatacagaactccacatctattaagtataatctcgaagaattgtatcaggccgtggaaaatttatgctcgtataaaatctctgcaaatctgtataaacagctgcggcagatatgcgaggatcatattaaagcccagatacatcagttcagggaggactcacttgactcagtgctattcctcaaaaagatagatcggtgttggcagaaccactgcaggcaaatgatcatgatccgctccattttcctcttcctagatcggacttacgttcttcagaattccatgcttcccagcatttgggatatgggccttgaactcttccgagcccatataattagtgaccagaaagttcagaataagactatcgacggcatactattactgattgagagagaaaggaatggtgaggccattgaccgctcccttttgaggagcttgctctcaatgctgtcagatctgcaaatttaccaagactcatttgaacagcggttcctggaggagaccaatcgcctgtacgccgctgaaggccagaagctgatgcaggaacgggaggtgccagaatatctccaccacgtaaacaaaagactggaagaagaggctgatcgcttgatcacctatttggaccaaaccacgcagaagtcactgattgccactgtagagaagcagctcctaggggagcatctcacggctattttgcagaaaggcctgaataatttgttggatgagaatcggatccaggatctgtctctattataccagctgttcagcagagtgaggggcggagtgcaggtcctcctgcagcaatggattgaatatatcaaggcctttggctcgaccatagtaatcaaccccgaaaaggacaaaacaatggtgcaggagctcctcgactttaaggataaggtggaccatattatcgacatctgttttctgaagaacgagaagttcatcaatgccatgaaagaggcctttgaaacctttatcaataaaaggcctaataagccagccgagttgattgccaagtatgtagatagcaagctgcgggccgggaataaggaggccacggatgaagaactggagaaaatgctggataaaattatgatcatttttcggttcatatacggcaaggacgtctttgaagccttctacaagaaagacttggccaaacgtctgctagtgggaaagagtgcatccgttgacgctgagaagtctatgctttcaaaactaaagcacgagtgcggtgccgccttcacgtccaaactggaggggatgttcaaagatatggaattatccaaagacattatgattcagttcaagcaatacatgcagaatcagaatgtcccgggtaatatcgaactgacagtgaacatactgacgatggggtattggccaacatacgtccccatggaggtccatctgccacctgagatggtgaagttgcaagagatttttaagacattttatttgggcaagcactctggacgaaaactgcaatggcagtccactttgggacactgtgtactaaaggctgaatttaaagagggcaagaaagaactccaggtgtctttgtttcagacacttgtcttgctgatgtttaatgagggtgaagagttctcactcgaggagataaagcaggcgacaggcatcgaggatggggaactgcgcagaaccttacaaagtctggcctgcggcaaagccagggtgttggctaaaaaccccaaaggcaaggatatagaggatggggataagttcatttgcaacgacgactttaaacataaactctttcggattaaaataaaccaaatacagatgaaagagacggtggaggagcaggcctccacaactgaaagggtgttccaggatcgccagtaccagattgatgccgccattgtgaggattatgaaaatgcgaaaaacgctgtctcacaatttgctcgtctccgaggtgtacaatcagctgaagttccctgttaaaccagccgaccttaagaaaaggatcgagtccctaatcgacagggactatatggaaagagacaaggaaaaccccaaccagtacaactacatcgcctag

SEQ ID NO: 35970 - DNA, 2688 bp, Artificial Sequence
  derived and/or modified sequence
atgttccctactgggttctctagtccgagcccttctgcggcagccgcagcccaagaagtgaggtcggccacagacggaaatacttccaccacccctcccacatcagccaagaaaagaaagttgaattcttcttcatccagctcctccaatagttccaatgagagggaagactttgattctacatcctcctcttcctcaacacccccattgcagcctcgggattctgccagcccgagcacgagctctttttgccttggagtgagcgttgcagcttctagccatgttccgattcagaaaaagttgcgctttgaggatacccttgaattcgtggggttcgatgccaagatggccgaggaatcatcctcgtccagcagttcctcaagccccacggcagccacttcccagcaacaacagctgaaaaataaaagtattcttatcagcagtgtcgcttctgtacaccatgcaaacggactggctaaaagctcaactactgtttcttcatttgcaaattccaagcctgggtctgcaaagaaattggtgatcaaaaattttaaagacaagcctaaactccccgagaattacaccgacgagacatggcaaaagctgaaggaggccgtggaggcaattcagaacagcaccagtattaagtataaccttgaagaactctaccaggcggtcgaaaacttgtgtagctacaagatttccgctaatctttataagcagctgcgacagatctgtgaggaccacatcaaggcccaaattcaccaattcagggaagatagcctggactcagtactcttcctgaaaaaaatcgaccgctgttggcagaaccactgccggcaaatgatcatgatccgcagcatctttctttttttggaccggacatatgtgctacaaaacagtatgctgccgtccatctgggacatgggcctggaactgttccgcgctcatatcatctctgaccaaaaagtgcagaataagactatcgatggcatcttactgctcatcgaaagagaacggaatggtgaggcaatagatcgctcgcttcttaggtctctgctgagcatgttgtccgatcttcagatctaccaggactcgttcgaacagcgctttttggaggaaaccaaccggctgtatgccgctgaggggcagaagcttatgcaggagagggaggtccccgagtacttgcatcacgtgaacaagcggctggaggaagaggcggatcgattgattacatatctggaccagacaactcaaaaatccctaatcgcaactgtcgagaaacagctgctgggcgaacatttgacagctatcctacaaaaggggctgaataacctgttggacgagaaccgcatccaggaccttagcctcctgtatcagcttttctctcgagttcggggaggcgttcaagtgttgctccaacaatggattgagtacataaaagcattcggatcaaccatcgtgattaaccccgagaaggacaagacaatggtccaagaactgctggattttaaggataaagtggatcacattatagatatctgttttctgaagaacgagaagtttattaacgccatgaaagaagcctttgagacgttcataaataagcgtcccaataagcccgcagaattaatagctaaatacgtcgacagcaaactgagggccggtaacaaagaggcaactgacgaggagctcgaaaaaatgctggacaaaatcatgatcatcttcaggtttatctacggcaaagacgtgtttgaggctttttacaagaaagaccttgctaaaaggcttctggtgggaaagtcggcctcagtggatgcggagaagagtatgctgagcaagctcaagcacgagtgcggagctgcatttaccagcaaactggaaggcatgttcaaagatatggagctttcaaaggatattatgatacaattcaaacagtatatgcagaatcagaacgtccccggaaacattgagctgactgtcaatatcctcacaatggggtactggccaacttacgtccccatggaagtgcatcttccacctgagatggtcaaactgcaagagatctttaaaactttttacctcggaaagcactctggaagaaaactgcaatggcagtcaacccttggtcattgcgtgctgaaagcggagtttaaggagggcaaaaaggagttgcaggtttcgctgtttcagaccttggttctgctaatgtttaacgaaggcgaggaattctcactcgaggaaataaagcaggcaacgggcatcgaagatggtgaactgcggcgaacactgcagtctctggcctgtgggaaggctagagtactggcgaagaaccctaagggaaaggacattgaagatggagataagttcatttgcaacgacgattttaagcataaactgttccgaattaaaatcaatcagatccaaatgaaagagacagtggaggagcaggccagcacaaccgaaagggtcttccaggatcggcagtaccagattgatgcagcaatcgtccggattatgaaaatgaggaaaacgctgagtcataatctgctggtgtccgaagtgtacaaccaacttaagttcccagttaagcctgctgatcttaagaaaagaattgagagtctcattgatcgagactacatggagcgtgacaaggagaatccaaaccagtacaattacatcgcctag

SEQ ID NO: 35971 - DNA, 4902 bp, Artificial Sequence
  derived and/or modified sequence
cgcacgcaggcatataaacgtaggtttttgatgctcctctgcctgttgaccccgctattttcatgtttccaacaggtttttcttcccccagtccctcagctgctgctgctgctcaggaggtcagatctgccactgatggtaataccagcaccactccgcccacctctgccaagaagagaaagttaaacagcagcagcagtagcagcagtaacagtagtaacgagagagaagactttgattccacctcttcctcctcttccactcctcctttacaacccagggattcggcatccccttcaacctcgtccttctgcctgggggtttcagtggctgcttccagccacgtaccgatacagaagaagctgcgttttgaagacaccctggagtttgtagggtttgatgcgaagatggctgaggaatcctcctcctcctcctcctcatcttcaccaactgctgcaacatctcagcagcagcaacttaaaaataagagtatattaatctcttctgtggcttcggtgcatcatgcaaacggcctagccaaatcttctaccaccgtctctagctttgctaacagcaaacctggctctgctaagaagttagtgatcaagaactttaaagataagcctaaattaccagaaaactacacagatgaaacctggcaaaaactgaaagaagcagtggaagctattcagaatagtacttcaattaagtacaatttagaagaactctaccaggctgtagaaaatctctgttcttacaagatttctgcaaacttgtacaaacagctgagacagatctgcgaagatcacatcaaagcacagattcatcaattcagagaggattcattggatagcgttctttttttaaagaagattgatagatgctggcaaaaccattgcagacaaatgatcatgatcaggagcatttttttgtttctggatagaacttacgttcttcagaattcaatgctaccctccatttgggacatgggactggagttatttagggctcatattataagtgatcagaaagtgcagaataagacaattgatggcattcttctcttgattgagagggaaaggaatggtgaagcaattgatagaagtttacttcgaagccttttaagcatgctgtctgatttgcaaatttatcaagattcttttgaacaacgatttttggaagaaactaaccggctctatgcagctgaaggccaaaaattaatgcaagaaagagaggttcctgaatatctacatcatgttaacaaacgtctagaagaagaagcagacagacttattacttacttagatcagaccacccagaagtcattaattgctactgtagaaaaacaacttctaggtgaacacttaacagcaattcttcagaaaggtttaaataacctccttgatgaaaaccgaattcaagatttgtctcttctgtatcagctcttcagtagagttcgaggtggagttcaggttcttttgcagcagtggatcgaatatatcaaggcatttggcagcactattgtaattaatcctgaaaaagataaaaccatggttcaagaattgctggattttaaagataaggttgaccatataattgatatctgctttctgaagaatgagaaatttatcaatgccatgaaagaagcatttgaaacgttcattaacaaaagaccaaataaaccagctgaacttatagctaagtatgtagattcaaaacttcgtgcaggcaacaaagaagctacagatgaagaacttgagaaaatgttggataaaattatgatcatatttagatttatctatggcaaggatgtttttgaggccttctataagaaagatttagccaagcgcctgttagtcggaaagagtgcatctgtagatgctgaaaaatcaatgctgtccaaacttaaacatgaatgcggagctgctttcaccagcaaacttgaaggaatgtttaaagacatggaactttctaaagacatcatgattcagttcaaacagtatatgcagaatcagaatgttccgggaaatattgagttaactgtgaatatcctgacaatgggctattggccgacatatgtgcctatggaagttcatttaccaccagagatggtaaaacttcaggagattttcaagacattttacctaggcaaacatagtggcaggaaacttcagtggcagtcaaccctaggacactgtgtgttaaaagcagaatttaaagagggtaaaaaggaactccaggtctctctttttcaaacactggtgctgctaatgtttaatgagggagaggagttcagtttagaagagatcaagcaggcaactggaatagaggatggagagttaaggagaacactgcagtcattagcctgtggcaaagctagagttctggcgaaaaatccaaagggcaaagacattgaagatggtgacaagttcatttgtaatgatgatttcaaacataaacttttcaggataaagatcaatcaaatccagatgaaagaaacggttgaagaacaagcaagcactacagaaagagtatttcaagacagacagtatcaaattgatgctgcaattgttcgaattatgaagatgagaaagacacttagccacaatctccttgtttcagaagtgtacaaccagttgaaatttccagtaaagcctgctgatcttaagaagagaatagaatctttaattgaccgggactacatggaaagagataaagaaaatccaaaccagtacaactatattgcatagaatgttggccttgcagcatttggtgtcatatgcagtagccagtggataaactaacctgttgattcaatattatttgactccttttttactaccgatgaccaaatgaagcagtgtaattaatggaaatagttgagtggactttttctcagtggttaacatgcccattttaaagagtaatacttacctttaagaagaatgttgttgaactctttgcatgttatttagtatgatgtgcagaaaacacttaagaacgtacctggtcttcatgaattcctctttggaactgggaaagagatccctgtggctattaaaaaggggggagggttcttacacaccattaattatgaagcaaaaggtttatttgcttaaaatgtcatttaaagatacttaaactgcatgcaaactttatttactgtacagagttctggatgtatttatcaaatagaaaaaccacccttgacttggttgttcacccgttttgtgatttcccttgaaaagagaaatgaattgtcatagctattgatattttactaggtgatgttctgttacactgaaagggatgttttttaaaaaaaattatttggaaacaagttttcaagtagggggacagttgcttacataatatcttgtatattcacatcctaaaaattttcatttatgagtatgggatgtgtgtatatggcttagccccaagttaactgtgctgattaacaagtacttataaaaatagctaaagtagaaaattaatgatcagttgtactagaggaacatcatagaagagaaaaatccaactctttatattaaaaatgaatacaataagaaaattgcaaaagagaccaaaatgaacgtgttttgtaaattgttacaggagcaaaaactttgcaactagttttcaacatactttagactttaaatgttgtttggacagttttgtcttcaacttggaccaattgtagattgttacaggcttcctaggatttagcattcctattttctctaccaaagttttttttagaagcatcccaactcttctctttgttgataaataagcctttcctgtcatcttcattttaacttgctaaaaccctagatacaaaggtcctccctcatttttcccacagagcccctgtttgggaatttgagattctgtgtcatgctggttttcctttcagaattgcttgaaatcgagttctcttagccactggacacctagttttcaggagaatgtcccaagattgtttatatatacaaaatggcaaaagtactgtttttcgaattgataattcaagcaaaggcttctctttactgtcactgatttttttttgtttttattttgtttccttgtttctatttccttgaagctttgaagggaggagaagcagaaaattttgtttatgtttgttaaaaatcagaactacttaatgctttttgccacagcatatttccttgcctgttggagccgttaggaagattacctatgtcctaatcttcaacctgagaagatttttgactcttgtgtctactgttgattgtttgcttgagttctcaaagacctgtggccaggtattttaaaaagtcgtctatttctttctagttgcatcaacttgcacactggtgtctaactatatgtggtattcggaacttgtaattcttattgagcagccattgcctatattttctcagctcctcactgatttctttatatgagctcagctgacaagcaaatgcagctattttgtttaccctctcttcataccggaccatcaacaacagtgttctaactcatccctgatggtctgtgagatgtagactattacacaagattcaagttactcgtaagcaacttttagatagagttggtcctgttaggaggagactcttgatgtcaccttcagtatcttgaaagcgggtcccctccccgaggctcttaattctttgaaaacttgatgctgtttcagctgaaaaattagcaagactgttaaaaaaaaaaagttgaggggagctgtttaagaaactgaaaagtaattgcaaactacattggataattgtgactttcagttgttgttctgtatcagttgaatttttgtgctcttttccctgtgtacgtggtggttctatttttctccaataaaacttttatttaaaaaaagtt

SEQ ID NO: 35972 - DNA, 2688 bp, Artificial Sequence
  derived and/or modified sequence
atgttccccaccggcttcagcagccccagccccagcgccgccgccgccgcccaggaggtgagaagcgccaccgacggcaacaccagcaccaccccccccaccagcgccaagaagagaaagctgaacagcagcagcagcagcagcagcaacagcagcaacgagagagaggacttcgacagcaccagcagcagcagcagcaccccccccctgcagcccagagacagcgccagccccagcaccagcagcttctgcctgggcgtgagcgtggccgccagcagccacgtgcccatccagaagaagctgagattcgaggacaccctggagttcgtgggcttcgacgccaagatggccgaggagagcagcagcagcagcagcagcagcagccccaccgccgccaccagccagcagcagcagctgaagaacaagagcatcctgatcagcagcgtggccagcgtgcaccacgccaacggcctggccaagagcagcaccaccgtgagcagcttcgccaacagcaagcccggcagcgccaagaagctggtgatcaagaacttcaaggacaagcccaagctgcccgagaactacaccgacgagacctggcagaagctgaaggaggccgtggaggccatccagaacagcaccagcatcaagtacaacctggaggagctgtaccaggccgtggagaacctgtgcagctacaagatcagcgccaacctgtacaagcagctgagacagatctgcgaggaccacatcaaggcccagatccaccagttcagagaggacagcctggacagcgtgctgttcctgaagaagatcgacagatgctggcagaaccactgcagacagatgatcatgatcagaagcatcttcctgttcctggacagaacctacgtgctgcagaacagcatgctgcccagcatctgggacatgggcctggagctgttcagagcccacatcatcagcgaccagaaggtgcagaacaagaccatcgacggcatcctgctgctgatcgagagagagagaaacggcgaggccatcgacagaagcctgctgagaagcctgctgagcatgctgagcgacctgcagatctaccaggacagcttcgagcagagattcctggaggagaccaacagactgtacgccgccgagggccagaagctgatgcaggagagagaggtgcccgagtacctgcaccacgtgaacaagagactggaggaggaggccgacagactgatcacctacctggaccagaccacccagaagagcctgatcgccaccgtggagaagcagctgctgggcgagcacctgaccgccatcctgcagaagggcctgaacaacctgctggacgagaacagaatccaggacctgagcctgctgtaccagctgttcagcagagtgagaggcggcgtgcaggtgctgctgcagcagtggatcgagtacatcaaggccttcggcagcaccatcgtgatcaaccccgagaaggacaagaccatggtgcaggagctgctggacttcaaggacaaggtggaccacatcatcgacatctgcttcctgaagaacgagaagttcatcaacgccatgaaggaggccttcgagaccttcatcaacaagagacccaacaagcccgccgagctgatcgccaagtacgtggacagcaagctgagagccggcaacaaggaggccaccgacgaggagctggagaagatgctggacaagatcatgatcatcttcagattcatctacggcaaggacgtgttcgaggccttctacaagaaggacctggccaagagactgctggtgggcaagagcgccagcgtggacgccgagaagagcatgctgagcaagctgaagcacgagtgcggcgccgccttcaccagcaagctggagggcatgttcaaggacatggagctgagcaaggacatcatgatccagttcaagcagtacatgcagaaccagaacgtgcccggcaacatcgagctgaccgtgaacatcctgaccatgggctactggcccacctacgtgcccatggaggtgcacctgccccccgagatggtgaagctgcaggagatcttcaagaccttctacctgggcaagcacagcggcagaaagctgcagtggcagagcaccctgggccactgcgtgctgaaggccgagttcaaggagggcaagaaggagctgcaggtgagcctgttccagaccctggtgctgctgatgttcaacgagggcgaggagttcagcctggaggagatcaagcaggccaccggcatcgaggacggcgagctgagaagaaccctgcagagcctggcctgcggcaaggccagagtgctggccaagaaccccaagggcaaggacatcgaggacggcgacaagttcatctgcaacgacgacttcaagcacaagctgttcagaatcaagatcaaccagatccagatgaaggagaccgtggaggagcaggccagcaccaccgagagagtgttccaggacagacagtaccagatcgacgccgccatcgtgagaatcatgaagatgagaaagaccctgagccacaacctgctggtgagcgaggtgtacaaccagctgaagttccccgtgaagcccgccgacctgaagaagagaatcgagagcctgatcgacagagactacatggagagagacaaggagaaccccaaccagtacaactacatcgcctag

SEQ ID NO: 35973 - protein, 676 aa, Artificial Sequence
  derived and/or modified sequence
MAKINTQYSHPSRTHLKVKTSDRDLNRAENGLSRAHSSSEETSSVLQPGIAMETRGLADSGQGSFTGQGIARLSRLIFLLRRWAARHVHHQDQGPDSFPDRFRGAELKEVSSQESNAQANVGSQEPADRGRRKKTKKKDAIVVDPSSNLYYRWLTAIALPVFYNWYLLICRACFDELQSEYLMLWLVLDYSADVLYVLDVLVRARTGFLEQGLMVSDTNRLWQHYKTTTQFKLDVLSLVPTDLAYLKVGTNYPEVRFNRLLKFSRLFEFFDRTETRTNYPNMFRIGNLVLYILIIIHWNACIYFAISKFIGFGTDSWVYPNISIPEHGRLSRKYIYSLYWSTLTLTTIGETPPPVKDEEYLFVVVDFLVGVLIFATIVGNVGSMISNMNASRAEFQAKIDSIKQYMQFRKVTKDLETRVIRWFDYLWANKKTVDEKEVLKSLPDKLKAEIAINVHLDTLKKVRIFQDCEAGLLVELVLKLRPTVFSPGDYICKKGDIGKEMYIINEGKLAVVADDGVTQFVVLSDGSYFGEISILNIKGSKSGNRRTANIRSIGYSDLFCLSKDDLMEALTEYPEAKKALEEKGRQILMKDNLIDEELARAGADPKDLEEKVEQLGSSLDTLQTRFARLLAEYNATQMKMKQRLSQLESQVKGGGDKPLADGEVPGDATKTEDKQQ

SEQ ID NO: 35974 - DNA, 2031 bp, Artificial Sequence
  derived and/or modified sequence
atggctaagataaatacacagtacagtcatccttcccggacccacctcaaggtgaaaacgagtgatagagatttgaatcgggctgaaaacgggttatcacgcgcacattcttcgtccgaggaaactagcagcgtgctgcagcccggtattgccatggagacgagaggcttggccgattcaggacaaggatcctttaccggccagggcatcgccagactttcaagactaatttttcttttgcgcagatgggccgctcgtcatgtacaccaccaagaccaagggcctgatagcttccccgaccgattccgcggtgcggaactgaaagaagtgtccagccaggagtcgaatgcgcaggccaatgtgggttcgcaggaaccagctgacagaggccgaaggaaaaaaactaagaagaaagatgctatcgttgttgacccctcctctaatctctactacaggtggcttacagccattgcgctccccgtgttttacaactggtatctgctcatctgtagggcctgctttgacgagctccagagcgaatacctcatgctctggttggtgctggactacagcgccgacgtactctacgttttggatgtcctagtgcgggcccggaccgggttcctggaacaggggctcatggtcagtgacaccaatcggctctggcaacactacaagaccactacacagtttaagcttgatgtgctgtcactcgtgccaactgatcttgcttacctgaaggtgggaacgaactatcctgaggtgcgattcaaccgacttttgaagttctccaggctgttcgagttttttgacagaactgaaacccggacaaactatcccaacatgtttaggataggaaatctcgtgctttatatccttatcatcatccactggaatgcctgcatttacttcgccataagtaaattcatcggattcggaaccgactcttgggtttacccaaatatttctatcccggagcacgggagactgtcaaggaaatacatctacagcctgtactggagtactttgacgcttaccactattggagaaactccgccacccgtaaaggacgaagagtatctgtttgtggtggtggacttcctcgtgggtgtgctgatttttgcaactattgtggggaatgtgggttccatgatcagcaacatgaatgcttccagagctgagttccaagccaagattgattccatcaagcagtatatgcagttcaggaaggtcaccaaggacctggaaactagagtcatcaggtggttcgactatctgtgggctaataagaaaactgttgacgaaaaagaggtactcaaatctcttcccgacaagctcaaggccgagattgccatcaatgtacatctggacactctgaaaaaagttcggatctttcaagattgtgaggctgggctgctcgtggaactcgtactgaaacttcgcccgaccgtgttctccccaggtgactacatttgtaaaaaaggtgatataggaaaggagatgtatattatcaatgagggcaaactggcagtcgttgctgatgacggcgtcacacagtttgtagtgctgtcagacggttcctacttcggcgagatttctatcctaaatatcaagggcagcaagagcggtaaccgcagaaccgccaacatacgaagcatcggatatagcgacttattttgtttgtcaaaagatgatcttatggaggcactgactgagtatcctgaggctaagaaagcactggaggagaaaggccgccaaattttgatgaaagacaatctgattgatgaagagttggcacgagcaggtgctgaccccaaggacctggaggagaaagtggaacaactgggaagctccttggacacgctgcagacacggtttgcccggctcctggccgaatataacgccactcagatgaaaatgaagcaaagattgtctcaattagaatcccaagtcaagggagggggagataaacccctggctgacggagaagtcccgggcgacgccactaaaactgaggataaacagcagtag

SEQ ID NO: 35975 - DNA, 2031 bp, Artificial Sequence
  derived and/or modified sequence
atggccaagatcaacacccagtacagccaccccagcaggacccacctgaaggtgaagaccagtgaccgggacctgaacagagcagaaaatggcctgagccgggcccacagcagcagcgaggagaccagctctgtgctgcagcccggcatcgccatggagacccggggcctggccgacagcggccagggcagcttcaccggccagggcatcgcccggctgagccgcctcatcttcctgctgcggcgctgggccgcccggcacgtgcaccaccaggaccagggccctgacagcttcccagaccgcttcagaggagctgagctgaaggaggtgagcagccaggagagcaatgcccaggccaacgtgggcagccaggagcctgctgaccggggccgcaggaagaagaccaagaagaaggatgccatcgtggtggaccccagcagcaacctgtactaccgctggctgacagccatcgccctgcccgtcttctacaactggtacctgctgatctgccgggcctgctttgatgagctgcagagcgagtacctgatgctgtggctggtgctggactacagcgcagatgtgctgtatgtgctggatgtgctggtgcgggccaggacaggcttcctggagcagggcctgatggtgtctgacaccaaccggctgtggcagcactacaagaccaccacccagttcaagctggatgtgctgagcctggtgcccacagacctggcctacctgaaggtgggcaccaactacccagaggtgcgcttcaaccggctgctgaagttcagccggctgtttgagttctttgacagaacagagaccaggaccaactaccccaacatgttcagaattggcaacctggtgctgtacatcctgatcatcatccactggaatgcctgcatctactttgccatcagcaagttcatcggcttcggcacagacagctgggtgtaccccaacatcagcatccctgagcacggccgcctgagcaggaagtacatctacagcctgtactggagcaccctgaccctgaccaccatcggggagaccccacctcctgtgaaggatgaggagtacctgtttgtggtggtggacttcctggtgggcgtgctgatctttgccaccatcgtgggcaatgtgggctccatgatcagcaacatgaatgccagcagagctgagttccaggccaagattgacagcatcaagcagtacatgcagttcaggaaggtgaccaaggacctggagaccagggtcatccgctggtttgactacctgtgggccaacaagaagacagtggatgagaaggaggtgctgaagagcctgcctgacaagctgaaggccgagatcgccatcaacgtgcacctggacaccctgaagaaggtgcgcatcttccaggactgtgaggccggcctgctggtggagctggtgctgaagctgcggcccaccgtcttcagccctggggactacatctgcaagaagggggacatcggcaaggagatgtacatcatcaatgaaggcaagctggccgtggtggctgatgatggagtgacccagtttgtggtgctgagtgatggcagctactttggagagatcagcatcctgaacatcaagggcagcaagagcggcaacagaagaacagccaacatccgcagcatcggctacagcgacctcttctgcctgagcaaggatgacctgatggaggccctgacagagtacccagaggccaagaaggccctggaggagaagggccggcagatcctgatgaaggacaacctgattgatgaggagctggcccgggccggggctgaccccaaggacctggaggagaaggtggagcagctgggcagcagcctggacaccctgcagaccaggtttgcccggctgctggccgagtacaatgccacccagatgaagatgaagcagaggctgagccagctggagagccaggtgaagggcggcggggacaagcccctggctgatggagaggtgcctggagatgccaccaagacagaggacaagcagcagtag

SEQ ID NO: 35976 - DNA, 2031 bp, Artificial Sequence
  derived and/or modified sequence
atggccaagatcaacacccagtacagccaccccagccggacccacctgaaagtcaaaacaagcgacagggatctgaaccgggcagaaaatggcctgtcccgcgctcactcttcttccgaagaaacctcgtctgttttgcagcccggcatagccatggaaaccagaggccttgctgattcagggcagggatcctttaccggccagggcattgcaagactgtcccgactgattttcctgctgcgaaggtgggccgctagacacgtccaccaccaggatcagggccctgactccttccctgaccggtttcgcggagccgagctgaaagaggtctcatcccaggaatccaatgcacaagctaatgtcggatcgcaggagcctgccgatcgtggcagaagaaagaaaacgaaaaagaaagacgctattgtcgtggatccgagtagtaacctttactaccgctggttaactgcaattgctctgcccgtgttttacaattggtacctgctcatctgtagggcatgcttcgacgagcttcagagtgaatatctgatgctgtggctagtgcttgattactcggcggatgttctctatgtgctggacgtgctggtgcgggctaggacgggctttctcgaacagggcctgatggttagtgatacaaatagactctggcaacattacaagaccacaactcaattcaagctggatgttttgagcctggtgccaaccgacctcgcgtatttgaaagtaggaaccaattatcccgaggtccgctttaataggctgctaaaattttcccgcttgttcgaatttttcgatcgtacagagacgcggactaactaccccaatatgttcagaatagggaacttggtcctgtacatcttaatcattatccactggaatgcttgcatttacttcgccataagtaaatttatcgggtttggtaccgactcttgggtttacccaaacataagcatcccagaacacgggaggttgtccagaaagtacatctacagcttatattggtctacactcacactaaccaccattggggagaccccccctccggttaaagacgaagaatacctgtttgtcgtcgtggattttttggtcggagtgttgatctttgcaacgatcgtcggcaacgtaggttcgatgatttcgaatatgaacgcatctcgagcagagttccaagccaaaatcgatagcataaaacaatacatgcagtttagaaaagtaaccaaggacctggagacgcgagtcatccgttggtttgactacttgtgggccaacaagaagactgtagatgagaaagaggtcctgaagtctctccctgataaactgaaagcagaaatcgcaatcaacgtccacttagacacgttgaaaaaagtgcgtatattccaggattgcgaggctggactactggttgagctcgtgctgaagctgcggcctactgtctttagccctggagactacatctgtaagaagggcgatatcggcaaggaaatgtacattattaatgagggtaagctggccgtcgtggctgatgacggcgtgacgcaattcgtggtactgtcagacggaagttattttggcgaaatatctatcttgaatataaagggctctaaatctggcaaccgcagaactgccaacatcaggagcataggctacagcgacctattctgcctgtcgaaagacgaccttatggaggctcttactgagtacccggaggccaagaaggcccttgaagagaaaggaaggcagatcctgatgaaagacaatctcatcgacgaggagctggcccgggctggggccgatcctaaggatttagaagaaaaagttgagcagctggggtcttccttggacacactgcagacgcggttcgcccggttgctggcggaatacaatgccacccagatgaaaatgaaacagcggctctcgcagctagaaagccaggtgaagggcggtggagacaagcccctggccgatggtgaggttcccggcgatgccaccaagacagaggacaagcaacagtag

SEQ ID NO: 35977 - DNA, 2031 bp, Artificial Sequence
  derived and/or modified sequence
atggccaagattaacacccagtacagccatcctagtcggacacacctcaaggttaagacatcagatcgggatctgaatcgagcagagaacgggctgtcgcgggcacatagttcctccgaagagacttcttcagttttgcaacctggaatcgcaatggagaccaggggtctggcggattccggccagggtagcttcacaggccaggggatagccagactgagccgcctgatattcctgcttcgcaggtgggctgccagacacgttcaccatcaagatcaaggaccagatagcttccctgacagattccgtggggctgaattaaaggaggtttcatcccaggaatccaacgctcaagctaatgtgggtagccaggagccagcagaccgaggacggaggaagaagacaaaaaagaaggatgccatcgtggtggaccccagctcgaatctgtattaccgatggctgacagcaatcgcactgccagtcttttataattggtatttgttaatttgtcgagcctgttttgatgaactgcaatcagagtatcttatgttgtggttggtcttagattacagtgcggatgtgctctacgttcttgacgtgctggtgagggcacggaccggttttctggaacagggactgatggtctcagataccaatcgcctttggcaacactacaagacaacgacgcagttcaagctggacgtgctgagcctggtgccaacagatctggcatatttgaaagtgggtaccaactatcccgaggtgaggttcaacagactgctgaagtttagtagattgtttgagttcttcgatagaactgaaacaaggactaactaccccaatatgttcaggattggaaatttggtgctgtatatccttataatcatccattggaacgcctgcatttactttgctatttctaagtttatcggctttggcacggacagttgggtctatcctaacatttccattccagagcatggacggttgagccgcaaatacatttactccctttactggtcgactctgaccctcacaactatcggggaaactcctccaccggtgaaagacgaggaatatctttttgttgtggttgattttctcgtcggcgtcctcatcttcgctaccatagttggtaacgtgggaagtatgatttctaacatgaacgcatctcgcgctgagtttcaagcaaaaatagattccatcaagcagtatatgcaatttcggaaggtcaccaaagatctcgaaacacgggtcattagatggtttgactatttgtgggcaaacaaaaaaaccgtggatgagaaggaggtgctgaaatctttgcccgacaaattgaaggctgagatagccattaacgtgcatctggatactctgaaaaaggtcaggatatttcaggattgtgaggctggcctgttggtggagctagtactaaagctccgcccaacggtgtttagtcccggagattacatttgcaaaaaaggagatattggtaaagagatgtacattataaacgagggaaaattagctgtcgtcgccgacgacggtgtcactcagttcgttgtgctcagtgacggctcctacttcggcgaaatttccatcctgaatatcaaggggagtaagtcaggaaatcgtcgcacagctaatatccggtcaattggctactccgatctgttctgcctctctaaggatgatcttatggaggctcttaccgagtaccccgaagcaaagaaggccctggaggagaagggtcgccagatcctgatgaaagacaacctcatcgacgaggagctggcccgtgctggcgctgaccccaaagacctggaggaaaaagtggagcagcttggtagtagtctggacaccctccagacaagattcgcccgtttactagctgaatacaatgcaacccaaatgaagatgaagcagagactgagtcaattagaatcgcaggtgaagggagggggagataagccgttggcagacggggaggttccaggggatgctacaaaaactgaggataagcaacaatag

SEQ ID NO: 35978 - DNA, 2504 bp, Artificial Sequence
  derived and/or modified sequence
aaaacatcccaggaaggagtccagggtggccgcccacagttaggagagaacccagaacggaacgacggacttgtttgctttcttgcccctgactctccccgtcctccctgggagggttggggatgtgaactaatgacttctgcctctttcggaccgcctttgaggctccagagcctcaccttactttcccacggagagggaggccacaggctccttcagcagtcgccgagcagagtcctgggccgggagcgcgggggagggagcgagcggaactgcgcctaggaggccgagggaggaggcgctccgcagaccctggcgcgccgcggagaagctcaaactttggcaggcaatcatctggggggctaaatgtgacaaaccgagaagatggccaagatcaacacccaatactcccacccctccaggacccacctcaaggtaaagacctcagaccgagatctcaatcgcgctgaaaatggcctcagcagagcccactcgtcaagtgaggagacatcgtcagtgctgcagccggggatcgccatggagaccagaggactggctgactccgggcagggctccttcaccggccaggggatcgccaggctgtcgcgcctcatcttcttgctgcgcaggtgggctgccaggcatgtgcaccaccaggaccagggaccggactcttttcctgatcgtttccgtggagccgagcttaaggaggtgtccagccaagaaagcaatgcccaggcaaatgtgggcagccaggagccagcagacagagggagaaggaagaagacgaaaaagaaggatgcgatcgtggtggacccgtccagcaacctgtactaccgctggctgaccgccatcgccctgcctgtcttctataactggtatctgcttatttgcagggcctgtttcgatgagctgcagtccgagtacctgatgctgtggctggtcctggactactcggcagatgtcctgtatgtcttggatgtgcttgtacgagctcggacaggttttctcgagcaaggcttaatggtcagtgataccaacaggctgtggcagcattacaagacgaccacgcagttcaagctggatgtgttgtccctggtccccaccgacctggcttacttaaaggtgggcacaaactacccagaagtgaggttcaaccgcctactgaagttttcccggctctttgaattctttgaccgcacagagacaaggaccaactaccccaatatgttcaggattgggaacttggtcttgtacattctcatcatcatccactggaatgcctgcatctactttgccatttccaagttcattggttttgggacagactcctgggtctacccaaacatctcaatcccagagcatgggcgcctctccaggaagtacatttacagtctctactggtccaccttgacccttaccaccattggtgagaccccaccccccgtgaaagatgaggagtatctctttgtggtcgtagacttcttggtgggtgttctgatttttgccaccattgtgggcaatgtgggctccatgatctcgaatatgaatgcctcacgggcagagttccaggccaagattgattccatcaagcagtacatgcagttccgcaaggtcaccaaggacttggagacgcgggttatccggtggtttgactacctgtgggccaacaagaagacggtggatgagaaggaggtgctcaagagcctcccagacaagctgaaggctgagatcgccatcaacgtgcacctggacacgctgaagaaggttcgcatcttccaggactgtgaggcagggctgctggtggagctggtgctgaagctgcgacccactgtgttcagccctggggattatatctgcaagaagggagatattgggaaggagatgtacatcatcaacgagggcaagctggccgtggtggctgatgatggggtcacccagttcgtggtcctcagcgatggcagctacttcggggagatcagcattctgaacatcaaggggagcaagtcggggaaccgcaggacggccaacatccgcagcattggctactcagacctgttctgcctctcaaaggacgatctcatggaggccctcaccgagtaccccgaagccaagaaggccctggaggagaaaggacggcagatcctgatgaaagacaacctgatcgatgaggagctggccagggcgggcgcggaccccaaggaccttgaggagaaagtggagcagctggggtcctccctggacaccctgcagaccaggtttgcacgcctcctggctgagtacaacgccacccagatgaagatgaagcagcgtctcagccaactggaaagccaggtgaagggtggtggggacaagcccctggctgatggggaagttcccggggatgctacaaaaacagaggacaaacaacagtgaaaatgcagcatctgtctcctgcttcacagggtcgactgtcagggtgaccgtatgtggccgcagctgtgtggcatggaacttggtcaggg

SEQ ID NO: 35979 - DNA, 2031 bp, Artificial Sequence
  derived and/or modified sequence
atggccaagatcaacacccagtacagccaccccagcagaacccacctgaaggtgaagaccagcgacagagacctgaacagagccgagaacggcctgagcagagcccacagcagcagcgaggagaccagcagcgtgctgcagcccggcatcgccatggagaccagaggcctggccgacagcggccagggcagcttcaccggccagggcatcgccagactgagcagactgatcttcctgctgagaagatgggccgccagacacgtgcaccaccaggaccagggccccgacagcttccccgacagattcagaggcgccgagctgaaggaggtgagcagccaggagagcaacgcccaggccaacgtgggcagccaggagcccgccgacagaggcagaagaaagaagaccaagaagaaggacgccatcgtggtggaccccagcagcaacctgtactacagatggctgaccgccatcgccctgcccgtgttctacaactggtacctgctgatctgcagagcctgcttcgacgagctgcagagcgagtacctgatgctgtggctggtgctggactacagcgccgacgtgctgtacgtgctggacgtgctggtgagagccagaaccggcttcctggagcagggcctgatggtgagcgacaccaacagactgtggcagcactacaagaccaccacccagttcaagctggacgtgctgagcctggtgcccaccgacctggcctacctgaaggtgggcaccaactaccccgaggtgagattcaacagactgctgaagttcagcagactgttcgagttcttcgacagaaccgagaccagaaccaactaccccaacatgttcagaatcggcaacctggtgctgtacatcctgatcatcatccactggaacgcctgcatctacttcgccatcagcaagttcatcggcttcggcaccgacagctgggtgtaccccaacatcagcatccccgagcacggcagactgagcagaaagtacatctacagcctgtactggagcaccctgaccctgaccaccatcggcgagacccccccccccgtgaaggacgaggagtacctgttcgtggtggtggacttcctggtgggcgtgctgatcttcgccaccatcgtgggcaacgtgggcagcatgatcagcaacatgaacgccagcagagccgagttccaggccaagatcgacagcatcaagcagtacatgcagttcagaaaggtgaccaaggacctggagaccagagtgatcagatggttcgactacctgtgggccaacaagaagaccgtggacgagaaggaggtgctgaagagcctgcccgacaagctgaaggccgagatcgccatcaacgtgcacctggacaccctgaagaaggtgagaatcttccaggactgcgaggccggcctgctggtggagctggtgctgaagctgagacccaccgtgttcagccccggcgactacatctgcaagaagggcgacatcggcaaggagatgtacatcatcaacgagggcaagctggccgtggtggccgacgacggcgtgacccagttcgtggtgctgagcgacggcagctacttcggcgagatcagcatcctgaacatcaagggcagcaagagcggcaacagaagaaccgccaacatcagaagcatcggctacagcgacctgttctgcctgagcaaggacgacctgatggaggccctgaccgagtaccccgaggccaagaaggccctggaggagaagggcagacagatcctgatgaaggacaacctgatcgacgaggagctggccagagccggcgccgaccccaaggacctggaggagaaggtggagcagctgggcagcagcctggacaccctgcagaccagattcgccagactgctggccgagtacaacgccacccagatgaagatgaagcagagactgagccagctggagagccaggtgaagggcggcggcgacaagcccctggccgacggcgaggtgcccggcgacgccaccaagaccgaggacaagcagcagtag

SEQ ID NO: 35980 - protein, 878 aa, Artificial Sequence
  derived and/or modified sequence
MATAPSYPAGLPGSPGPGSPPPPGGLELQSPPPLLPQIPAPGSGVSFHIQIGLTREFVLLPAASELAHVKQLACSIVDQKFPECGFYGLYDKILLFKHDPTSANLLQLVRSSGDIQEGDLVEVVLSASATFEDFQIRPHALTVHSYRAPAFCDHCGEMLFGLVRQGLKCDGCGLNYHKRCAFSIPNNCSGARKRRLSSTSLASGHSVRLGTSESLPCTAEELSRSTTELLPRRPPSSSSSSSASSYTGRPIELDKMLLSKVKVPHTFLIHSYTRPTVCQACKKLLKGLFRQGLQCKDCKFNCHKRCATRVPNDCLGEALINGDVPMEEATDFSEADKSALMDESEDSGVIPGSHSENALHASEEEEGEGGKAQSSLGYIPLMRVVQSVRHTTRKSSTTLREGWVVHYSNKDTLRKRHYWRLDCKCITLFQNNTTNRYYKEIPLSEILTVESAQNFSLVPPGTNPHCFEIVTANATYFVGEMPGGTPGGPSGQGAEAARGWETAIRQALMPVILQDAPSAPGHAPHRQASLSISVSNSQIQENVDIATVYQIFPDEVLGSGQFGVVYGGKHRKTGRDVAVKVIDKLRFPTKQESQLRNEVAILQSLRHPGIVNLECMFETPEKVFVVMEKLHGDMLEMILSSEKGRLPERLTKFLITQILVALRHLHFKNIVHCDLKPENVLLASADPFPQVKLCDFGFARIIGEKSFRRSVVGTPAYLAPEVLLNQGYNRSLDMWSVGVIMYVSLSGTFPFNEDEDINDQIQNAAFMYPASPWSHISAGAIDLINNLLQVKMRKRYSVDKSLSHPWLQEYQTWLDLRELEGKMGERYITHESDDVRWEQFAAEHPLPGSGLPTDRDLGGACPPQDHDMQGLAERISVL

SEQ ID NO: 35981 - DNA, 2637 bp, Artificial Sequence
  derived and/or modified sequence
atggcaacggctcccagctatcctgccggattacccggcagccccggcccagggtccccgccccccccaggcgggctcgagctgcagtcccctccacctctcctgccgcagatccccgctcctggcagcggcgtaagcttccatattcagattgggctgacccgtgaattcgtcctcctgcctgcagccagcgagctggctcatgtgaagcagctcgcatgtagcattgttgatcaaaagtttcccgagtgcggcttctatggcctgtatgataagattttgctatttaagcacgatcctacttcggcaaatttgcttcagttagtgagatccagtggcgacatacaggagggcgacttggtcgaggtggtcttgtcagcgagcgctacgtttgaggatttccaaatccggcctcacgcactaactgtgcatagctatcgggctccggcattttgtgaccactgcggcgaaatgcttttcgggctcgtccgacagggcttgaaatgcgatggatgcggactgaactatcataagaggtgcgctttctccataccaaacaactgcagcggggcaaggaagcgccgactttcttcgacaagcttagcctccggccattccgtgagacttggtacgtccgagtcactgccctgtactgccgaggagttaagtcgtagcactaccgagctgctccccagaaggcccccttctagcagttcttcgtcctctgcctccagctacaccggaagaccgattgagctggacaaaatgctgttgtccaaggtcaaggtcccacatacctttctcatccactcgtacactagacctaccgtgtgccaggcctgtaaaaagctgttaaagggtctattcaggcagggcctgcagtgtaaggactgcaaatttaactgtcacaagcgctgcgccacccgggtgcctaacgattgcctgggcgaagcgttgataaacggggatgtgcctatggaggaggcaaccgacttctccgaagcggataagagcgctcttatggacgaatcagaggactctggagtgatccccggtagccattccgaaaacgccctgcacgcaagcgaggaggaggagggtgagggcggtaaggcccagagttctcttggatacattcccctgatgcgtgtcgtgcagagcgtgaggcatacaacccgcaagagctcaaccactctgcgcgagggttgggtagtgcactattctaataaagacaccctgcggaaaaggcactactggaggctagactgcaagtgcataaccctgttccaaaacaacactacaaatcgatactataaggaaatccctttgtccgaaattctcaccgtggaatctgcccagaatttcagcctagtcccccctgggacaaatccccactgctttgagatcgtgacagccaacgccacatactttgtcggagaaatgccgggcggtactccggggggaccctccggacagggagcagaagctgccagaggatgggagacagccatccgacaggcactgatgcccgtgattttacaggacgctccgagcgcccccgggcatgcaccccatcggcaggcatccctgtcaatttcagtttcaaattctcagattcaggaaaatgtggatatcgccactgtctaccagatcttccctgatgaagtactgggttctggtcagtttggcgtggtgtatgggggaaagcacagaaagaccgggagagatgttgcagtgaaggtcatcgacaaactgcggtttcctacaaagcaagaatcccaactgagaaatgaagtcgctattttgcagagccttcgccaccctggtattgttaaccttgagtgtatgttcgaaactcccgaaaaggtatttgttgtaatggagaagctgcacggggacatgcttgagatgattctgagctccgagaagggccggctgccagaacggctcacgaagtttttgataactcagatcctggtggccctccggcacctacattttaagaatattgtgcactgtgatctcaagccggagaacgtgctcttggcatctgcggaccccttcccccaggtgaaactgtgtgatttcggcttcgcacggataattggggaaaagtcgtttaggcggtccgtggtgggtacacccgcctacctggcgcccgaagtgctgctgaaccagggttataatcgttccctagatatgtggagtgtaggtgtcatcatgtatgtttctttgagtggaacatttccttttaacgaggatgaggacatcaatgaccagatacaaaatgctgcctttatgtacccggcctccccttggtcccacatctctgcaggggccattgacctgatcaataacctgctccaagtcaagatgagaaagaggtattccgtggataaatctctttctcacccttggttacaggagtaccagacttggctcgacctacgcgagctggaaggtaagatgggcgagaggtatattacacatgaaagcgatgacgtacgctgggaacagttcgcagccgaacaccctcttcccgggtccggacttccaacggaccgcgacctcggtggcgcctgtccaccccaggaccacgatatgcagggcctggccgagagaatttccgttctatag

SEQ ID NO: 35982 - DNA, 2637 bp, Artificial Sequence
  derived and/or modified sequence
atggccaccgctccttcatatcctgcggggctccctggtagcccaggacccgggagcccccctcctcccggaggcctggagctacagtctcccccacctttgctgccgcagattcccgccccgggctctggcgtgtcctttcacatccagattggacttactcgcgaattcgtcctcctccccgcagcctcagaactcgcgcacgttaaacagcttgcctgttccatcgtagatcagaaatttcccgaatgcgggttttatggactgtatgataaaatcctattgttcaagcacgaccctaccagtgcgaacctgttacagctcgtgcgctcctccggcgacattcaggaaggagaccttgttgaagttgtgcttagtgcctcagccaccttcgaggatttccagatcagacctcacgcccttactgttcactcgtatcgcgctcctgcattttgtgaccactgcggcgaaatgctgttcggtttggttcgtcagggcctgaaatgtgatggatgcggtctgaactatcataagcgatgcgctttttccatccctaacaattgtagcggggcgagaaaaaggcgtctctcctccacatcccttgcctctggtcactcggtgcggctggggacctcagaatctctaccttgcaccgcggaggaacttagtcgatcaacaactgaactgctgccaagaagacctccaagcagttcatctagctcctcggcctccagttataccggacggccgattgagctggacaagatgctgctttctaaagttaaagtaccccacactttcctcatccatagctatactcggcccaccgtctgccaggcttgtaagaagctcttgaaaggcttgttccgccagggcctccagtgtaaggattgtaaatttaattgccataagcggtgtgctaccagggtgcccaatgactgtctgggagaggccctgatcaacggcgacgtgccaatggaggaagctaccgacttcagcgaggctgataaaagcgcgctgatggacgaaagcgaggatagcggagtcatcccaggctctcacagtgagaacgccctgcacgccagcgaggaggaggagggggaaggaggaaaggcccagtcctctctgggatacattccccttatgagggtagtgcaaagcgttaggcacaccactaggaagtcaagcactaccttgcgcgaagggtgggtcgtgcattactccaataaggacacactcagaaaaagacactactggcgcctcgattgcaaatgtataactctttttcagaataataccaccaacagatattataaagaaatcccactgagcgagattctgaccgtcgagagtgcccagaatttcagtctggtgccccccggaaccaatccacattgtttcgagattgtcacggccaacgctacgtattttgtgggcgagatgccggggggcacaccggggggccccagcggacagggtgccgaggcagcacgaggctgggaaaccgcaattcgtcaggccctgatgcccgttatattacaggatgcccccagtgctccgggacacgcaccccatcggcaggcctcattgtcgattagcgtgtccaattcacagatacaggagaatgtggacatcgcgaccgtctatcagatatttcctgacgaagtcctgggctcgggccagtttggagtggtatatgggggcaagcaccgcaaaaccggtcgcgatgtagccgtgaaggtcatcgacaaactgaggtttccaaccaagcaggaatctcagctccgcaacgaagtcgccatcctgcagtctttaaggcacccaggcatagtgaacctagaatgcatgttcgaaacccccgagaaagtctttgtggtcatggaaaaactccacggggacatgttagaaatgatcctgtccagcgaaaaaggccgccttcctgaacggctgaccaaatttttaatcacccagatcttagtggcccttaggcatcttcacttcaagaatatagtgcattgcgatctcaaacctgagaacgtgctgctcgccagcgccgaccccttcccacaagtgaagctttgtgacttcgggtttgcccgaataatcggggagaaaagcttccgcagaagtgtggtgggcacccccgcgtatctcgcccctgaggtgctacttaatcagggctataatcggtctctagatatgtggagcgtgggggtaattatgtacgtcagtctaagtggaactttcccttttaacgaggacgaggacatcaacgaccaaatccaaaacgcagcattcatgtacccagcatctccatggtctcatattagcgcaggcgctatcgatcttatcaacaatcttcttcaagtaaagatgaggaagaggtactccgtagataagtccctcagccacccctggctccaggagtaccagacgtggttagatttgcgtgaactggaaggcaagatgggcgaacgctatattacccacgagtctgacgatgtgagatgggaacaatttgcggccgaacatcctctgcccgggagtggcttaccaacggaccgggacctgggaggggcatgccccccacaggaccatgatatgcagggcttggctgagaggatatccgttctctag

SEQ ID NO: 35983 - DNA, 2637 bp, Artificial Sequence
  derived and/or modified sequence
atggccacagcccccagctacccagctggcctgcccggcagccctggccctggcagccccccacctcctgggggcctggagctgcagagccccccacccctgctgccccagatcccagcccctggcagcggcgtgtccttccacatccagatcggcctgacccgggagtttgtgctgctgcctgctgccagcgagctggcccacgtgaagcagctggcctgcagcatcgtggaccagaagttcccagaatgtggcttctacggcctgtatgacaagatcctgctcttcaagcatgaccccaccagcgccaacctgctgcagctggtgcgcagcagcggggacatccaggagggggacctggtggaggtggtgctgagcgccagcgccacctttgaggacttccagatccggccccacgccctgactgtgcacagctaccgggccccagccttctgtgaccactgtggggagatgctgtttggcctggtgcggcagggcctgaagtgtgatggctgcggcctgaactaccacaagagatgtgccttcagcatccccaacaactgcagcggggccaggaagaggcggctgagcagcaccagcctggccagcggccacagcgtgcggctgggcaccagcgagagcctgccctgcacagctgaggagctgagccgcagcaccacagagctgctgccccggcggccccccagcagcagcagcagcagcagcgccagcagctacacaggccggcccatcgagctggacaagatgctgctgagcaaggtgaaggtgccccacaccttcctgatccacagctacacccggcccaccgtgtgccaggcctgcaagaagctgctgaagggcctcttccggcagggcctgcagtgcaaggactgcaagttcaactgccacaagagatgtgccaccagggtgcccaatgactgcctgggggaggccctgatcaatggagatgtgcccatggaggaggccacagacttcagcgaggccgacaagagcgccctgatggatgaaagtgaagattctggagtcatccctggcagccacagtgaaaatgccctgcacgccagcgaggaggaggagggggagggcggcaaggcccagagcagcctgggctacatccccctgatgagggtggtgcagagcgtgcgccacaccaccaggaagagcagcaccaccctgcgggagggctgggtggtgcactacagcaacaaggacaccctgaggaagaggcactactggaggctggactgcaagtgcatcaccctcttccagaacaacaccaccaaccgctactacaaggagatccccctgtctgagatcctgactgtggagagcgcccagaacttcagcctggtgcccccaggcaccaacccccactgctttgaaattgtgacagccaatgccacctactttgtgggggagatgcctgggggcacccctgggggccccagcggccagggcgctgaggccgcccggggctgggagacagccatccggcaggccctgatgcctgtgatcctgcaggatgcccccagcgcccctggccacgccccccaccggcaggccagcctgagcatctctgtgagcaacagccagatccaggagaatgtggacatcgccaccgtgtaccagatcttcccagatgaggtgctgggcagcggccagtttggagtggtgtatggaggcaagcacaggaagacaggaagagatgtggccgtgaaggtgattgacaagctgcgcttccccaccaagcaggagagccagctgagaaatgaggtggccatcctgcagagcctgcggcaccctggcatcgtgaacctggagtgcatgtttgagaccccagagaaggtgtttgtggtgatggagaagctgcatggagacatgctggagatgatcctgagcagcgagaagggccgcctgcctgagcggctgaccaagttcctgatcacccagatcctggtggccctgcggcacctgcacttcaagaacatcgtgcactgtgacctgaagccagaaaatgtgctgctggccagcgctgaccccttcccccaggtgaagctgtgtgactttggatttgcccgcatcatcggggagaagagcttccgccgctctgtggtgggcaccccagcctacctggcccctgaggtgctgctgaaccagggctacaacagaagcctggacatgtggagcgtgggcgtcatcatgtatgtgtccctgagcggcaccttccccttcaatgaagatgaggacatcaatgaccagatccagaatgctgccttcatgtacccagccagcccctggagccacatctctgctggggccatcgacctgatcaacaacctgctgcaggtgaagatgaggaagcgctacagcgtggacaagagcctgagccacccctggctgcaggagtaccagacctggctggacctgcgggagctggagggcaagatgggagagcgctacatcacccatgaaagtgatgatgtgcgctgggagcagtttgctgctgagcaccccctgcccggcagcggcctgcccacagaccgggacctgggcggggcctgccccccccaggaccatgacatgcagggcctggccgagcgcatctctgtgctgtag

SEQ ID NO: 35984 - DNA, 2637 bp, Artificial Sequence
  derived and/or modified sequence
atggccaccgcccccagctaccccgccggcctgcccggcagccccgggccaggcagcccgcccccaccaggaggccttgagttacagtcaccgcccccgctccttccacagatccccgccccaggtagtggagtcagctttcacattcagatagggctgacacgggaatttgtcctcctgcctgctgcctcggaactggcgcacgtaaagcagcttgcttgttccatagtggaccagaaattccctgagtgtggcttttacggcctgtatgataaaatactgctgtttaagcacgatcccacttccgccaatctgcttcagcttgttcgcagctcaggtgatattcaggagggcgatttggtcgaggtcgtgctctcagcttctgcgacatttgaggacttccaaatcagaccccatgctctgaccgtccacagttatagagccccagctttctgtgatcattgtggcgagatgcttttcggcctggtgaggcaggggctgaagtgcgacgggtgcgggctaaattatcataagcgctgcgccttctccatccccaataactgtagcggcgctcgtaagcgcaggctctcatccactagtttggccagcgggcatagtgttagacttggtacatccgagtccctgccctgtacggctgaggagctctccagaagtaccacggagctcctgccacgccggccaccgtcaagcagctcttcttcttccgcttcaagctacactggtcgaccgatcgagctagacaaaatgctcctctccaaagtgaaggtcccccacaccttcctaatccatagctacactcggcccaccgtttgtcaggcgtgcaagaaactgctgaagggtctgtttcgtcaggggctacagtgcaaggactgtaaattcaactgccacaagcggtgcgccacacgggtgccaaacgattgtctcggggaggccctcatcaacggcgacgtcccaatggaggaggcgaccgacttcagtgaggcagataaaagtgccctcatggatgaatcagaggactctggagtgatcccaggcagccatagtgaaaatgcactccatgccagcgaagaggaggagggcgaggggggaaaagcccagagcagcctagggtacatccctctgatgcgcgttgttcaaagcgtccggcatactacacgaaagtcttctacgacgctcagagagggatgggtagtgcactactctaataaggataccctgaggaagcgtcattattggaggttggactgcaaatgcatcacgctgttccaaaacaataccacaaaccgctattacaaggagattccactcagtgagatcttgaccgtggagtctgcacagaacttcagcttagtgccccctggcacaaatccacactgcttcgagatagtaaccgctaatgcaacatattttgtgggcgagatgccaggcggtacacctggcgggccttccggccaaggcgcggaagctgctagaggttgggagacagcaatcagacaggccctgatgcccgtgatcctgcaggacgccccaagtgcccctggacacgctcctcatcgccaggcatcactgagcataagcgtgagtaattcccagatacaagaaaacgtcgacatcgctaccgtgtaccagatctttcccgacgaagtgctggggagcggccaatttggggtggtgtatgggggtaaacatagaaaaacagggcgcgacgtcgcagtcaaggtgattgacaagctcaggtttccaaccaaacaagaaagccagcttcgtaatgaagtggccattctgcagtctttgagacacccagggattgtcaacctggagtgtatgttcgaaactcctgaaaaggtatttgtcgtgatggaaaagcttcacggggatatgttagagatgattctgtcttcagagaaaggccgcttaccagagaggttgactaaattcctcattacacaaattcttgtcgccctccggcatctgcactttaaaaatattgtgcattgcgatttgaaacctgagaatgtgctccttgcctctgccgatcccttccctcaggtgaaattatgtgacttcggtttcgcaaggatcattggagaaaaaagctttcgtaggagtgtagtgggaacacctgcatatctcgctcctgaggtgctcctgaaccagggctataatcgatcattagacatgtggtctgtgggggttatcatgtatgtgtccctgtcaggcacctttccattcaatgaggacgaagatattaatgaccagatccagaatgcggcgttcatgtacccagcttctccatggagtcacatatccgctggtgctattgacctcatcaataatctgctgcaggtgaaaatgcgaaagagatattccgtggacaagtccttgagccatccatggcttcaggagtatcagacatggttagacctgagggagctggaggggaaaatgggtgagcgatacatcacgcatgaatccgatgatgtaagatgggagcagtttgcagccgaacatccattaccaggaagtggcctccctacggaccgcgacctgggcggcgcctgccctccacaggaccacgatatgcagggattggcagagcggatcagtgttttgtag

SEQ ID NO: 35985 - DNA, 2637 bp, Artificial Sequence
  derived and/or modified sequence
atggccaccgcccccagctaccccgccggcctgcccggcagccccggtccgggcagcccccctccccccggaggattggagcttcagtcacctcccccactgttgccacagattcccgcacccggtagcggcgttagctttcacattcagatagggcttactagagagttcgtgctcctgccagcagcttccgagctagcccacgtaaagcagctggcctgttccatagtggaccaaaagttccccgaatgtggcttctacggactatatgacaaaatactgctcttcaagcatgaccccacaagtgcaaatctgctgcagctggtgagatctagcggggatatccaggagggagatcttgtcgaagtagtgctgagcgcaagcgctacgttcgaagactttcagataagacctcacgccttaacggtgcactcctaccgtgcacccgctttctgcgatcactgcggcgaaatgctattcggcttggtcaggcagggcttaaagtgtgacggctgcggactgaactatcataagcgctgtgctttctcaattcctaataattgctcaggagctagaaaaagacgcctgtcaagcaccagccttgcttctggtcacagtgtgcggctcggtacctctgagagtctgccatgcaccgcagaagaattatcacgcagcacaactgaattgctgccccgccgccctcctagttcaagctcctcctcatcggcttcctcttatactggaaggcccattgaattagataagatgctactgtccaaggtgaaggtgccccatactttccttatccattcatatacccgacccactgtttgccaagcctgcaagaaactgctcaagggcctgttccgccagggcttacagtgtaaggattgtaagtttaattgtcacaaaaggtgtgcaacgcgagtgcccaatgactgtctgggtgaagccttgattaacggggatgtgccgatggaagaagcaacagatttttccgaggcagataagtccgcactgatggacgagagtgaagactctggcgtaatcccaggatctcattctgaaaacgcattacacgcttcggaagaggaggagggagaaggagggaaggcgcagtcttcactggggtacattcccttaatgcgggtggtgcagagcgtaaggcacaccactcgcaagagcagcactacactccgcgaggggtgggttgtacattacagcaacaaggatacactccgcaaacgacactattggagactggactgtaagtgtatcacactgtttcagaataatacaaccaacaggtattataaggaaatccccctgagtgaaatcttgactgtggagagtgcacagaacttcagcctggttcctccaggaacaaatccgcactgttttgagatcgtcacggctaatgccacatacttcgtcggtgagatgcccggagggacaccaggtggaccatcaggacagggagctgaggctgcgcggggctgggaaacagccattcggcaggccctcatgcctgtgattctgcaggacgcaccttctgccccgggacatgctcctcaccggcaggccagcctgtctatctccgtgagcaattcacagatccaggagaacgtcgatattgcaacagtttatcagattttccccgatgaagtcctggggtctgggcaattcggcgtcgtctacggcggaaaacacaggaaaacaggacgcgacgtagcagttaaggtcatcgacaagttacgcttcccaactaagcaagaaagtcagctcaggaacgaggtggcaattcttcaatcccttagacaccccgggattgtcaacttggaatgtatgtttgagacccctgaaaaggtctttgttgtcatggaaaagctgcatggggacatgctggaaatgatcctgagctcagagaagggccggctacctgagcgtctgactaagttcttgatcactcaaattctggttgcactcaggcatctgcatttcaagaacatagtgcattgtgacctgaagcctgaaaacgtcttgctcgcgtcagccgacccatttcctcaggtcaaactgtgtgacttcggatttgccaggattatcggcgaaaagtctttccgccggagcgtggtcggtacccccgcttatctggcccccgaggtgctcctgaaccagggctataaccggagcctagacatgtggtcagtgggagttattatgtatgtcagcctttctggaactttccccttcaacgaagacgaggacattaatgatcagatccagaacgctgcctttatgtatccagccagcccctggagccatatctccgcaggggcaatcgatctgattaataacctgctgcaggtcaagatgcggaagcgctacagcgtagacaagtcgctaagtcacccatggctgcaggaatatcagacttggctcgatctgcgcgagctcgagggtaaaatgggcgagcgatatataacgcacgaaagcgacgacgttcggtgggaacagtttgccgcggaacacccactgccaggcagtggcctgccaaccgatcgcgatctgggaggtgcctgtccccctcaggaccatgatatgcagggcctcgccgaacgaatttccgttctttag

SEQ ID NO: 35986 - DNA, 2637 bp, Artificial Sequence
  derived and/or modified sequence
atggctaccgccccatcttaccccgctggactccctggtagcccaggacccggaagtccacctcctcctgggggactggagctccagtcccctcctccgctactcccccagatacccgctcctggctctggcgtgagctttcacatccagattggtctgactagagaatttgtcctcctacccgcagcatctgagttggcccatgtgaaacagctggcatgttcgattgtcgatcagaagtttcccgagtgtggtttttatgggctgtacgacaaaatactcttgtttaaacacgacccgacatctgccaacttattgcagcttgtccgttcatcgggagatatccaggaaggcgatttagtggaggtggtgctctctgcgtccgcgacctttgaagattttcaaatccggcctcacgccctcactgtccatagctaccgtgccccagctttttgtgaccactgtggagagatgctttttgggttggtgagacaagggttgaagtgcgacgggtgcggactgaactaccataaaaggtgcgccttcagtatccccaacaactgttccggagcaagaaaacggcgactgtcaagcacgtcactcgctagcgggcacagtgtgagactaggtacatccgagagcctgccatgtacagccgaggagctgagtcggagtactactgagctgctccccagaaggccaccatcctcttcctcctccagttcagcatcttcatacactggacggccaattgaactggacaagatgctgctgtctaaagttaaagtgccccacacgtttctcatccatagttacactcgccctactgtctgccaggcatgcaaaaaactcctgaaaggactctttagacagggcttgcagtgcaaggactgtaagttcaactgtcacaagagatgcgctacacgtgttccaaacgattgcctgggcgaagctctgatcaatggcgatgtgcccatggaggaagccacggattttagcgaagccgacaagtccgctctgatggatgagagcgaagatagtggcgtaattcctggcagccattcggaaaatgcgctacacgccagcgaggaggaggagggagaaggaggaaaagcgcagtccagcctcgggtacatccctctcatgcgagtggtccaatcagttaggcacaccacgcggaaatcctccaccacattgagagaggggtgggtggtccattatagcaacaaggatactcttcgtaaacgtcattactggagactagactgtaaatgtatcacactgtttcagaataacactaccaacaggtattacaaggaaatccctctgagcgagattcttaccgtcgagagtgctcaaaacttcagcctggtccctcccggaactaatcctcactgcttcgaaattgtgacagccaacgccacgtatttcgtgggcgaaatgcccggagggaccccgggaggaccatcaggacagggagcagaagctgccagaggctgggaaacagctatccgccaggctctgatgcccgtgatacttcaggacgctccctcagctccaggacacgctcctcataggcaagcctcactgtcaatctcagtctcaaactcacagattcaggagaacgttgatattgctacggtgtatcagattttccctgatgaagttttgggctccggccagttcggtgtggtttacgggggaaagcaccgcaagacaggaagggatgttgcggtcaaagtgatcgacaagttgcgcttccccacaaagcaggagtcccagttacgtaacgaggtagctatcctgcagtcgttaaggcatcccggtattgttaatctggaatgtatgttcgagacacccgagaaggtttttgtcgtcatggaaaagctgcacggcgacatgctcgaaatgatactctcctctgaaaaggggcgtctgcccgaacgtctgacaaaatttctcattacccagattcttgtcgctctgaggcatctgcatttcaagaacattgtgcactgcgatctgaaaccagaaaatgttctgctggcatccgctgacccctttccacaggtcaaactttgcgatttcggattcgcccgaatcataggggagaagtcatttcgccgatctgtcgttggaacacccgcatacctcgctccagaggtgttgctgaatcaaggctataatagatccctggatatgtggtctgtgggtgtcataatgtacgtcagcctgagcgggacatttccctttaacgaggatgaggacatcaacgaccagatccagaatgcagcctttatgtatcctgccagcccctggtcccacattagcgcaggagcaattgacctcataaacaacctactgcaagtgaaaatgcgaaagaggtactccgtggataaatccctgagtcacccgtggctgcaagagtatcaaacgtggttagacttgcgggaactcgaggggaaaatgggcgaaaggtacattacacacgaaagcgacgatgtgaggtgggagcagttcgcagccgaacatccactaccaggaagtgggctccccaccgacagagacctgggcggagcctgcccaccacaggaccacgacatgcaaggcctcgccgagcgaattagtgtgctatag

SEQ ID NO: 35987 - DNA, 2637 bp, Artificial Sequence
  derived and/or modified sequence
atggctactgcaccatcatatccggcaggactgcctgggagccccggacccggtagcccgccacctcccggtggtctggaactgcagtccccaccacctctactgcctcagatccccgctccagggtctggagtctccttccacattcaaattggccttacacgcgagttcgtactcttgcccgctgcttctgagcttgcgcatgtgaagcagcttgcatgctcgatcgtcgaccaaaaatttcccgaatgcggcttctacggcctgtatgacaaaattcttttgttcaaacacgaccccacttccgccaatctgctgcaactggtaaggtcgtcaggtgatatccaagagggggatttagtggaagtggtgctgtccgccagcgccacgtttgaagacttccagatccggccacatgctctgactgtgcattcttaccgagctccagcgttctgtgaccactgcggagaaatgctatttgggctggtgcgccagggcctaaagtgcgacggctgtgggcttaattatcataagagatgcgcttttagcatccctaataactgcagtggggctaggaagcgcaggctcagcagcacctccttagcatcaggacattctgtaagattaggcacgtccgaatctctcccctgcaccgctgaggagctatcccgctccactaccgagttgctgccaaggagacctccttcatcgtcatcaagcagtagcgcttcaagctacacaggcagacccatcgagctcgacaaaatgctcctcagcaaagtgaaagtacctcacactttcttgatccattcttatacccgtccaaccgtctgccaagcttgtaagaaactacttaaaggtttgtttcgtcagggcctccagtgtaaggactgcaagtttaactgccataagcgttgtgccacaagggtcccaaatgactgtctgggagaggcactcatcaatggcgacgtgcctatggaagaagcaacagatttttctgaagccgacaaatccgcactaatggatgagagcgaagattccggggtcatccctggatcacactctgagaacgccctacacgcctctgaagaggaggagggcgaggggggaaaagcacagagtagtctgggttatatacccctcatgcgcgtagtgcagtcggtccgacacactacgcgcaagtccagtaccactctcagagaggggtgggtggtgcactactctaacaaagatacgcttcgaaaaaggcattattggcgactggactgcaagtgcataaccctgtttcagaacaataccacaaacagatattataaggaaattccattgtccgaaatacttaccgtggaatcagcgcagaattttagtctggtgccaccgggaaccaaccctcattgttttgaaatcgtaaccgccaatgctacctacttcgtgggtgagatgcctggtggaaccccagggggtcctagtggacagggcgcagaagctgctcgaggttgggaaactgctatcagacaggcactgatgcccgtcatcctacaggatgccccaagcgcgccaggacatgcccctcacaggcaggccagcttgtcgatttccgtatctaactcccagattcaagagaatgttgacattgccactgtttatcagatattcccagatgaagtgctggggtctgggcagtttggagtcgtttacgggggaaaacatagaaagacaggtagggacgtagctgtgaaggtgatagacaaactgcggtttcctaccaagcaggaatcccagttgcgaaatgaggtcgccattctgcagtccttgcgacaccctgggatagtgaacttagaatgtatgtttgaaacacccgagaaggtgttcgtagtgatggaaaaactgcacggagacatgcttgagatgatcctgagcagtgagaaaggccgtctgcccgagcgcctcaccaagttccttatcactcagatattagttgcactgaggcatctacatttcaagaatattgtccactgcgacttaaaacccgagaatgtgttgttggcatccgccgaccctttccctcaagtcaagctgtgcgatttcggattcgctaggatcatcggtgagaaatcatttcgacggtctgtcgttggtacacctgcgtacctggcgcctgaagttctattgaaccagggatacaatcgctcactggatatgtggtcagtaggggttatcatgtatgtgtccctgtccggtacattcccttttaatgaggacgaggacatcaacgaccagattcagaatgctgctttcatgtaccctgcgagtccctggtcccatatctctgccggtgctattgacctcattaataatctactgcaggtgaaaatgaggaagcgatactccgtagacaagtctctgagtcacccttggctgcaagagtaccagacgtggctggacctccgcgaactggagggcaagatgggcgaaaggtacatcacacacgagtctgatgacgtccggtgggaacagtttgccgcagaacaccctctgcctgggagcggactgcccaccgaccgggatttagggggtgcttgccctccccaggatcacgatatgcagggacttgccgaacggattagcgtcctctag

SEQ ID NO: 35988 - DNA, 3600 bp, Artificial Sequence
  derived and/or modified sequence
actgtcgctccggacacttcctcctgggccgccgccgccgccgccgacttaaactttggagggggaaaaagagctactggcgcctggcgaccctccctgccccccacccaaccccgctccggcaacgcccccttcctcacggctcccgaccgaacttttctccaacttctgcgactcgtgagattcccttctacccactccggccctcgggacccctctgcccatcccctggccggtcgggtccctgcgaacccctttatctctggaatccactcggtccccgactcagagactcctgccctccacccccaaggtgaattcccccgggccgccttctgagtgggatcctcttcttggagcactggatcctgggattccctctgcccccttctcaatccctcctctagggaaggggcctttgaatcgcgggctctcctgatccctgtgaccccgacctactagatttcctctcaggcttcttggaatctcaatcgctgggacctccaacccactacttttctcctttctgatcttctgggagccctggattccgggcctctgacccactatagtgcctttctctccttcccaggaccccgccatcctcaggtcccctccgcctgccagatcttttctcggatccccgctctcccaccacctgctcacgagatcccgcggatctagaacccagggtcccccggggccccccggccgggtcccgggtgggctccaggcggccggtccccggcctccccccatggccaccgccccctcttatcccgccgggctccctggctctcccgggccggggtctcctccgccccccggcggcctagagctgcagtcgccgccaccgctactgccccagatcccggccccgggttccggggtctcctttcacatccagatcgggctgacccgcgagttcgtgctgttgcccgccgcctccgagctggctcatgtgaagcagctggcctgttccatcgtggaccagaagttccctgagtgtggcttctacggcctttacgacaagatcctgcttttcaaacatgaccccacgtcggccaacctcctgcagctggtgcgctcgtccggagacatccaggagggcgacctggtggaggtggtgctgtcggcctcggccaccttcgaggacttccagatccgcccgcacgccctcacggtgcactcctatcgggcgcctgccttctgtgatcactgcggggagatgctcttcggcctagtgcgccagggcctcaagtgcgatggctgcgggctgaactaccacaagcgctgtgccttcagcatccccaacaactgtagtggggcccgcaaacggcgcctgtcatccacgtctctggccagtggccactcggtgcgcctcggcacctccgagtccctgccctgcacggctgaagagctgagccgtagcaccaccgaactcctgcctcgccgtcccccgtcatcctcttcctcctcttctgcctcatcgtatacgggccgccccattgagctggacaagatgctgctctccaaggtcaaggtgccgcacaccttcctcatccacagctatacacggcccaccgtttgccaggcttgcaagaaactcctcaagggcctcttccggcagggcctgcaatgcaaagactgcaagtttaactgtcacaaacgctgcgccacccgcgtccctaatgactgcctgggggaggcccttatcaatggagatgtgccgatggaggaggccaccgatttcagcgaggctgacaagagcgccctcatggatgagtcagaggactccggtgtcatccctggctcccactcagagaatgcgctccacgccagtgaggaggaggaaggcgagggaggcaaggcccagagctccctggggtacatccccctaatgagggtggtgcaatcggtgcgacacacgacgcggaaatccagcaccacgctgcgggagggttgggtggttcattacagcaacaaggacacgctgagaaagcggcactattggcgcctggactgcaagtgtatcacgctcttccagaacaacacgaccaacagatactataaggaaattccgctgtcagaaatcctcacggtggagtccgcccagaacttcagccttgtgccgccgggcaccaacccacactgctttgagatcgtcactgccaatgccacctacttcgtgggcgagatgcctggcgggactccgggtgggccaagtgggcagggggctgaggccgcccggggctgggagacagccatccgccaggccctgatgcccgtcatccttcaggacgcacccagcgccccaggccacgcgccccacagacaagcttctctgagcatctctgtgtccaacagtcagatccaagagaatgtggacattgccactgtctaccagatcttccctgacgaagtgctgggctcagggcagtttggagtggtctatggaggaaaacaccggaagacaggccgggacgtggcagttaaggtcattgacaaactgcgcttccctaccaagcaggagagccagctccggaatgaagtggccattctgcagagcctgcggcatcccgggatcgtgaacctggagtgcatgttcgagacgcctgagaaagtgtttgtggtgatggagaagctgcatggggacatgttggagatgatcctgtccagtgagaagggccggctgcctgagcgcctcaccaagttcctcatcacccagatcctggtggctttgagacaccttcacttcaagaacattgtccactgtgacttgaaaccagaaaacgtgttgctggcatcagcagacccatttcctcaggtgaagctgtgtgactttggctttgctcgcatcatcggcgagaagtcgttccgccgctcagtggtgggcacgccggcctacctggcacccgaggtgctgctcaaccagggctacaaccgctcgctggacatgtggtcagtgggcgtgatcatgtacgtcagcctcagcggcaccttccctttcaacgaggatgaggacatcaatgaccagatccagaacgccgccttcatgtacccggccagcccctggagccacatctcagctggagccattgacctcatcaacaacctgctgcaggtgaagatgcgcaaacgctacagcgtggacaaatctctcagccacccctggttacaggagtaccagacgtggctggacctccgagagctggaggggaagatgggagagcgatacatcacgcatgagagtgacgacgtgcgctgggagcagtttgcagcagagcatccgctgcctgggtctgggctgcccacggacagggatctcggtggggcctgtccaccacaggaccacgacatgcaggggctggcggagcgcatcagtgttctctgaggtcctgtgccctcgtccagctgctgccctccacagcggttcttcacaggatcccagcaatgaactgttctagggaaagtggcttcctgcccaaactggatgggacacgtggggagtggggtggggggagctatttccaaggcccctccctgtttccccagcaattaaaacggactcatctctggccccatggccttgatctcagc

SEQ ID NO: 35989 - DNA, 3321 bp, Artificial Sequence
  derived and/or modified sequence
actgtcgctccggacacttcctcctgggccgccgccgccgccgccgacttaaactttggagggggaaaaagagctactggcgcctggcgaccctccctgccccccacccaaccccgctccggcaacgcccccttcctcacggctcccgaccgaacttttctccaacttctgcgactcgtgagattcccttctacccactccggccctcgggacccctctgcccatcccctggccggtcgggtccctgcgaacccctttatctctggaatccactcggtccccgactcagagactcctgccctccacccccaaggaccccgccatcctcaggtcccctccgcctgccagatcttttctcggatccccgctctcccaccacctgctcacgagatcccgcggatctagaacccagggtcccccggggccccccggccgggtcccgggtgggctccaggcggccggtccccggcctccccccatggccaccgccccctcttatcccgccgggctccctggctctcccgggccggggtctcctccgccccccggcggcctagagctgcagtcgccgccaccgctactgccccagatcccggccccgggttccggggtctcctttcacatccagatcgggctgacccgcgagttcgtgctgttgcccgccgcctccgagctggctcatgtgaagcagctggcctgttccatcgtggaccagaagttccctgagtgtggcttctacggcctttacgacaagatcctgcttttcaaacatgaccccacgtcggccaacctcctgcagctggtgcgctcgtccggagacatccaggagggcgacctggtggaggtggtgctgtcggcctcggccaccttcgaggacttccagatccgcccgcacgccctcacggtgcactcctatcgggcgcctgccttctgtgatcactgcggggagatgctcttcggcctagtgcgccagggcctcaagtgcgatggctgcgggctgaactaccacaagcgctgtgccttcagcatccccaacaactgtagtggggcccgcaaacggcgcctgtcatccacgtctctggccagtggccactcggtgcgcctcggcacctccgagtccctgccctgcacggctgaagagctgagccgtagcaccaccgaactcctgcctcgccgtcccccgtcatcctcttcctcctcttctgcctcatcgtatacgggccgccccattgagctggacaagatgctgctctccaaggtcaaggtgccgcacaccttcctcatccacagctatacacggcccaccgtttgccaggcttgcaagaaactcctcaagggcctcttccggcagggcctgcaatgcaaagactgcaagtttaactgtcacaaacgctgcgccacccgcgtccctaatgactgcctgggggaggcccttatcaatggagatgtgccgatggaggaggccaccgatttcagcgaggctgacaagagcgccctcatggatgagtcagaggactccggtgtcatccctggctcccactcagagaatgcgctccacgccagtgaggaggaggaaggcgagggaggcaaggcccagagctccctggggtacatccccctaatgagggtggtgcaatcggtgcgacacacgacgcggaaatccagcaccacgctgcgggagggttgggtggttcattacagcaacaaggacacgctgagaaagcggcactattggcgcctggactgcaagtgtatcacgctcttccagaacaacacgaccaacagatactataaggaaattccgctgtcagaaatcctcacggtggagtccgcccagaacttcagccttgtgccgccgggcaccaacccacactgctttgagatcgtcactgccaatgccacctacttcgtgggcgagatgcctggcgggactccgggtgggccaagtgggcagggggctgaggccgcccggggctgggagacagccatccgccaggccctgatgcccgtcatccttcaggacgcacccagcgccccaggccacgcgccccacagacaagcttctctgagcatctctgtgtccaacagtcagatccaagagaatgtggacattgccactgtctaccagatcttccctgacgaagtgctgggctcagggcagtttggagtggtctatggaggaaaacaccggaagacaggccgggacgtggcagttaaggtcattgacaaactgcgcttccctaccaagcaggagagccagctccggaatgaagtggccattctgcagagcctgcggcatcccgggatcgtgaacctggagtgcatgttcgagacgcctgagaaagtgtttgtggtgatggagaagctgcatggggacatgttggagatgatcctgtccagtgagaagggccggctgcctgagcgcctcaccaagttcctcatcacccagatcctggtggctttgagacaccttcacttcaagaacattgtccactgtgacttgaaaccagaaaacgtgttgctggcatcagcagacccatttcctcaggtgaagctgtgtgactttggctttgctcgcatcatcggcgagaagtcgttccgccgctcagtggtgggcacgccggcctacctggcacccgaggtgctgctcaaccagggctacaaccgctcgctggacatgtggtcagtgggcgtgatcatgtacgtcagcctcagcggcaccttccctttcaacgaggatgaggacatcaatgaccagatccagaacgccgccttcatgtacccggccagcccctggagccacatctcagctggagccattgacctcatcaacaacctgctgcaggtgaagatgcgcaaacgctacagcgtggacaaatctctcagccacccctggttacaggagtaccagacgtggctggacctccgagagctggaggggaagatgggagagcgatacatcacgcatgagagtgacgacgtgcgctgggagcagtttgcagcagagcatccgctgcctgggtctgggctgcccacggacagggatctcggtggggcctgtccaccacaggaccacgacatgcaggggctggcggagcgcatcagtgttctctgaggtcctgtgccctcgtccagctgctgccctccacagcggttcttcacaggatcccagcaatgaactgttctagggaaagtggcttcctgcccaaactggatgggacacgtggggagtggggtggggggagctatttccaaggcccctccctgtttccccagcaattaaaacggactcatctctggccccatggccttgatctcagc

SEQ ID NO: 35990 - DNA, 2923 bp, Artificial Sequence
  derived and/or modified sequence
gttcattcagcatcccctcccacctccgccaggttccggaaaattcgaggtgtccacgctcccggagccactctccctcccaccccagctcccccttccagccaccaaacccacgccggcgccccctccccgtacaattggggcgctggcatcctgcccggctcgcgctggggttgggagggggcaggcaggaagcgagggcctgcggggtctctgcgtttccgggggaaacagccggccctgccctgggagggtcacagtccgcccgctgctgaaggcggctctgagcttttccgtcgccacatccctctcccgcccctcagttccctgagtgtggcttctacggcctttacgacaagatcctgcttttcaaacatgaccccacgtcggccaacctcctgcagctggtgcgctcgtccggagacatccaggagggcgacctggtggaggtggtgctgtcggcctcggccaccttcgaggacttccagatccgcccgcacgccctcacggtgcactcctatcgggcgcctgccttctgtgatcactgcggggagatgctcttcggcctagtgcgccagggcctcaagtgcgatggctgcgggctgaactaccacaagcgctgtgccttcagcatccccaacaactgtagtggggcccgcaaacggcgcctgtcatccacgtctctggccagtggccactcggtgcgcctcggcacctccgagtccctgccctgcacggctgaagagctgagccgtagcaccaccgaactcctgcctcgccgtcccccgtcatcctcttcctcctcttctgcctcatcgtatacgggccgccccattgagctggacaagatgctgctctccaaggtcaaggtgccgcacaccttcctcatccacagctatacacggcccaccgtttgccaggcttgcaagaaactcctcaagggcctcttccggcagggcctgcaatgcaaagactgcaagtttaactgtcacaaacgctgcgccacccgcgtccctaatgactgcctgggggaggcccttatcaatggagatgtgccgatggaggaggccaccgatttcagcgaggctgacaagagcgccctcatggatgagtcagaggactccggtgtcatccctggctcccactcagagaatgcgctccacgccagtgaggaggaggaaggcgagggaggcaaggcccagagctccctggggtacatccccctaatgagggtggtgcaatcggtgcgacacacgacgcggaaatccagcaccacgctgcgggagggttgggtggttcattacagcaacaaggacacgctgagaaagcggcactattggcgcctggactgcaagtgtatcacgctcttccagaacaacacgaccaacagatactataaggaaattccgctgtcagaaatcctcacggtggagtccgcccagaacttcagccttgtgccgccgggcaccaacccacactgctttgagatcgtcactgccaatgccacctacttcgtgggcgagatgcctggcgggactccgggtgggccaagtgggcagggggctgaggccgcccggggctgggagacagccatccgccaggccctgatgcccgtcatccttcaggacgcacccagcgccccaggccacgcgccccacagacaagcttctctgagcatctctgtgtccaacagtcagatccaagagaatgtggacattgccactgtctaccagatcttccctgacgaagtgctgggctcagggcagtttggagtggtctatggaggaaaacaccggaagacaggccgggacgtggcagttaaggtcattgacaaactgcgcttccctaccaagcaggagagccagctccggaatgaagtggccattctgcagagcctgcggcatcccgggatcgtgaacctggagtgcatgttcgagacgcctgagaaagtgtttgtggtgatggagaagctgcatggggacatgttggagatgatcctgtccagtgagaagggccggctgcctgagcgcctcaccaagttcctcatcacccagatcctggtggctttgagacaccttcacttcaagaacattgtccactgtgacttgaaaccagaaaacgtgttgctggcatcagcagacccatttcctcaggtgaagctgtgtgactttggctttgctcgcatcatcggcgagaagtcgttccgccgctcagtggtgggcacgccggcctacctggcacccgaggtgctgctcaaccagggctacaaccgctcgctggacatgtggtcagtgggcgtgatcatgtacgtcagcctcagcggcaccttccctttcaacgaggatgaggacatcaatgaccagatccagaacgccgccttcatgtacccggccagcccctggagccacatctcagctggagccattgacctcatcaacaacctgctgcaggtgaagatgcgcaaacgctacagcgtggacaaatctctcagccacccctggttacaggagtaccagacgtggctggacctccgagagctggaggggaagatgggagagcgatacatcacgcatgagagtgacgacgtgcgctgggagcagtttgcagcagagcatccgctgcctgggtctgggctgcccacggacagggatctcggtggggcctgtccaccacaggaccacgacatgcaggggctggcggagcgcatcagtgttctctgaggtcctgtgccctcgtccagctgctgccctccacagcggttcttcacaggatcccagcaatgaactgttctagggaaagtggcttcctgcccaaactggatgggacacgtggggagtggggtggggggagctatttccaaggcccctccctgtttccccagcaattaaaacggactcatctctggccccatggccttgatctc

SEQ ID NO: 35991 - DNA, 2637 bp, Artificial Sequence
  derived and/or modified sequence
atggccaccgcccccagctaccccgccggcctgcccggcagccccggccccggcagcccccccccccccggcggcctggagctgcagagccccccccccctgctgccccagatccccgcccccggcagcggcgtgagcttccacatccagatcggcctgaccagagagttcgtgctgctgcccgccgccagcgagctggcccacgtgaagcagctggcctgcagcatcgtggaccagaagttccccgagtgcggcttctacggcctgtacgacaagatcctgctgttcaagcacgaccccaccagcgccaacctgctgcagctggtgagaagcagcggcgacatccaggagggcgacctggtggaggtggtgctgagcgccagcgccaccttcgaggacttccagatcagaccccacgccctgaccgtgcacagctacagagcccccgccttctgcgaccactgcggcgagatgctgttcggcctggtgagacagggcctgaagtgcgacggctgcggcctgaactaccacaagagatgcgccttcagcatccccaacaactgcagcggcgccagaaagagaagactgagcagcaccagcctggccagcggccacagcgtgagactgggcaccagcgagagcctgccctgcaccgccgaggagctgagcagaagcaccaccgagctgctgcccagaagaccccccagcagcagcagcagcagcagcgccagcagctacaccggcagacccatcgagctggacaagatgctgctgagcaaggtgaaggtgccccacaccttcctgatccacagctacaccagacccaccgtgtgccaggcctgcaagaagctgctgaagggcctgttcagacagggcctgcagtgcaaggactgcaagttcaactgccacaagagatgcgccaccagagtgcccaacgactgcctgggcgaggccctgatcaacggcgacgtgcccatggaggaggccaccgacttcagcgaggccgacaagagcgccctgatggacgagagcgaggacagcggcgtgatccccggcagccacagcgagaacgccctgcacgccagcgaggaggaggagggcgagggcggcaaggcccagagcagcctgggctacatccccctgatgagagtggtgcagagcgtgagacacaccaccagaaagagcagcaccaccctgagagagggctgggtggtgcactacagcaacaaggacaccctgagaaagagacactactggagactggactgcaagtgcatcaccctgttccagaacaacaccaccaacagatactacaaggagatccccctgagcgagatcctgaccgtggagagcgcccagaacttcagcctggtgccccccggcaccaacccccactgcttcgagatcgtgaccgccaacgccacctacttcgtgggcgagatgcccggcggcacccccggcggccccagcggccagggcgccgaggccgccagaggctgggagaccgccatcagacaggccctgatgcccgtgatcctgcaggacgcccccagcgcccccggccacgccccccacagacaggccagcctgagcatcagcgtgagcaacagccagatccaggagaacgtggacatcgccaccgtgtaccagatcttccccgacgaggtgctgggcagcggccagttcggcgtggtgtacggcggcaagcacagaaagaccggcagagacgtggccgtgaaggtgatcgacaagctgagattccccaccaagcaggagagccagctgagaaacgaggtggccatcctgcagagcctgagacaccccggcatcgtgaacctggagtgcatgttcgagacccccgagaaggtgttcgtggtgatggagaagctgcacggcgacatgctggagatgatcctgagcagcgagaagggcagactgcccgagagactgaccaagttcctgatcacccagatcctggtggccctgagacacctgcacttcaagaacatcgtgcactgcgacctgaagcccgagaacgtgctgctggccagcgccgaccccttcccccaggtgaagctgtgcgacttcggcttcgccagaatcatcggcgagaagagcttcagaagaagcgtggtgggcacccccgcctacctggcccccgaggtgctgctgaaccagggctacaacagaagcctggacatgtggagcgtgggcgtgatcatgtacgtgagcctgagcggcaccttccccttcaacgaggacgaggacatcaacgaccagatccagaacgccgccttcatgtaccccgccagcccctggagccacatcagcgccggcgccatcgacctgatcaacaacctgctgcaggtgaagatgagaaagagatacagcgtggacaagagcctgagccacccctggctgcaggagtaccagacctggctggacctgagagagctggagggcaagatgggcgagagatacatcacccacgagagcgacgacgtgagatgggagcagttcgccgccgagcaccccctgcccggcagcggcctgcccaccgacagagacctgggcggcgcctgccccccccaggaccacgacatgcagggcctggccgagagaatcagcgtgctgtag

SEQ ID NO: 35992 - protein, 497 aa, Artificial Sequence
  derived and/or modified sequence
MKISILLMFLWGLSCALPVTRYQNNESEDSEEWKGHLAQAPTPPLANEDPSDSTQSEEGLGSDDHQYIYRLAGGFSRSTGKGGDDKDDDEDDSGDDTFGDDDSGPGPKDRQEGGNSRLGSDEDSDDTIQASEESAPQGQDSAQDTTSESRELDNEDRVDSKPEGGDSTQESESEEHWVGGGSDGESSHGDGSELDDEGMQSDDPESIRSERGNSRMNSAGMKSKESGENSEQANTQDSGGSQLLEHPSRKIFRKSRISEEDDRSELDDNNTMEEVKSDSTENSNSRDTGLSQPRRDSKGDSQEDSKENLSQEESQNVDGPSSESSQEANLSSQENSSESQEEVVSESRGDNPDPTTSYVEDQEDSDSSEEDSSHTLSHSKSESREEQADSESSESLNFSEESPESPEDENSSSQEGLQSHSSSAESQSEESHSEEDDSDSQDSSRSKEDSNSTESKSSSEEDGQLKNIEIESRKLTVDAYHNKPIGDQDDNDCQDGY

SEQ ID NO: 35993 - DNA, 1494 bp, Artificial Sequence
  derived and/or modified sequence
atgaagataagcatcctgctaatgttcctgtggggcctgagttgcgcactcccggttacacgatatcagaataacgagtccgaagactccgaggagtggaaaggccacctcgctcaggcccccacaccccctctggccaacgaagacccaagtgatagcacccaaagtgaggaagggcttggatcagatgatcatcagtacatatatagattggccggcgggtttagccgttcaacaggaaaggggggtgatgataaggacgacgatgaagatgatagcggagacgacacctttggggacgatgattcagggccagggcccaaggaccgccaggaaggcggcaactcccgcctcggttcggatgaggattcagacgatactatacaagccagtgaagagtcagcacctcagggccaggactcggcgcaggatacgacgtccgaatcacgcgagctagataacgaagatcgcgtggatagcaaacccgaggggggggattcaacccaggagtcagagtccgaagaacattgggttgggggcggaagcgacggcgaaagctcccacggagacggatcagaactggatgatgaaggtatgcagtcggacgaccctgaatctattcgaagtgagagagggaacagccgcatgaacagtgcagggatgaagagtaaggagtctggagagaactccgagcaggctaacacacaagatagcggaggcagccaactgcttgagcacccttcacgcaagatcttcaggaaatcccgtatctccgaggaggatgatcggagcgaactggatgacaacaataccatggaagaggtcaagtccgacagcactgaaaattcaaactcaagggacaccggactctctcagccccgccgagactcaaaaggtgacagtcaggaggattcaaaggagaatctctcgcaagaggaaagccagaatgtggacggaccatcctccgagtcctcccaggaagccaacttgtctagccaggagaatagctccgagtcccaggaggaggtggtttctgagagcaggggagataatcccgacccaacaaccagttacgtggaggatcaggaggattcagacagttcagaggaggattctagccatacactgagtcactccaagagcgaatccagggaggaacaggccgattcggagtcctcagaaagcctgaacttctccgaagagagtccagagagtcccgaggatgaaaactcaagcagccaagaaggattgcagtcacatagcagctctgccgaatcacagtcggaggaatctcacagcgaggaagacgacagcgacagtcaggattcatctcgctcaaaggaggactctaattctacagagagtaaatccagttcagaggaagatgggcagctgaagaacattgagattgaaagccggaaactcaccgtggacgcttaccacaacaagcctattggtgatcaggatgacaatgactgccaggacggatactag

SEQ ID NO: 35994 - DNA, 1494 bp, Artificial Sequence
  derived and/or modified sequence
atgaagatcagcatcctgctgatgttcctgtggggcctgagctgtgccctgcctgtgacccgctaccagaacaatgaaagtgaggacagcgaggagtggaagggccacctggcccaggcccccaccccacccctggccaatgaagaccccagcgacagcacccagagcgaggagggcctgggcagtgatgaccaccagtacatctaccgcctggccggcggcttcagccgcagcactggaaaaggaggagatgacaaggatgatgatgaagatgattctggagatgacacctttggagatgatgattctggccctggccccaaggaccggcaggagggcggcaacagccggctgggcagtgatgaggacagtgatgacaccatccaggccagcgaggagagcgccccccagggccaggacagcgcccaggacaccaccagcgagagccgggagctggacaatgaagatagagtggacagcaagccagagggcggggacagcacccaggagagcgagagcgaggagcactgggtgggcggcggcagtgatggagagagcagccatggagatggcagcgagctggatgatgagggcatgcagagtgatgatcctgagagcatccgctctgagcggggcaacagcaggatgaacagcgctggcatgaagagcaaggagagcggggagaacagcgagcaggccaacacccaggacagcggcggcagccagctgctggagcaccccagcaggaagatcttcaggaagagccgcatcagcgaggaggatgacagaagtgagctggatgacaacaacaccatggaggaggtgaagagtgacagcacagagaacagcaacagccgggacaccggcctgagccagccccggcgggacagcaagggggacagccaggaggacagcaaagaaaacctgagccaggaggagagccagaatgtggatggccccagcagcgagagcagccaggaggccaacctgagcagccaggagaacagcagcgagagccaggaggaggtggtgtctgagagcagaggagacaacccagaccccaccaccagctatgtggaggaccaggaggacagcgacagcagcgaggaggacagcagccacaccctgagccacagcaagtctgagagccgggaggagcaggccgacagcgagagcagcgagagcctgaacttcagcgaggagagccctgagagcccagaagatgagaacagcagcagccaggagggcctgcagagccacagcagcagcgctgagagccagagcgaggagagccacagtgaagaagatgacagcgacagccaggacagcagccgcagcaaggaggacagcaacagcacagagagcaagagcagcagtgaagaagatggccagctgaagaacatcgagattgagagcaggaagctgactgtggatgcctaccacaacaagcccatcggggaccaggatgacaatgactgccaggacggctactag

SEQ ID NO: 35995 - DNA, 1494 bp, Artificial Sequence
  derived and/or modified sequence
atgaagatcagcatcctgctgatgttcctgtggggcctgagctgcgctctgcccgttacccggtaccaaaataatgagagtgaagacagtgaggagtggaaagggcacctggctcaggcccctaccccgcccctggcaaatgaagacccctcagacagcactcagtccgaggaggggttaggctcagacgatcaccagtatatatacagactggctggtggcttctctcgaagcaccggcaaggggggagacgacaaagacgacgatgaggatgattctggggatgacacgtttggcgatgatgatagtggaccagggcccaaagataggcaggaaggggggaatagccggctcggctccgatgaggactctgatgacacaatacaagcttccgaggagtcagcgccccagggccaggattcagcgcaggatacaacttctgaatcccgcgagctcgataacgaggaccgagttgactctaagccagagggcggggattctacacaggaaagcgagagcgaagagcactgggttggaggcgggagcgatggcgaaagctctcatggagatggctcggaattggatgatgagggaatgcagagtgacgatccggaatcaatcagatcggagcgaggcaactcacggatgaacagcgccggcatgaagtcaaaagaaagcggggagaactccgagcaggccaatactcaggactctggcgggtctcagctgctggaacatccatctcgcaagattttccgaaagtcacgcatcagtgaggaggacgatcgttcggaacttgatgacaataacacaatggaggaagtcaagagcgacagtaccgagaactccaacagccgtgatactggactgtctcaaccaagaagagatagtaagggggattcgcaggaagactcaaaggagaatctttctcaggaggaaagccagaacgttgatggccctagctccgagtcctcgcaggaggcgaacctgagttctcaggaaaacagctccgaatctcaggaggaagtagtcagcgagagccggggtgataatccagaccccacgacaagctatgtcgaggaccaggaggattccgattcgtccgaagaggactctagccacacacttagtcattcaaagtccgaaagtcgcgaagagcaagcggatagcgagagtagtgagtctctaaacttctccgaggaaagccctgagtctcccgaggatgagaacagttcctctcaagagggattgcaaagtcacagttcttctgctgaaagtcaaagtgaggaatcccattccgaggaagacgacagtgactcccaggattcgtcgagaagtaaagaagatagcaactcaacggagtctaagtcctcaagcgaagaggacggacaacttaaaaacatagaaatcgaatctagaaagctaaccgtggatgcctatcataacaaaccgataggtgaccaggacgataatgactgccaggacgggtattag

SEQ ID NO: 35996 - DNA, 1494 bp, Artificial Sequence
  derived and/or modified sequence
atgaagattagtatccttttgatgttcctgtggggtctgtcttgcgcattgccagtaactcgctaccagaataatgagagtgaggatagcgaggaatggaaagggcacctcgcccaagcacctactcctcctctggcaaacgaggaccccagcgacagcacacaatctgaggaaggtttggggagcgatgaccaccagtatatttatagactggctggaggattttcgagatctaccgggaaggggggagacgataaagacgatgacgaggatgactcaggcgacgacaccttcggagatgacgactcaggacctggccctaaggatcgccaggaaggcggtaacagcaggctgggatctgatgaagacagcgatgatacgattcaggcttctgaggagtcagcaccacagggccaagactctgcccaagacaccacttctgaatcccgggagctggataatgaagaccgtgtggatagcaaaccagagggaggggattcaacacaggagtctgagtctgaggagcattgggtaggagggggtagtgacggcgagagtagccatggcgacggatctgaacttgatgacgaggggatgcagagcgacgacccagaatccatacgttctgaacggggaaacagccggatgaattctgcaggcatgaagtccaaggagtcaggagaaaactccgagcaagcaaatacccaggactccggcggatcccaactcctggagcatcccagccgcaaaatcttccggaagtcccggatctctgaggaggatgatcggtcagaacttgacgacaataataccatggaggaagtgaaatcagatagtactgaaaattcaaatagcagggataccggcctctcgcagcctcgacgcgattccaagggggacagtcaggaggactccaaagagaatctttctcaggaagagagccagaatgttgatggccctagttcagagtcaagccaggaagcaaacctgagtagtcaggagaactcctctgaaagccaggaggaagtggtatcggagagtagaggcgacaacccagatcctacgacctcttacgtggaagatcaggaggattctgactctagcgaggaggattcctctcacactttgtcccacagcaagtccgagtccagagaggaacaggcagactcagaatcctcagagagtctgaacttctccgaagaatctccagagagccccgaagacgaaaattcctcctctcaggaagggctccaaagtcacagttcctccgctgaatcccagagcgaagagagccactccgaagaggatgacagcgacagtcaagatagctctcggagtaaggaagattcaaattctaccgaatcaaagtctagttccgaagaggatgggcagctgaagaacatcgagatcgaaagtcgcaagcttaccgtggatgcttaccacaataagcctattggcgaccaggacgacaatgactgtcaagatgggtactag

SEQ ID NO: 35997 - DNA, 1494 bp, Artificial Sequence
  derived and/or modified sequence
atgaagatcagcatcctgctgatgttcctgtggggcctgagctgcgccctgcccgtgaccagataccagaacaacgagagcgaggacagcgaggagtggaagggccacctggcccaggcccccaccccccccctggccaacgaggaccccagcgacagcacccagagcgaggagggcctgggcagcgacgaccaccagtacatctacagactggccggcggcttcagcagaagcaccggcaagggcggcgacgacaaggacgacgacgaggacgacagcggcgacgacaccttcggcgacgacgacagcggccccggccccaaggacagacaggagggcggcaacagcagactgggcagcgacgaggacagcgacgacaccatccaggccagcgaggagagcgccccccagggccaggacagcgcccaggacaccaccagcgagagcagagagctggacaacgaggacagagtggacagcaagcccgagggcggcgacagcacccaggagagcgagagcgaggagcactgggtgggcggcggcagcgacggcgagagcagccacggcgacggcagcgagctggacgacgagggcatgcagagcgacgaccccgagagcatcagaagcgagagaggcaacagcagaatgaacagcgccggcatgaagagcaaggagagcggcgagaacagcgagcaggccaacacccaggacagcggcggcagccagctgctggagcaccccagcagaaagatcttcagaaagagcagaatcagcgaggaggacgacagaagcgagctggacgacaacaacaccatggaggaggtgaagagcgacagcaccgagaacagcaacagcagagacaccggcctgagccagcccagaagagacagcaagggcgacagccaggaggacagcaaggagaacctgagccaggaggagagccagaacgtggacggccccagcagcgagagcagccaggaggccaacctgagcagccaggagaacagcagcgagagccaggaggaggtggtgagcgagagcagaggcgacaaccccgaccccaccaccagctacgtggaggaccaggaggacagcgacagcagcgaggaggacagcagccacaccctgagccacagcaagagcgagagcagagaggagcaggccgacagcgagagcagcgagagcctgaacttcagcgaggagagccccgagagccccgaggacgagaacagcagcagccaggagggcctgcagagccacagcagcagcgccgagagccagagcgaggagagccacagcgaggaggacgacagcgacagccaggacagcagcagaagcaaggaggacagcaacagcaccgagagcaagagcagcagcgaggaggacggccagctgaagaacatcgagatcgagagcagaaagctgaccgtggacgcctaccacaacaagcccatcggcgaccaggacgacaacgactgccaggacggctactag

SEQ ID NO: 35998 - protein, 339 aa, Artificial Sequence
  derived and/or modified sequence
MSYFPILFFFFLKRCPSYTEPQNLTGVSEFLLLGLSEDPELQPVLAGLFLSMYLVTVLGNLLIILAVSSDSHLHTPMYFFLSNLSLADIGFTSTTVPKMIVDMQTHSRVISYEGCLTQMSFFVLFACMDDMLLSVMAYDRFVAICHPLHYRIIMNPRLCGFLILLSFFISLLDSQLHNLIMLQLTCFKDVDISNFFCDPSQLLHLRCSDTFINEMVIYFMGAIFGCLPISGILFSYYKIVSPILRVPTSDGKYKAFSTCGSHLAVVCLFYGTGLVGYLSSAVLPSPRKSMVASVMYTVVTPMLNPFIYSLRNKDIQSALCRLHGRIIKSHHLHPFCYMG

SEQ ID NO: 35999 - DNA, 1020 bp, Artificial Sequence
  derived and/or modified sequence
atgagctacttccccatcctgttcttcttcttcctgaagagatgccccagctacaccgagccccagaacctgaccggcgtgagcgagttcctgctgctgggcctgagcgaggaccccgagctgcagcccgtgctggccggcctgttcctgagcatgtacctggtgaccgtgctgggcaacctgctgatcatcctggccgtgagcagcgacagccacctgcacacccccatgtacttcttcctgagcaacctgagcctggccgacatcggcttcaccagcaccaccgtgcccaagatgatcgtggacatgcagacccacagcagagtgatcagctacgagggctgcctgacccagatgagcttcttcgtgctgttcgcctgcatggacgacatgctgctgagcgtgatggcctacgacagattcgtggccatctgccaccccctgcactacagaatcatcatgaaccccagactgtgcggcttcctgatcctgctgagcttcttcatcagcctgctggacagccagctgcacaacctgatcatgctgcagctgacctgcttcaaggacgtggacatcagcaacttcttctgcgaccccagccagctgctgcacctgagatgcagcgacaccttcatcaacgagatggtgatctacttcatgggcgccatcttcggctgcctgcccatcagcggcatcctgttcagctactacaagatcgtgagccccatcctgagagtgcccaccagcgacggcaagtacaaggccttcagcacctgcggcagccacctggccgtggtgtgcctgttctacggcaccggcctggtgggctacctgagcagcgccgtgctgcccagccccagaaagagcatggtggccagcgtgatgtacaccgtggtgacccccatgctgaaccccttcatctacagcctgagaaacaaggacatccagagcgccctgtgcagactgcacggcagaatcatcaagagccaccacctgcaccccttctgctacatgggctag

SEQ ID NO: 36000 - DNA, 1020 bp, Artificial Sequence
  derived and/or modified sequence
atgtcatactttccaatcctgttcttctttttcctaaaacggtgtcccagctataccgagccacaaaatttgaccggcgtgtctgaatttttactcctagggctctcagaggacccagaactgcagccagtgctcgcaggtctgttcctatcaatgtatctggtcactgtgctggggaaccttctgatcattttggctgtgtcatctgactcacacctccacacccccatgtattttttcttgagcaatctgagtctggccgacattggcttcaccagcaccacagtgcctaagatgattgtcgacatgcagactcatagtagagttattagctacgaggggtgtttaacccaaatgagcttttttgttttgttcgcttgtatggatgacatgctgttgagcgttatggcctacgacaggtttgtagcaatttgtcacccactgcactaccgcatcattatgaatcctagactttgtgggttccttatactcctgtcattttttataagcctgctggactcccaactgcacaacttgattatgctacaacttacctgcttcaaagacgtggatatctcaaatttcttttgtgaccccagccagctgctgcatcttagatgtagcgatacattcattaacgagatggtgatttacttcatgggagcaatattcggatgcctgcccatctccgggattctcttcagctattacaaaatagtctcccctatcctgcgggtgccaacctccgacggaaagtataaggcatttagtacatgcgggtcccatctggccgtggtatgtctattctacgggacaggtttagtcggatatctgtcaagcgctgtcctgccctccccaagaaagtctatggtcgcctcagtcatgtacacagtggttacacctatgttaaacccctttatctatagtctccgtaataaggatatccagagtgctctctgtaggctgcatggccgaataatcaagagtcaccacctgcaccccttctgctatatgggctag

SEQ ID NO: 36001 - DNA, 1020 bp, Artificial Sequence
  derived and/or modified sequence
atgagctacttccccatcctcttcttcttcttcctgaagcgctgccccagctacacagagccccagaacctgactggagtgtctgagttcctgctgctgggcctgtctgaagatcctgagctgcagcctgtgctggccggcctcttcctgtccatgtacctggtgacagtgctgggcaacctgctgatcatcctggccgtgtccagtgacagccacctgcacacccccatgtacttcttcctgagcaacctgagcctggccgacatcggcttcaccagcaccaccgtgcccaagatgattgtggacatgcagacccacagcagggtcatctcctatgagggctgcctgacccagatgtccttctttgtgctgtttgcctgcatggatgacatgctgctgtctgtgatggcctatgacagatttgtggccatctgccaccccctgcactaccgcatcatcatgaacccccggctgtgtggcttcctgatcctgctgtccttcttcatcagcctgctggacagccagctgcacaacctgatcatgctgcagctgacctgcttcaaggatgtggacatcagcaacttcttctgtgaccccagccagctgctgcacctgcgctgcagcgacaccttcatcaatgagatggtgatctacttcatgggcgccatcttcggctgcctgcccatcagcggcatcctcttctcctactacaagatcgtgagccccatcctgcgggtgcccaccagtgatggcaagtacaaggccttcagcacctgtggcagccacctggccgtggtgtgcctcttctacggcaccggcctggtgggctacctgagcagcgctgtgctgcccagccccaggaagtccatggtggcctctgtgatgtacacagtggtgacccccatgctgaaccccttcatctacagcctgaggaacaaggacatccagagcgccctgtgccgcctgcacggccgcatcatcaagagccaccacctgcaccccttctgctacatgggctag

SEQ ID NO: 36002 - DNA, 1020 bp, Artificial Sequence
  derived and/or modified sequence
atgagctacttccccatcctgttcttcttcttcctgaagcggtgcccatcatacacagagcctcagaaccttacaggggtctcagaatttttgctcctaggcctgtccgaggaccccgagttgcagcccgtgctcgccggcctgttcttgtctatgtacctggtcactgtgctaggaaatcttctcatcatcctggctgtgtcatccgactctcacttacatacaccgatgtatttctttttgtccaacttgtccctcgctgacatcggctttacctcgacaactgttcccaagatgatcgttgatatgcagacacacagcagagtgattagctatgaggggtgtctcacacagatgtccttctttgtactgtttgcatgcatggacgacatgctgctgagcgtgatggcgtacgatagattcgtggctatctgccatccccttcactaccgtattattatgaaccctcggctatgcgggtttcttattctgctgagtttttttatctcactgctggattcacagctgcataatttgataatgctacagctcacatgcttcaaggatgttgatataagcaatttcttttgcgacccttcccaattgctacatttgcggtgtagcgatacgttcatcaatgaaatggtgatatattttatgggcgctattttcgggtgtctcccaatatcggggattctgtttagttattacaagatcgtaagccctatactccgggtgcccacttcagacggaaaatataaggccttcagcacatgtggctcacacctcgctgttgtctgtctcttttatggtacgggcttggtcggctacctgagttccgccgttttgccctccccccgtaaatctatggtggcaagtgtgatgtatacagttgtgacccctatgctaaacccgtttatctatagtctccggaataaggacattcagtccgccctttgtcgtctgcacggacggattattaaatctcaccatcttcaccctttctgttatatgggctag

SEQ ID NO: 36003 - DNA, 1215 bp, Artificial Sequence
  derived and/or modified sequence
tgggtttgtcacaactgagaactattgctgagggtgtataatcctatgtgaaaacttaatttcttaattgcttgtatccaaaatatagacacagtgctagatgctggtttacttatgtcctattttccaattctctttttttttttcctcaaaaggtgtccgagctacacagagccacagaatctcacaggtgtctcagaattcctcctcctgggactctcagaggatccagaactgcagccggtcctcgctgggctgttcctgtccatgtacctggtcacggtgctggggaacctgctcatcatcctggctgtcagctctgactcccacctccacacccccatgtacttcttcctctccaacctgtccttggctgacatcggtttcacctccaccacggtccccaagatgattgtggacatgcaaactcacagcagagtcatctcctatgaaggctgcctgactcagatgtctttttttgtcctttttgcatgtatggatgacatgctcctgagtgtgatggcctatgaccggtttgtggccatctgtcaccccctgcactaccgaatcatcatgaacccacgcctctgtggcttcttaatcttgttgtctttttttattagtcttttggactcccagttgcacaatttgattatgttacagctcacctgcttcaaggatgtggacatttctaatttcttctgtgacccttctcaactcctccaccttaggtgttccgacaccttcatcaatgaaatggtcatatatttcatgggtgccatatttggctgtctccctatctcagggatccttttctcttactataaaattgtttcccccattctgagagttccaacatcagatgggaagtataaagccttctccacctgtggctctcacctggcagttgtttgcttattttatggaacagggcttgtagggtacctcagttcagctgtgttaccatcccccaggaagagtatggtggcttcagtgatgtacactgtggtcacccccatgctgaaccccttcatctacagcctgaggaacaaggacattcaaagtgccctgtgcaggctgcatggcagaatcatcaaatctcatcatctccatcctttttgttatatgggatagaaatggcagcaaaatttaacacctaggcctgcaaattctgcctccttggtcacattattttggttgcttgatggctttcat

SEQ ID NO: 36004 - DNA, 1020 bp, Artificial Sequence
  derived and/or modified sequence
atgagctatttccctattttgttttttttttttctgaaacgatgtccatcctacaccgagccgcagaatctcacgggagtctctgaattcctattgttaggactgagcgaggaccctgaactgcagccagtgctcgctggcctttttctctctatgtatctggtcactgtgcttggcaacctgttaatcatacttgccgtctccagtgacagccacctgcatacgcccatgtattttttcctctccaacttaagtctcgccgacataggctttacaagcactaccgtccccaaaatgatcgtggacatgcagacacactcgcgggtcatatcatatgagggctgtcttacccagatgagcttcttcgtgttattcgcttgcatggacgatatgctcctgagcgtgatggcgtacgatcgttttgtggctatctgtcatccacttcattacaggatcatcatgaatccaaggctatgcgggttcctcatcctgttgagtttttttatatccttgctcgatagccagctgcacaatcttataatgctgcaattgacttgtttcaaagacgtggatatttcaaacttcttctgcgacccgtcgcagctgcttcatctccgatgttcggacaccttcatcaatgagatggtgatttactttatgggtgcaatctttggatgccttcccattagcgggatcctcttctcttactacaaaattgttagtcctatcctgagagtgccgaccagtgatggtaagtacaaagcttttagcacatgtgggtcacatctggcggtggtgtgcttgttctatggaacaggattagtgggatacctgtcatccgcagtgctcccttctcccagaaagtctatggtcgcttccgtgatgtatactgttgtgacaccaatgttgaatccgttcatctacagcttaaggaacaaggacattcagtccgctctatgcaggcttcacggccgaattatcaagtctcaccatttgcacccattttgctatatgggttag

SEQ ID NO: 36005 - protein, 617 aa, Artificial Sequence
  derived and/or modified sequence
MSYSVTLTGPGPWGFRLQGGKDFNMPLTISRITPGSKAAQSQLSQGDLVVAIDGVNTDTMTHLEAQNKIKSASYNLSLTLQKSKRPIPISTTAPPVQTPLPVIPHQKVVVNSPANADYQERFNPSALKDSALSTHKPIEVKGLGGKATIIHAQYNTPISMYSQDAIMDAIAGQAQAQGSDFSGSLPIKDLAVDSASPVYQAVIKSQNKPEDEADEWARRSSNLQSRSFRILAQMTGTEFMQDPDEEALRRSRPQASSYSPAVAASSAPATHTSYSEGPAAPAPKPRVVTTASIRPSVYQPVPASTYSPSPGANYSPTPYTPSPAPAYTPSPAPAYTPSPVPTYTPSPAPAYTPSPAPNYNPAPSVAYSGGPAEPASRPPWVTDDSFSQKFAPGKSTTSISKQTLPRGGPAYTPAGPQVPPLARGTVQRAERFPASSRTPLCGHCNNVIRGPFLVAMGRSWHPEEFTCAYCKTSLADVCFVEEQNNVYCERCYEQFFAPLCAKCNTKIMGEVMHALRQTWHTTCFVCAACKKPFGNSLFHMEDGEPYCEKDYINLFSTKCHGCDFPVEAGDKFIEALGHTWHDTCFICAVCHVNLEGQPFYSKKDRPLCKKHAHTINL

SEQ ID NO: 36006 - DNA, 1854 bp, Artificial Sequence
  derived and/or modified sequence
atgtcttattccgtgactctcaccggcccgggcccttgggggttccggctccagggcggaaaggatttcaatatgcccctcaccatctcccggataacgcccggttcaaaggcagcccaatcacagctgtcacaaggtgacctcgtggtcgctatagacggggttaacacagatacaatgacccatcttgaagcgcaaaataagataaagagtgcctcctacaatctctccctcactctccagaagtctaagagacccatacccatcagcaccactgccccgcctgttcagactccacttcccgtaataccccatcagaaggttgtggtgaacagccccgccaacgcagattaccaggagaggtttaacccatccgctctaaaagatagtgccctgagcacgcacaaacctattgaggtgaaagggctggggggcaaagccaccataatccacgcccaatacaacacccccatttcaatgtacagccaggatgccattatggatgctattgccggtcaggcacaggcgcagggcagcgacttctccgggagtctgcccataaaggatttagcagttgactctgctagccccgtgtaccaggccgtgattaagagccagaacaagcccgaggacgaggccgatgagtgggcgcgaaggagttctaatctccagtcacggagtttccgaattctggctcagatgacaggcaccgaattcatgcaggaccccgacgaggaggccttaaggagatcaaggcctcaggcctccagttacagccctgctgtcgcagcatccagtgcacctgcgactcacacatcatatagtgaggggcccgcagctccagcaccaaagccaagagtggtgactactgccagcattcggccttcagtctatcaacccgtgccagcgagcacttattcgcccagcccaggcgccaactattccccaacaccttatacccccagtcctgctcccgcttacacacccagccctgctccagcctatacaccgtctcctgtgcccacgtacacgcccagcccagctccggcttacacgccttctcctgctcctaactacaatccagctcctagtgtagcctacagcggaggacccgcagagcccgcatctcgaccaccctgggtgacagacgacagcttctcccaaaagttcgctccggggaaaagcaccacgagcatatccaaacaaacactacctcgagggggcccagcttacaccccggctgggcctcaggtgccaccgctggcaagaggtacggtgcagcgggccgagcgcttcccagccagtagcagaacccccctgtgtggacactgcaacaatgtaattaggggtccgttcctggttgcaatgggtagatcctggcaccccgaagaattcacgtgtgcctactgcaaaacttctctcgcggatgtgtgcttcgtcgaagagcagaacaacgtgtactgcgagcgatgctatgaacaatttttcgccccactctgtgcaaaatgtaacaccaagatcatgggtgaagttatgcacgctctcaggcagacctggcatactacatgcttcgtgtgcgccgcatgcaaaaagccatttggtaacagcttattccatatggaagacggcgagccctattgtgaaaaggactacatcaaccttttttctacgaagtgccacggttgcgattttccggtagaagcgggagataaatttattgaagccttaggccatacgtggcacgatacgtgctttatctgcgccgtgtgccatgttaacctggaaggtcagcctttttattctaagaaagacagacctctgtgtaagaagcatgcccacaccatcaacctttag

SEQ ID NO: 36007 - DNA, 1413 bp, Artificial Sequence
  derived and/or modified sequence
atgtcctacagcgttaccctgaccggtcccggtccgtggggtttcaggctacaaggaggcaaggactttaatatgccattgactatctcaaggatcacgccaggatcaaaggctgctcagtcacagttgagccaaggtgacctcgtcgttgcaatcgacggagtgaacacagatacgatgacacacctcgaggctcagaacaagattaaatcagctagctataacctttccttgaccctgcagaaatctaaaaggccaatccccatcagtaccaccgcgccccccgtgcaaacacccctccccgtcattccacaccagaaggcttcatcatactcaccagccgttgccgctagttctgctcctgcgacccataccagttactccgaaggccccgcggctccagcccccaagccgcgtgtggtgacaactgccagtatccgtcccagcgtttaccagcccgtccctgcctcaacttacagccccagcccaggagccaactacagccctacaccctatacaccctctccagcccccgcttatactccctcccccgctccagcctatacaccctccccggtcccaacatacacacccagtcctgccccagcgtataccccaagccccgctcccaattacaatcccgctccatccgtagcctacagcggaggtcccgccgaaccagcatcacgcccgccatgggtgactgacgattccttttctcagaagttcgcgcccgggaagagcaccaccagcatatccaaacagaccctgcctcggggggggcccgcatatactccagccggcccccaggtgccgcctcttgctcgggggaccgtgcagcgagctgaaaggttcccagccagttctaggactccactgtgcggtcattgcaacaacgtcatcagggggccctttctcgtagcaatggggaggagctggcatcctgaagagttcacatgtgcatactgcaaaacatcactggcggacgtgtgcttcgtagaagagcagaacaatgtttattgcgaaagatgttacgaacagttctttgcaccactgtgcgccaagtgtaatacaaagattatgggagaggtcatgcatgcgctgcggcagacgtggcatacgacttgtttcgtctgcgccgcttgcaagaagccttttggaaattcgctctttcacatggaagatggagaaccctattgcgagaaggactatattaatctgttcagcaccaaatgccatggctgtgacttccccgtagaagctggtgacaaattcatcgaagcgctggggcacacctggcacgatacctgcttcatctgtgctgtctgtcatgtgaacctggagggacagcctttctatagtaaaaaggacagaccactgtgcaaaaaacatgcgcatacgattaatttgtag

SEQ ID NO: 36008 - DNA, 2184 bp, Artificial Sequence
  derived and/or modified sequence
atgtcctattccgtcactctgacaggacccggaccttggggattccggttgcagggaggaaaagatttcaacatgcccctaactatttcccgcattaccccaggaagcaaagccgctcaatcccaactgtcccagggtgatttagtggtcgccatcgatggtgtgaacactgatactatgacacacctcgaggcccaaaacaagataaagtcagcctcctataatctatcactgactttgcagaagagcaaaagaccaattcccattagtacaactgctcccccagttcagacgcccttacccgttatcccacaccaaaaggatccagccttggacacaaacggcagccttgtcgccccatcaccatctccggaggccagggcttcacctggaacccccggtacccccgagctgagaccgacctttagtccagctttctcaagaccaagcgcgttctccagcctcgccgaggcctcggacccaggccccccacgggccagtctgcgcgcaaagaccagtcctgagggtgcccgtgatttgctagggccaaaagcgctgcccgggtcgtcccagccccgtcagtacaataatcccatcggactctattccgccgaaacgctgcgcgaaatggctcagatgtaccagatgtccttacgaggcaaggcatctggcgttggccttccaggcggcagcctgcctattaaggacctggctgttgatagcgcctcccctgtttaccaagcagtcataaagtctcagaacaaacccgaagatgaagccgacgagtgggctcggcgaagctccaatctgcaaagccgatcatttcggattctggcccaaatgactggaacggagtttatgcaggacccagacgaggaagctttgcggaggagctccacaccaattgaacatgccccagtctgcaccagccaggctacaacccctttgttaccagcaagtgctcagccccccgccgctgcaagtcccagtgctgcaagccctcccttagcaacagctgccgcccacacagcgattgctagcgcctccacgaccgccccggctagcagcccagctgacagccctaggccacaggccagtagttactctcccgcagtggctgcctctagtgcacccgcaacccatacaagttattccgagggcccagccgccccggctccaaagcctagggtggtaaccactgcttctattagaccctcagtctaccagcctgtgcccgcctccacatattcaccctcacccggggccaactatagcccaactccatatactccaagtcccgctcccgcttacaccccttcccctgcccccgcttacacaccatcgcctgttcctacctacactccttctccagcacccgcctacactccatctcccgctcctaattataatcctgctccctctgtggcgtacagcggcggtcccgccgaacctgcatcgcgccccccctgggtgactgatgattcctttagtcagaagtttgcgcccggcaaatccaccacaagtatctccaagcagactttaccacgggggggcccagcgtatactcccgcaggcccacaggtcccccccctggcccgcggaaccgttcaacgcgctgagagattccctgcctccagccggacgcctctgtgtggccattgtaacaacgtgattagaggcccattcctggttgccatgggcaggtcctggcatcccgaggagttcacatgcgcctactgcaaaacaagcctggcggatgtgtgctttgttgaggagcagaataatgtatattgtgagcggtgttacgaacaattcttcgcacccctgtgcgcgaagtgtaacaccaagataatgggggaggttatgcacgccctgcgccagacctggcatactacctgttttgtctgcgctgcatgtaaaaaaccgtttggtaactctctctttcatatggaagacggggagccatactgcgagaaggactatataaatttgttttccacaaagtgccacggctgcgatttccctgtggaagcaggcgacaagtttatcgaagcccttggccatacttggcatgacacatgctttatttgcgcggtctgccatgtgaatctcgagggacagcctttttactcaaaaaaggatcgcccactgtgtaagaagcatgcacacactattaacttatag

SEQ ID NO: 36009 - DNA, 1854 bp, Artificial Sequence
  derived and/or modified sequence
atgagctattcagtgacgctgaccggtcctggaccctggggcttccgcttgcagggtggaaaggacttcaatatgcctttaaccatctctagaatcacaccaggtagcaaggccgcccagagtcagcttagtcagggggacctggtcgtggctatcgacggcgtgaataccgatactatgactcatctggaggctcagaacaagatcaagtcagcttcctacaaccttagtttgactctgcagaaatccaaacggcccatacccatctccaccaccgcaccacctgtgcagacaccgctgcctgttattcctcatcagaaggtggtggttaactccccagctaacgccgattaccaggagcgtttcaacccctctgccctgaaggactctgctctttcgacacataaacccatagaggtcaaaggcctcggagggaaagcaaccatcattcacgcccagtacaatactccaatcagtatgtactcccaggatgccataatggacgctattgctgggcaagcccaggcacaagggtctgactttagcggctccctccctattaaggatcttgcggttgatagtgcctctcctgtctatcaagcagtcattaagtctcagaacaagccagaagacgaggccgacgaatgggcccgacgatcttccaatctgcaatcgagatccttcaggattctggctcagatgactgggacagaattcatgcaggaccctgacgaggaggcattgcggaggtcacggccccaagcgtctagctactccccagcagtggctgccagcagtgcccccgctacacacacatcttactccgagggacccgcggccccagcaccaaaaccaagggtggtcacaactgcgagcattaggccttcagtgtatcagcccgtgcccgcctccacatatagtccctcacctggcgctaactacagccccaccccctacaccccctccccagccccagcatataccccaagtcccgcccctgcctataccccctcgcctgtcccgacctacaccccatctccggctcctgcttacacaccttcgcctgcgcctaactacaacccagctccatctgtggcatactcgggcgggccggcggaaccagccagtagacctccctgggtgaccgacgatagtttctctcagaagtttgcccccggtaaaagcacgacatcaattagtaagcaaactctgccacgaggaggacctgcatatacacccgcaggcccacaggtccccccactcgcccgcggtactgtgcagcgtgcagaacgattccctgcttcttctagaactcccctgtgtggtcactgtaataacgtgattcgggggcctttcctggtggcaatgggccgctcatggcacccggaagaatttacttgcgcctactgcaaaacttccttagctgacgtttgcttcgttgaagagcagaacaacgtgtactgcgaacggtgctatgagcaattcttcgccccactctgcgctaaatgcaataccaagataatgggagaggtcatgcatgccctgaggcaaacgtggcacaccacatgcttcgtgtgcgccgcatgcaaaaaacctttcggcaatagtctatttcacatggaagacggggaaccctactgcgagaaggattatatcaatctgttctccaccaagtgccacggatgtgacttccctgttgaggcaggagataaatttattgaggccttggggcatacatggcatgacacctgcttcatctgtgctgtgtgccatgtgaatctcgagggccagcccttttactccaagaaggataggccgctgtgcaagaaacacgcccacacaatcaatctatag

SEQ ID NO: 36010 - DNA, 1854 bp, Artificial Sequence
  derived and/or modified sequence
atgagctacagcgtgaccctgaccggccctggcccctggggcttccggctgcagggcggcaaggacttcaacatgcccctgaccatcagccgcatcaccccaggcagcaaggccgcccagagccagctgagccagggcgacctggtggtggccattgatggagtgaacacagacaccatgacccacctggaggcccagaacaagatcaagagcgccagctacaacctgagcctgaccctgcagaagagcaagaggcccatccccatcagcaccacagcccctcctgtgcagacccccctgcctgtgatcccccaccagaaggtggtggtgaacagccctgccaatgctgactaccaggagcgcttcaaccccagcgccctgaaggacagcgccctgagcacccacaagcccatcgaggtgaagggcctgggcggcaaggccaccatcatccacgcccagtacaacacccccatctccatgtacagccaggatgccatcatggatgccatcgccggccaggcccaggcccagggcagtgacttcagcggcagcctgcccatcaaggacctggccgtggacagcgccagccctgtgtaccaggccgtcatcaagagccagaacaagccagaagatgaagcagatgagtgggcccggcgcagcagcaacctgcagagccgctccttccgcatcctggcccagatgactggaacagagttcatgcaggaccctgatgaggaggccctgcggcgcagccggccccaggccagcagctacagccctgctgtggccgccagcagcgccccagccacccacaccagctacagcgagggccctgctgccccagcccccaagccccgggtggtgaccacagccagcatccggcccagcgtgtaccagcctgtgcctgccagcacctacagccccagccctggggccaactacagccccaccccctacacccccagccctgccccagcctacacccccagccctgccccagcctacacccccagccctgtgcccacctacacccccagccctgccccagcctacacccccagccctgcccccaactacaacccagcccccagcgtggcctacagcggcggccctgctgagcccgccagccggcccccctgggtgacagatgacagcttcagccagaagtttgcccctgggaagagcaccaccagcatcagcaagcagaccctgccccggggcggccctgcctacaccccagctggcccccaggtgccccccctggcccggggcaccgtgcagagagctgagcgcttccctgccagcagcaggacccccctgtgtggccactgcaacaacgtcatccggggccccttcctggtggccatgggccgctcctggcaccctgaggagttcacctgtgcctactgcaagaccagcctggctgatgtgtgctttgtggaggagcagaacaacgtgtactgtgagcgctgctatgagcagttctttgcccccctgtgtgccaagtgcaacaccaagatcatgggagaggtgatgcacgccctgcggcagacctggcacaccacctgctttgtgtgtgccgcctgcaagaagccctttggaaacagcctcttccacatggaggatggagagccctactgtgagaaggactacatcaacctcttcagcaccaagtgccacggctgtgacttccctgtggaggccggggacaagttcatcgaggccctgggccacacctggcatgacacctgcttcatctgtgctgtgtgccacgtgaacctggagggccagcccttctacagcaagaaggaccggcccctgtgcaagaagcacgcccacaccatcaacctgtag

SEQ ID NO: 36011 - DNA, 1413 bp, Artificial Sequence
  derived and/or modified sequence
atgagctacagcgtgaccctgaccggccctggcccctggggcttccggctgcagggcggcaaggacttcaacatgcccctgaccatcagccgcatcaccccaggcagcaaggccgcccagagccagctgagccagggcgacctggtggtggccattgatggagtgaacacagacaccatgacccacctggaggcccagaacaagatcaagagcgccagctacaacctgagcctgaccctgcagaagagcaagaggcccatccccatcagcaccacagcccctcctgtgcagacccccctgcctgtgatcccccaccagaaggccagcagctacagccctgctgtggccgccagcagcgccccagccacccacaccagctacagcgagggccctgctgccccagcccccaagccccgggtggtgaccacagccagcatccggcccagcgtgtaccagcctgtgcctgccagcacctacagccccagccctggggccaactacagccccaccccctacacccccagccctgccccagcctacacccccagccctgccccagcctacacccccagccctgtgcccacctacacccccagccctgccccagcctacacccccagccctgcccccaactacaacccagcccccagcgtggcctacagcggcggccctgctgagcccgccagcaggcctccctgggtgacagatgacagcttcagccagaagtttgcccctgggaagagcaccaccagcatcagcaagcagaccctgccccggggcggccctgcctacaccccagctggcccccaggtgccccccctggcccggggcaccgtgcagagagctgagcgcttccctgccagcagcaggacccccctgtgtggccactgcaacaacgtcatccggggccccttcctggtggccatgggccgctcctggcaccctgaggagttcacctgtgcctactgcaagaccagcctggctgatgtgtgctttgtggaggagcagaacaacgtgtactgtgagcgctgctatgagcagttctttgcccccctgtgtgccaagtgcaacaccaagatcatgggagaggtgatgcacgccctgcggcagacctggcacaccacctgctttgtgtgtgccgcctgcaagaagcccttcggcaacagcctcttccacatggaggatggagagccctactgtgagaaggactacatcaacctcttcagcaccaagtgccacggctgtgacttccctgtggaggccggggacaagttcatcgaggccctgggccacacctggcatgacacctgcttcatctgtgctgtgtgccacgtgaacctggagggccagcccttctacagcaagaaggaccggcccctgtgcaagaagcacgcccacaccatcaacctgtag

SEQ ID NO: 36012 - DNA, 2184 bp, Artificial Sequence
  derived and/or modified sequence
atgagctacagcgtgaccctgaccggccctggcccctggggcttccggctgcagggcggcaaggacttcaacatgcccctgaccatcagccgcatcaccccaggcagcaaggccgcccagagccagctgagccagggcgacctggtggtggccattgatggagtgaacacagacaccatgacccacctggaggcccagaacaagatcaagagcgccagctacaacctgagcctgaccctgcagaagagcaagaggcccatccccatcagcaccacagcccctcctgtgcagacccccctgcctgtgatcccccaccagaaggaccctgccctggacaccaacggcagcctggtggcccccagccccagccctgaggcccgggccagccctggcaccccaggcaccccagagctgcggcccaccttcagccctgccttcagccggcccagcgccttcagcagcctggccgaggccagtgaccccggccccccccgggccagcctgcgggccaagaccagccctgagggcgcccgggacctgctgggccccaaggccctgcccggcagcagccagccccggcagtacaacaaccccatcggcctgtacagcgctgagaccctgcgggagatggcccagatgtaccagatgagcctgcggggcaaggccagcggcgtgggcctgcccggcggcagcctgcccatcaaggacctggccgtggacagcgccagccctgtgtaccaggccgtcatcaagagccagaacaagccagaagatgaagcagatgagtgggcccggcgcagcagcaacctgcagagccgctccttccgcatcctggcccagatgactggaacagagttcatgcaggaccctgatgaggaggccctgcggcgcagcagcacccccatcgagcacgcccctgtgtgcaccagccaggccaccacccccctgctgcctgccagcgcccagcccccagctgctgccagccccagcgctgccagcccccccctggccacagctgctgcccacacagccatcgccagcgccagcaccacagccccagccagcagccctgctgacagcccccggccccaggccagcagctacagccctgctgtggccgccagcagcgccccagccacccacaccagctacagcgagggccctgctgccccagcccccaagccccgggtggtgaccacagccagcatccggcccagcgtgtaccagcctgtgcctgccagcacctacagccccagccctggggccaactacagccccaccccctacacccccagccctgccccagcctacacccccagccctgccccagcctacacccccagccctgtgcccacctacacccccagccctgccccagcctacacccccagccctgcccccaactacaacccagcccccagcgtggcctacagcggcggccctgctgagcccgccagccggcccccctgggtgacagatgacagcttcagccagaagtttgcccctgggaagagcaccaccagcatcagcaagcagaccctgccccggggcggccctgcctacaccccagctggcccccaggtgccccccctggcccggggcaccgtgcagagagctgagcgcttccctgccagcagcaggacccccctgtgtggccactgcaacaacgtcatccggggccccttcctggtggccatgggccgctcctggcaccctgaggagttcacctgtgcctactgcaagaccagcctggctgatgtgtgctttgtggaggagcagaacaacgtgtactgtgagcgctgctatgagcagttctttgcccccctgtgtgccaagtgcaacaccaagatcatgggagaggtgatgcacgccctgcggcagacctggcacaccacctgctttgtgtgtgccgcctgcaagaagccctttggaaacagcctcttccacatggaggatggagagccctactgtgagaaggactacatcaacctcttcagcaccaagtgccacggctgtgacttccctgtggaggccggggacaagttcatcgaggccctgggccacacctggcatgacacctgcttcatctgtgctgtgtgccacgtgaacctggagggccagcccttctacagcaagaaggaccggcccctgtgcaagaagcacgcccacaccatcaacctgtag

SEQ ID NO: 36013 - DNA, 4966 bp, Artificial Sequence
  derived and/or modified sequence
aggcggccgctgacagcaccagcatgtcttacagtgtgaccctgactgggcccgggccctggggcttccgtctgcaggggggcaaggacttcaacatgcccctcactatctcccggatcacaccaggcagcaaggcagcccagtcccagctcagccagggtgacctcgtggtggccattgacggcgtcaacacagacaccatgacccacctggaagcccagaacaagatcaagtctgccagctacaacttgagcctcaccctgcagaaatcaaagcgtcccattcccatctccacgacagcacctccagtccagacccctctgccggtgatccctcaccagaaggtggtagtcaactctccagccaacgccgactaccaggaacgcttcaaccccagtgccctgaaggactcggccctgtccacccacaagcccatcgaggtgaaggggctgggcggcaaggccaccatcatccatgcgcagtacaacacgcccatcagcatgtattcccaggatgccatcatggatgccatcgctgggcaggcccaagcccaaggcagtgacttcagtgggagcctccctattaaggaccttgccgtagacagcgcctctcccgtctaccaggctgtgattaagagccagaacaagccagaagatgaggctgacgagtgggcacgccgttcctccaacctgcagtctcgctccttccgcatcctggcccagatgacggggacagaattcatgcaagaccctgatgaagaagctctgcgaaggtcaaggccccaggcctcttcctacagccccgcagtggccgcctcttcagcacctgccacccacaccagctacagtgagggccccgccgcccctgcacccaagccccgggttgtcaccactgccagcatccggccttctgtctaccagccagtgcctgcatctacctacagcccgtccccaggggccaattacagtcccactccctacaccccctcccctgcccctgcctacaccccctcccctgcccctgcctacaccccctcacctgtccccacctacactccatccccagcaccagcctataccccctcacctgcccccaactataaccctgcaccctcggtggcctacagcgggggccctgcggagcctgccagccgtccaccctgggtgacagatgatagcttctcccagaagtttgccccgggcaagagcaccacctccatcagcaagcagaccctgccccggggaggcccagcctacaccccagcgggtcctcaggtgccaccacttgccagggggaccgtccagagggctgagcgattcccagccagcagccggactccactctgcggtcactgcaacaatgtcatccggggcccatttctggtagccatgggccgttcttggcaccctgaagagttcacctgtgcctactgcaagacttccctggcagatgtgtgctttgtggaagagcagaacaacgtttactgtgagcgatgttatgagcaattctttgccccgctgtgtgccaagtgcaacaccaaaattatgggggaagtaatgcatgccttgagacagacatggcacaccacctgcttcgtctgtgcggcctgcaagaagccttttgggaacagcctcttccacatggaagacggggagccctactgcgagaaagactacatcaatctgttcagcaccaagtgccatggctgcgatttccccgtggaggctggcgacaagtttatcgaagccctgggccacacttggcacgacacctgcttcatttgcgcagtctgccatgtgaatctggaggggcagccgttctactccaagaaggacagacccctgtgcaagaagcacgcacacaccatcaacttgtaggcggccaaggccgcctgtgctgacgaggcccggagctgctcctgctgctggcaacaaaggattcgggaggctgatgtttcttctgaggggaatggggagagagaggaagcgactgagccctttggaagtataattttaggttttttcttctgtacacagatcgtgcatttgcatagttcagactaggagccaaatgaagactcaaaaccaagctagttattaatccaagactggaattgtacttcagacatttagagcagaattccaagaactcaaaagtgaaaagcaacaagcagctttcccaaagcgatacacttgctttggtcaccagaggaggacagagcttagagcagctgtggagaatctgaagcattctgcggagttcttaagcgctcccctggcaaacaaattgaagtgccaaacagcactcgctgcagggtatttttagagtcatagctgagagcttgttagctaagacccattgggctttcctcaccaaaaaaggaagtgttattccattactagcgtcatggagctacctctgcgcatcagacttcagaccttgaacaaacttaaaaccttcttgggagcccggacgtccaaagagatgtcttctgggagccactgggcaattgccagggctccaggaagggctctggctcaggttgcagacagctgagaaaagatggccctgtcagccaccctctctcagtctgaaacatccaacatccccagaaggcttagctcctttttgaattgtgatgggaaagtagagttgggtttttccagttttgctctgtggtgtgtgagagatttttttaaaggctttgggttgtctttggcctttgtttagctttaagggttcgttagcatgagtgtccagtcgtgtgcatgaatttcaccccaacttgtgactgctcacttatgacgtctcccccagtaccctccatctcaaataggcttggtggcctgtggaaaagaagagagacagagagacagtgtctgaaacaggatggcagaataggctcacatgcccaaactctgggtggggaagaggaaacttactttctgccaccctcagtaagaacacacgaggaggcaggacctcccaccttcaggtctgcatcatccttttcaaatgttcctttaaatgcagcacactgagtttgtacaattgtgttaactgctggaagggacagatgcactgatatatatgcatttgctgttttggccaatattttgaaaatgtatgagctgagttgatctagctattatttaagtatttattgaagtagaggggccttcaaactactttatactagtgatagtttgagttaggtaagcatcttaaagctgtttggtgataaagaaggcagcttagattctgtggttggaaacagtgtagtcgcttccctttttaggaagccctgttaatatgctcattgaaaacatggcattgaagcaggcacttgcgtggatgtttctcacttgagcacgatatttaggctctcttccaactcactctattctgtcctcactcctgttttggatttttctctttgcatgtttgaaatgttttatgggaatgtattagaactcttttcttctaaggactgagacttccaggggattgccatcttacctgtctcttctccatgagggagaaggaagcagctagctatgtccctagctgcaggaagcccctattttttccaagcacgaagccaccagtctcccccagggagcatcaggaagggacatggatgtgctcctgccacagggcccttcctacctttggatctgtgagaaggtgaatacaaagcagcaggcagagtaaaatctgctgggactgcctggagatttgtcaggagctgcagacaagtaccttggagcattctgttatttttggaaagttcaaatatgcagggacaaggaggttgctgactgtactgacaggctctaagtcattttctccaaaaactatctattcaattatcaggggctggtcttgaggaaggaaaaaaaaaaaaaaacgttcccagaattcagtttccaaaatctctttttaaagggtttacacacacacacacacacacacacacacacacacacacacacacacacgatcattaaaaagtgtatgctctttaagaagaaaagtaaaatatctcaaaggacggtttcaccaccgtcctttattgaatcaatttttctacatttcagagcaagtgtagattctgagggactcctatttgccaaaaagacaaaactagcaaaaaaaaaacaaaaaaacaaaaaaaaaaccacttaaaaggtagcaggaaaagaaggtagttttgagtgtggttcactcagtgtctgtgagtctggtgtagtgtcaggagtaaggccgtgtctagctcaagtttacatttggatgtcctacaacactaaacaaaatttttcataatccatggtggggagcacactttggagctacatttcttgtctcctcattgttgacattaattaaacatttataggccaggcacagtggctcacgcctgttatcccagcactttgggaggccgaggcaggtgaatcacctgaggtcaggagtttgaaaccagcctggccaatatggtgaaaccccatctctactaaaaatacacaaaattagccaggtgtggtggcaggcgcctgtagttccagctacttgggaggctgaggcaggaatctcctgaatcctggaggcggaggttgcagtgagccgagattatgccattgcactccagcctgggcaacaggagcgaaactccgttgcaaaaaaaaaaaaaaaaaaaaaattataatcacaactttttgcaatggagtgacttatatctgcagcttatatctgcagtgtttgtgttaggaacctagcttttataatgtgttaactttttaactcagtattctggctttgggattttttgttttgtttttggaaacatttcagaagtggaatgtagcctgttaaaggtgtgcacaaaaatattttgcatgtgtttttttttttgcctgtgtgaattctactttttagcaaaaataaagccccccaaaggatgtgc

SEQ ID NO: 36014 - DNA, 4650 bp, Artificial Sequence
  derived and/or modified sequence
acagtccatttatgggcgcagccgaaggcagatatcagtgtcgatggcattcgctcccagctattcttaggagcctctcaagagctccacgcagcccggctgggcagcaagggacagaacagaggcggccgctgacagcaccagcatgtcttacagtgtgaccctgactgggcccgggccctggggcttccgtctgcaggggggcaaggacttcaacatgcccctcactatctcccggatcacaccaggcagcaaggcagcccagtcccagctcagccagggtgacctcgtggtggccattgacggcgtcaacacagacaccatgacccacctggaagcccagaacaagatcaagtctgccagctacaacttgagcctcaccctgcagaaatcaaagcgtcccattcccatctccacgacagcacctccagtccagacccctctgccggtgatccctcaccagaaggcctcttcctacagccccgcagtggccgcctcttcagcacctgccacccacaccagctacagtgagggccccgccgcccctgcacccaagccccgggttgtcaccactgccagcatccggccttctgtctaccagccagtgcctgcatctacctacagcccgtccccaggggccaattacagtcccactccctacaccccctcccctgcccctgcctacaccccctcccctgcccctgcctacaccccctcacctgtccccacctacactccatccccagcaccagcctataccccctcacctgcccccaactataaccctgcaccctcggtggcctacagcgggggccctgcggagcctgccagccgtccaccctgggtgacagatgatagcttctcccagaagtttgccccgggcaagagcaccacctccatcagcaagcagaccctgccccggggaggcccagcctacaccccagcgggtcctcaggtgccaccacttgccagggggaccgtccagagggctgagcgattcccagccagcagccggactccactctgcggtcactgcaacaatgtcatccggggcccatttctggtagccatgggccgttcttggcaccctgaagagttcacctgtgcctactgcaagacttccctggcagatgtgtgctttgtggaagagcagaacaacgtttactgtgagcgatgttatgagcaattctttgccccgctgtgtgccaagtgcaacaccaaaattatgggggaagtaatgcatgccttgagacagacatggcacaccacctgcttcgtctgtgcggcctgcaagaagccttttgggaacagcctcttccacatggaagacggggagccctactgcgagaaagactacatcaatctgttcagcaccaagtgccatggctgcgatttccccgtggaggctggcgacaagtttatcgaagccctgggccacacttggcacgacacctgcttcatttgcgcagtctgccatgtgaatctggaggggcagccgttctactccaagaaggacagacccctgtgcaagaagcacgcacacaccatcaacttgtaggcggccaaggccgcctgtgctgacgaggcccggagctgctcctgctgctggcaacaaaggattcgggaggctgatgtttcttctgaggggaatggggagagagaggaagcgactgagccctttggaagtataattttaggttttttcttctgtacacagatcgtgcatttgcatagttcagactaggagccaaatgaagactcaaaaccaagctagttattaatccaagactggaattgtacttcagacatttagagcagaattccaagaactcaaaagtgaaaagcaacaagcagctttcccaaagcgatacacttgctttggtcaccagaggaggacagagcttagagcagctgtggagaatctgaagcattctgcggagttcttaagcgctcccctggcaaacaaattgaagtgccaaacagcactcgctgcagggtatttttagagtcatagctgagagcttgttagctaagacccattgggctttcctcaccaaaaaaggaagtgttattccattactagcgtcatggagctacctctgcgcatcagacttcagaccttgaacaaacttaaaaccttcttgggagcccggacgtccaaagagatgtcttctgggagccactgggcaattgccagggctccaggaagggctctggctcaggttgcagacagctgagaaaagatggccctgtcagccaccctctctcagtctgaaacatccaacatccccagaaggcttagctcctttttgaattgtgatgggaaagtagagttgggtttttccagttttgctctgtggtgtgtgagagatttttttaaaggctttgggttgtctttggcctttgtttagctttaagggttcgttagcatgagtgtccagtcgtgtgcatgaatttcaccccaacttgtgactgctcacttatgacgtctcccccagtaccctccatctcaaataggcttggtggcctgtggaaaagaagagagacagagagacagtgtctgaaacaggatggcagaataggctcacatgcccaaactctgggtggggaagaggaaacttactttctgccaccctcagtaagaacacacgaggaggcaggacctcccaccttcaggtctgcatcatccttttcaaatgttcctttaaatgcagcacactgagtttgtacaattgtgttaactgctggaagggacagatgcactgatatatatgcatttgctgttttggccaatattttgaaaatgtatgagctgagttgatctagctattatttaagtatttattgaagtagaggggccttcaaactactttatactagtgatagtttgagttaggtaagcatcttaaagctgtttggtgataaagaaggcagcttagattctgtggttggaaacagtgtagtcgcttccctttttaggaagccctgttaatatgctcattgaaaacatggcattgaagcaggcacttgcgtggatgtttctcacttgagcacgatatttaggctctcttccaactcactctattctgtcctcactcctgttttggatttttctctttgcatgtttgaaatgttttatgggaatgtattagaactcttttcttctaaggactgagacttccaggggattgccatcttacctgtctcttctccatgagggagaaggaagcagctagctatgtccctagctgcaggaagcccctattttttccaagcacgaagccaccagtctcccccagggagcatcaggaagggacatggatgtgctcctgccacagggcccttcctacctttggatctgtgagaaggtgaatacaaagcagcaggcagagtaaaatctgctgggactgcctggagatttgtcaggagctgcagacaagtaccttggagcattctgttatttttggaaagttcaaatatgcagggacaaggaggttgctgactgtactgacaggctctaagtcattttctccaaaaactatctattcaattatcaggggctggtcttgaggaaggaaaaaaaaaaaaaaacgttcccagaattcagtttccaaaatctctttttaaagggtttacacacacacacacacacacacacacacacacacacacacacacacacgatcattaaaaagtgtatgctctttaagaagaaaagtaaaatatctcaaaggacggtttcaccaccgtcctttattgaatcaatttttctacatttcagagcaagtgtagattctgagggactcctatttgccaaaaagacaaaactagcaaaaaaaaaacaaaaaaacaaaaaaaaaaccacttaaaaggtagcaggaaaagaaggtagttttgagtgtggttcactcagtgtctgtgagtctggtgtagtgtcaggagtaaggccgtgtctagctcaagtttacatttggatgtcctacaacactaaacaaaatttttcataatccatggtggggagcacactttggagctacatttcttgtctcctcattgttgacattaattaaacatttataggccaggcacagtggctcacgcctgttatcccagcactttgggaggccgaggcaggtgaatcacctgaggtcaggagtttgaaaccagcctggccaatatggtgaaaccccatctctactaaaaatacacaaaattagccaggtgtggtggcaggcgcctgtagttccagctacttgggaggctgaggcaggaatctcctgaatcctggaggcggaggttgcagtgagccgagattatgccattgcactccagcctgggcaacaggagcgaaactccgttgcaaaaaaaaaaaaaaaaaaaaaattataatcacaactttttgcaatggagtgacttatatctgcagcttatatctgcagtgtttgtgttaggaacctagcttttataatgtgttaactttttaactcagtattctggctttgggattttttgttttgtttttggaaacatttcagaagtggaatgtagcctgttaaaggtgtgcacaaaaatattttgcatgtgtttttttttttgcctgtgtgaattctactttttagcaaaaataaagccccccaaaggatgtgcaaa

SEQ ID NO: 36015 - DNA, 4223 bp, Artificial Sequence
  derived and/or modified sequence
gcggccgctgacagcaccagcatgtcttacagtgtgaccctgactgggcccgggccctggggcttccgtctgcaggggggcaaggacttcaacatgcccctcactatctcccggatcacaccaggcagcaaggcagcccagtcccagctcagccagggtgacctcgtggtggccattgacggcgtcaacacagacaccatgacccacctggaagcccagaacaagatcaagtctgccagctacaacttgagcctcaccctgcagaaatcaaagcgtcccattcccatctccacgacagcacctccagtccagacccctctgccggtgatccctcaccagaaggaccccgctctggacacgaacggcagcctggtggcacccagccccagccctgaggcgagggccagcccaggcaccccaggcaccccggagctcaggcccacctttagccctgccttctcccggccctccgccttctcctcactcgccgaggcctctgaccctggccctccgcgggccagcctgagggccaagaccagcccagagggggcccgggacctactcggcccaaaagccctgccgggctcgagccagccgaggcaatataacaaccccattggcctgtactcggcagagaccctgagggagatggctcagatgtaccagatgagcctccgagggaaggcctcgggtgtcggactcccaggagggagcctccctattaaggaccttgccgtagacagcgcctctcccgtctaccaggctgtgattaagagccagaacaagccagaagatgaggctgacgagtgggcacgccgttcctccaacctgcagtctcgctccttccgcatcctggcccagatgacggggacagaattcatgcaagaccctgatgaagaagctctgcgaaggtcaagcacccctattgagcatgcgccggtgtgcaccagccaggccaccaccccgctgctgcccgcttctgcccagccacctgctgctgcctctcccagtgcggcttcgccacccctggccacagctgctgcccacactgccatcgcctccgcctccaccacagcccctgcttcaagtcctgccgacagcccaaggccccaggcctcttcctacagccccgcagtggccgcctcttcagcacctgccacccacaccagctacagtgagggccccgccgcccctgcacccaagccccgggttgtcaccactgccagcatccggccttctgtctaccagccagtgcctgcatctacctacagcccgtccccaggggccaattacagtcccactccctacaccccctcccctgcccctgcctacaccccctcccctgcccctgcctacaccccctcacctgtccccacctacactccatccccagcaccagcctataccccctcacctgcccccaactataaccctgcaccctcggtggcctacagcgggggccctgcggagcctgccagccgtccaccctgggtgacagatgatagcttctcccagaagtttgccccgggcaagagcaccacctccatcagcaagcagaccctgccccggggaggcccagcctacaccccagcgggtcctcaggtgccaccacttgccagggggaccgtccagagggctgagcgattcccagccagcagccggactccactctgcggtcactgcaacaatgtcatccggggcccatttctggtagccatgggccgttcttggcaccctgaagagttcacctgtgcctactgcaagacttccctggcagatgtgtgctttgtggaagagcagaacaacgtttactgtgagcgatgttatgagcaattctttgccccgctgtgtgccaagtgcaacaccaaaattatgggggaagtaatgcatgccttgagacagacatggcacaccacctgcttcgtctgtgcggcctgcaagaagccttttgggaacagcctcttccacatggaagacggggagccctactgcgagaaagactacatcaatctgttcagcaccaagtgccatggctgcgatttccccgtggaggctggcgacaagtttatcgaagccctgggccacacttggcacgacacctgcttcatttgcgcagtctgccatgtgaatctggaggggcagccgttctactccaagaaggacagacccctgtgcaagaagcacgcacacaccatcaacttgtaggcggccaaggccgcctgtgctgacgaggcccggagctgctcctgctgctggcaacaaaggattcgggaggctgatgtttcttctgaggggaatggggagagagaggaagcgactgagccctttggaagtataattttaggttttttcttctgtacacagatcgtgcatttgcatagttcagactaggagccaaatgaagactcaaaaccaagctagttattaatccaagactggaattgtacttcagacatttagagcagaattccaagaactcaaaagtgaaaagcaacaagcagctttcccaaagcgatacacttgctttggtcaccagaggaggacagagcttagagcagctgtggagaatctgaagcattctgcggagttcttaagcgctcccctggcaaacaaattgaagtgccaaacagcactcgctgcagggtatttttagagtcatagctgagagcttgttagctaagacccattgggctttcctcaccaaaaaaggaagtgttattccattactagcgtcatggagctacctctgcgcatcagacttcagaccttgaacaaacttaaaaccttcttgggagcccggacgtccaaagagatgtcttctgggagccactgggcaattgccagggctccaggaagggctctggctcaggttgcagacagctgagaaaagatggccctgtcagccaccctctctcagtctgaaacatccaacatccccagaaggcttagctcctttttgaattgtgatgggaaagtagagttgggtttttccagttttgctctgtggtgtgtgagagatttttttaaaggctttgggttgtctttggcctttgtttagctttaagggttcgttagcatgagtgtccagtcgtgtgcatgaatttcaccccaacttgtgactgctcacttatgacgtctcccccagtaccctccatctcaaataggcttggtggcctgtggaaaagaagagagacagagagacagtgtctgaaacaggatggcagaataggctcacatgcccaaactctgggtggggaagaggaaacttactttctgccaccctcagtaagaacacacgaggaggcaggacctcccaccttcaggtctgcatcatccttttcaaatgttcctttaaatgcagcacactgagtttgtacaattgtgttaactgctggaagggacagatgcactgatatatatgcatttgctgttttggccaatattttgaaaatgtatgagctgagttgatctagctattatttaagtatttattgaagtagaggggccttcaaactactttatactagtgatagtttgagttaggtaagcatcttaaagctgtttggtgataaagaaggcagcttagattctgtggttggaaacagtgtagtcgcttccctttttaggaagccctgttaatatgctcattgaaaacatggcattgaagcaggcacttgcgtggatgtttctcacttgagcacgatatttaggctctcttccaactcactctattctgtcctcactcctgttttggatttttctctttgcatgtttgaaatgttttatgggaatgtattagaactcttttcttctaaggactgagacttccaggggattgccatcttacctgtctcttctccatgagggagaaggaagcagctagctatgtccctagctgcaggaagcccctattttttccaagcacgaagccaccagtctcccccagggagcatcaggaagggacatggatgtgctcctgccacagggcccttcctacctttggatctgtgagaaggtgaatacaaagcagcaggcagagtaaaatctgctgggactgcctggagatttgtcaggagctgcagacaagtaccttggagcattctgttatttttggaaagttcaaatatgcagggacaaggaggttgctgactgtactgacaggctctaagtcattttctccaaaaactatctattcaattatcaggggctggtcttgaggaagg

SEQ ID NO: 36016 - DNA, 5091 bp, Artificial Sequence
  derived and/or modified sequence
acagtccatttatgggcgcagccgaaggcagatatcagtgtcgatggcattcgctcccagctattcttaggagcctctcaagagctccacgcagcccggctgggcagcaagggacagaacagaggcggccgctgacagcaccagcatgtcttacagtgtgaccctgactgggcccgggccctggggcttccgtctgcaggggggcaaggacttcaacatgcccctcactatctcccggatcacaccaggcagcaaggcagcccagtcccagctcagccagggtgacctcgtggtggccattgacggcgtcaacacagacaccatgacccacctggaagcccagaacaagatcaagtctgccagctacaacttgagcctcaccctgcagaaatcaaagcgtcccattcccatctccacgacagcacctccagtccagacccctctgccggtgatccctcaccagaaggtggtagtcaactctccagccaacgccgactaccaggaacgcttcaaccccagtgccctgaaggactcggccctgtccacccacaagcccatcgaggtgaaggggctgggcggcaaggccaccatcatccatgcgcagtacaacacgcccatcagcatgtattcccaggatgccatcatggatgccatcgctgggcaggcccaagcccaaggcagtgacttcagtgggagcctccctattaaggaccttgccgtagacagcgcctctcccgtctaccaggctgtgattaagagccagaacaagccagaagatgaggctgacgagtgggcacgccgttcctccaacctgcagtctcgctccttccgcatcctggcccagatgacggggacagaattcatgcaagaccctgatgaagaagctctgcgaaggtcaaggccccaggcctcttcctacagccccgcagtggccgcctcttcagcacctgccacccacaccagctacagtgagggccccgccgcccctgcacccaagccccgggttgtcaccactgccagcatccggccttctgtctaccagccagtgcctgcatctacctacagcccgtccccaggggccaattacagtcccactccctacaccccctcccctgcccctgcctacaccccctcccctgcccctgcctacaccccctcacctgtccccacctacactccatccccagcaccagcctataccccctcacctgcccccaactataaccctgcaccctcggtggcctacagcgggggccctgcggagcctgccagccgtccaccctgggtgacagatgatagcttctcccagaagtttgccccgggcaagagcaccacctccatcagcaagcagaccctgccccggggaggcccagcctacaccccagcgggtcctcaggtgccaccacttgccagggggaccgtccagagggctgagcgattcccagccagcagccggactccactctgcggtcactgcaacaatgtcatccggggcccatttctggtagccatgggccgttcttggcaccctgaagagttcacctgtgcctactgcaagacttccctggcagatgtgtgctttgtggaagagcagaacaacgtttactgtgagcgatgttatgagcaattctttgccccgctgtgtgccaagtgcaacaccaaaattatgggggaagtaatgcatgccttgagacagacatggcacaccacctgcttcgtctgtgcggcctgcaagaagccttttgggaacagcctcttccacatggaagacggggagccctactgcgagaaagactacatcaatctgttcagcaccaagtgccatggctgcgatttccccgtggaggctggcgacaagtttatcgaagccctgggccacacttggcacgacacctgcttcatttgcgcagtctgccatgtgaatctggaggggcagccgttctactccaagaaggacagacccctgtgcaagaagcacgcacacaccatcaacttgtaggcggccaaggccgcctgtgctgacgaggcccggagctgctcctgctgctggcaacaaaggattcgggaggctgatgtttcttctgaggggaatggggagagagaggaagcgactgagccctttggaagtataattttaggttttttcttctgtacacagatcgtgcatttgcatagttcagactaggagccaaatgaagactcaaaaccaagctagttattaatccaagactggaattgtacttcagacatttagagcagaattccaagaactcaaaagtgaaaagcaacaagcagctttcccaaagcgatacacttgctttggtcaccagaggaggacagagcttagagcagctgtggagaatctgaagcattctgcggagttcttaagcgctcccctggcaaacaaattgaagtgccaaacagcactcgctgcagggtatttttagagtcatagctgagagcttgttagctaagacccattgggctttcctcaccaaaaaaggaagtgttattccattactagcgtcatggagctacctctgcgcatcagacttcagaccttgaacaaacttaaaaccttcttgggagcccggacgtccaaagagatgtcttctgggagccactgggcaattgccagggctccaggaagggctctggctcaggttgcagacagctgagaaaagatggccctgtcagccaccctctctcagtctgaaacatccaacatccccagaaggcttagctcctttttgaattgtgatgggaaagtagagttgggtttttccagttttgctctgtggtgtgtgagagatttttttaaaggctttgggttgtctttggcctttgtttagctttaagggttcgttagcatgagtgtccagtcgtgtgcatgaatttcaccccaacttgtgactgctcacttatgacgtctcccccagtaccctccatctcaaataggcttggtggcctgtggaaaagaagagagacagagagacagtgtctgaaacaggatggcagaataggctcacatgcccaaactctgggtggggaagaggaaacttactttctgccaccctcagtaagaacacacgaggaggcaggacctcccaccttcaggtctgcatcatccttttcaaatgttcctttaaatgcagcacactgagtttgtacaattgtgttaactgctggaagggacagatgcactgatatatatgcatttgctgttttggccaatattttgaaaatgtatgagctgagttgatctagctattatttaagtatttattgaagtagaggggccttcaaactactttatactagtgatagtttgagttaggtaagcatcttaaagctgtttggtgataaagaaggcagcttagattctgtggttggaaacagtgtagtcgcttccctttttaggaagccctgttaatatgctcattgaaaacatggcattgaagcaggcacttgcgtggatgtttctcacttgagcacgatatttaggctctcttccaactcactctattctgtcctcactcctgttttggatttttctctttgcatgtttgaaatgttttatgggaatgtattagaactcttttcttctaaggactgagacttccaggggattgccatcttacctgtctcttctccatgagggagaaggaagcagctagctatgtccctagctgcaggaagcccctattttttccaagcacgaagccaccagtctcccccagggagcatcaggaagggacatggatgtgctcctgccacagggcccttcctacctttggatctgtgagaaggtgaatacaaagcagcaggcagagtaaaatctgctgggactgcctggagatttgtcaggagctgcagacaagtaccttggagcattctgttatttttggaaagttcaaatatgcagggacaaggaggttgctgactgtactgacaggctctaagtcattttctccaaaaactatctattcaattatcaggggctggtcttgaggaaggaaaaaaaaaaaaaaacgttcccagaattcagtttccaaaatctctttttaaagggtttacacacacacacacacacacacacacacacacacacacacacacacacgatcattaaaaagtgtatgctctttaagaagaaaagtaaaatatctcaaaggacggtttcaccaccgtcctttattgaatcaatttttctacatttcagagcaagtgtagattctgagggactcctatttgccaaaaagacaaaactagcaaaaaaaaaacaaaaaaacaaaaaaaaaaccacttaaaaggtagcaggaaaagaaggtagttttgagtgtggttcactcagtgtctgtgagtctggtgtagtgtcaggagtaaggccgtgtctagctcaagtttacatttggatgtcctacaacactaaacaaaatttttcataatccatggtggggagcacactttggagctacatttcttgtctcctcattgttgacattaattaaacatttataggccaggcacagtggctcacgcctgttatcccagcactttgggaggccgaggcaggtgaatcacctgaggtcaggagtttgaaaccagcctggccaatatggtgaaaccccatctctactaaaaatacacaaaattagccaggtgtggtggcaggcgcctgtagttccagctacttgggaggctgaggcaggaatctcctgaatcctggaggcggaggttgcagtgagccgagattatgccattgcactccagcctgggcaacaggagcgaaactccgttgcaaaaaaaaaaaaaaaaaaaaaattataatcacaactttttgcaatggagtgacttatatctgcagcttatatctgcagtgtttgtgttaggaacctagcttttataatgtgttaactttttaactcagtattctggctttgggattttttgttttgtttttggaaacatttcagaagtggaatgtagcctgttaaaggtgtgcacaaaaatattttgcatgtgtttttttttttgcctgtgtgaattctactttttagcaaaaataaagccccccaaaggatgtgcaaa

SEQ ID NO: 36017 - DNA, 1854 bp, Artificial Sequence
  derived and/or modified sequence
atgagctacagcgtgaccctgaccggccccggcccctggggcttccgcctccaaggcggaaaggacttcaatatgcctcttaccatttccagaatcacccctggatctaaggccgcacagagccagctgtcccagggagatctggtggtggctattgacggggtgaataccgataccatgacccacctagaggcccagaacaagattaaaagcgccagttataacttgtccttaactctgcaaaagagcaagagaccaatcccaatttccactactgctcctcccgtccagactcctttgcccgtgatcccccaccagaaggtggtcgtcaactcccctgccaacgctgattaccaggagaggtttaacccatctgccttgaaagacagtgcactgagtactcataagccgattgaagtcaaggggctcggaggaaaggccaccataatccatgcgcaatataatacccctatttccatgtactcccaggatgctataatggacgccatagccggccaggctcaggcccagggctccgacttctccgggtccctacccattaaggatcttgctgtggactccgcctcccctgtttatcaggctgtgatcaagagtcagaacaaacccgaagatgaggcagacgaatgggcacgacggtccagtaacctccagagccgcagcttccggattctcgcacagatgacaggcaccgaatttatgcaagaccccgacgaggaggccttgcggaggagtaggccccaggccagcagctacagccccgcggtggccgcctcaagtgccccagcgacacacacatcatactctgagggccccgccgctccagccccaaagccaagggtcgtgactacagcatctatcagaccttccgtctatcagcctgtgccagccagtacttacagtcccagccccggtgcaaactattcccctactccttacaccccttctcctgcccccgcgtatacccccagcccggcccccgcatacaccccatctcccgtacctacctatactccaagtccggcaccagcctatacaccttcccctgcacccaattataacccagcaccctccgtggcttacagcggtgggcccgccgaacccgcaagtcgccctccttgggtcaccgacgatagcttctcccagaaattcgcccccggaaaatctaccacttcaatcagtaagcaaaccctgcctcgcggcggccctgcttatactcctgcgggaccccaggtccctcctttggcccgaggtaccgtgcagcgcgccgaacgtttcccggcttcatcccgcactccactgtgtggccactgcaacaatgtcatccgcggaccttttctggttgccatggggcggagttggcatccagaggaatttacatgtgcctattgcaaaacttctctcgccgatgtgtgtttcgtggaggagcagaacaatgtgtattgcgagagatgctatgagcaatttttcgccccactgtgcgctaagtgcaatactaaaatcatgggagaagtgatgcacgccctgagacagacctggcataccacctgtttcgtttgcgctgcctgcaaaaaacctttcggcaattccctcttccacatggaggacggcgagccttactgcgagaaagattacatcaacctgttttcgactaagtgtcacggctgtgatttcccagtggaagctggtgataagttcatcgaagctttaggacatacgtggcacgacacatgcttcatttgtgcagtgtgccatgtgaatctggagggtcaacccttctattccaagaaggacaggcctttgtgcaaaaagcacgctcacacaatcaacctgtag

SEQ ID NO: 36018 - DNA, 1413 bp, Artificial Sequence
  derived and/or modified sequence
atgagctacagcgtgaccctgaccggccccggcccctggggcttcagactgcagggaggtaaagacttcaacatgcccctgaccatttcgagaatcacccctggaagtaaggcagcccagagccagttgagtcagggggatctcgtcgttgccatcgacggcgtgaataccgataccatgacacacctggaggcacagaataagatcaaaagcgcttcctacaacctgtcccttacgctgcaaaagtcaaagagaccaattcccatttccacaacggctcctcctgtgcagaccccgctccccgtaattccacatcaaaaagccagctcttattccccagccgttgcagcttccagcgcgcccgctacccatacttcatattctgagggcccagccgcccctgcacctaagcccagagtggtgacgactgctagcattagacccagcgtctaccaacctgttccggcctcaacttactccccaagtcccggagccaactacagcccaaccccttacacaccgagtcctgcaccagcatatacccccagtcctgcccctgcttacaccccctcacctgtcccgacttacactccatcacctgctcccgcttacacgccctccccagcgcctaactacaacccagctcccagtgttgcttattcgggcggcccagcagagccggcttcaagaccaccatgggtaacggatgacagtttcagccaaaagttcgctcctgggaagtctacaactagcatcagtaagcagacactgcctcgagggggcccagcctatacacctgctggcccccaggtaccacctctggcacgaggcacagtgcaaagggccgagcgattcccagcgagttcaagaacccctctgtgcggtcactgcaacaatgtgattcggggtccctttttggttgccatggggaggtcatggcacccggaggagtttacgtgtgcgtattgcaaaacttctttggcagacgtctgttttgtggaggaacagaacaatgtctactgtgaacgctgctatgagcagttctttgcccccctctgtgctaagtgcaatactaagattatgggcgaagttatgcacgctctgagacagacgtggcacactacatgcttcgtgtgcgccgcttgcaagaaaccatttggaaatagcctttttcacatggaggacggcgagccctattgtgagaaggattacatcaatctgttcagcactaaatgtcacggatgcgacttccccgtcgaggctggagataagtttatcgaggccctggggcacacctggcacgacacatgcttcatctgcgccgtgtgccacgtcaacctggaaggacagccattctactctaagaaggatcgcccactttgcaaaaagcatgcccatacaattaatttgtag

SEQ ID NO: 36019 - DNA, 2184 bp, Artificial Sequence
  derived and/or modified sequence
atgagctacagcgtgaccctgaccggccccggcccctggggcttccgccttcagggaggaaaagattttaacatgccactgacgatctcccggattacccccggctctaaagctgcccagtctcagctgagccaaggggatcttgttgtcgccattgatggagtgaataccgatactatgacacatctcgaggctcagaataagattaagagcgcaagctacaacctatcgctgactctccagaaatctaagcggccgatcccaataagtaccacagctcctcccgttcagactcctctccccgtaattccacaccagaaagacccggccctcgacaccaacggctctctcgtggccccatcgccatcgccagaagcacgggcctcccccggaacacccgggacgcccgagctccgcccgacgtttagtcctgccttcagccggccatctgcatttagttccctggcggaggccagtgatcccggaccccctagggccagtctgagagcgaagacgagcccagagggagcccgcgaccttttagggccgaaggcccttcccggctccagccagccacgccaatacaacaatcctataggtttatactctgctgaaactcttcgagaaatggcacaaatgtatcaaatgtcgcttcgggggaaagcgagcggggtgggcctgcccggcggatctctacccatcaaggatctggccgtggattcggctagtcctgtgtaccaggccgtgattaagagccagaataaacccgaggacgaggcagacgagtgggcacgccggagttcaaatcttcagtcacgcagctttcggatcttggcacagatgacaggaacagagttcatgcaggatccagacgaagaagccctgcgacggagctccacacctatcgagcatgcccccgtctgcacatctcaagccaccacaccgctgctaccggcatccgctcaacctcctgctgcagccagtccttccgctgcttcccccccgttggccaccgccgccgcccacacggctattgcatctgcctccactacggcacctgcgtcctcccccgccgattctccaaggcctcaggcttctagctacagccctgccgtagccgccagtagcgccccagcgactcacacctcctattctgaagggccagcagcgcccgcacccaagccccgggtagtgaccactgcatctattagaccctctgtataccagcccgtgccagcttccacatattcaccttcaccaggcgcaaattacagtccaaccccatacacaccttcccctgcccctgcctataccccctcccccgctcctgcttatacaccctccccagtgcctacatacactcccagcccagctccagcctacacaccttccccagcccctaattacaatccagctccttctgtagcatactccggaggtcctgcagagccggcctcccgtccaccttgggttactgacgacagcttttctcagaaattcgctcctgggaaatcaactacaagtatctccaaacagacccttccgcgcggaggacctgcctacacccctgccgggcctcaggtccctcccctggccagaggcacggtgcagcgagccgagaggttccctgcaagcagcaggacccccctgtgtggacattgcaataacgtgattcgaggtcctttcctagtggccatggggagaagctggcacccagaggaattcacctgtgcatactgtaagacctcattagccgatgtttgctttgtggaagagcagaataacgtgtattgtgagagatgctacgagcagtttttcgcccctctgtgtgcgaagtgcaatactaagattatgggggaggtcatgcatgcgctgcgccagacctggcacaccacgtgttttgtgtgtgcggcgtgcaagaaacccttcggcaattctctgtttcacatggaggacggagagccatactgcgagaaagactacattaacctattcagtacaaaatgccatgggtgtgactttcctgtggaggcaggagataagtttatcgaagcattgggtcacacatggcatgacacgtgcttcatctgtgctgtgtgtcatgtgaatctggagggacagccgttttacagcaagaaagatagaccgctgtgcaagaagcacgctcataccatcaatttgtag

SEQ ID NO: 36020 - DNA, 1854 bp, Artificial Sequence
  derived and/or modified sequence
atgagctacagcgtgaccctgaccggccccggcccctggggcttcaggctgcagggcgggaaggacttcaatatgcctctcacgattagcagaatcacacccggaagtaaagctgcacagtcgcaattgagtcaaggggacctggttgtcgctattgacggcgtgaataccgacacaatgacccaccttgaagcacagaataagattaaatccgcttcttacaacttatctctgacattacagaagtccaaacgcccgatccccatcagtacgactgctcctccagtgcagactcccctccccgtgattccgcaccagaaagtggtcgtaaactctccagcgaacgccgactatcaggagcgcttcaacccaagcgcactgaaggactctgccttgagtacgcacaaacccattgaagtgaagggacttgggggaaaagcgactatcatccacgcccagtacaacactccgatatctatgtacagccaggacgcaatcatggatgctatagcaggtcaggcccaagctcaggggtctgacttttcaggaagcctgcccataaaagatctcgcagtggacagcgcgtctcccgtgtaccaggccgtgatcaagtcgcagaataaacccgaagacgaggcggacgaatgggcccggaggagctccaacctgcagagtagaagcttcaggatcttagcccagatgaccggcacagaatttatgcaggacccagatgaggaagccttgcgaaggtcccgcccacaagccagctcttacagccccgccgtagcggccagtagtgcaccagccacccacacttcctactccgaggggcctgccgctcctgctccaaaaccccgcgttgtgaccaccgccagcattagacccagcgtgtaccagcccgtgcctgcctccacttactcgccgtcacctggcgcaaattactctcctaccccatacaccccaagtcctgccccagcttacactccatcccctgcccctgcatacactcctagccccgtgccgacctacacccccagccccgcccccgcttacacaccttccccagcacccaactacaatcccgcaccgtcggtagcctacagcggcggtccagccgaacctgcaagtaggccaccatgggtaacggatgactctttttcccagaagtttgctcctggcaaatcaaccaccagcatcagcaaacagacactaccccggggcggtcccgcttacacgccagcaggcccacaggtgccacccctggcccgagggactgtgcagagagccgagaggtttccggcctcatcccggacccctctctgtggccactgcaataacgtcatccgaggccccttcctggtggcaatgggccgaagctggcatcccgaggagttcacatgtgcgtactgcaaaactagcctggccgatgtgtgcttcgttgaagaacaaaataacgtctactgtgaaaggtgctacgaacagttttttgccccactctgcgccaaatgcaacacaaagataatgggggaggtaatgcatgcactgcgacagacctggcatactacctgcttcgtctgcgccgcctgtaaaaagccattcgggaatagtctgtttcatatggaggatggcgaaccttactgtgagaaggactatatcaaccttttctccactaagtgccacggatgcgatttcccagttgaggcgggcgataagtttattgaagcgctaggtcacacctggcatgacacttgctttatctgcgccgtctgtcacgtgaacctggaagggcaacccttttactcgaagaaggacagacctctgtgtaagaaacacgcgcacaccattaacctatag

SEQ ID NO: 36021 - DNA, 1854 bp, Artificial Sequence
  derived and/or modified sequence
atgtcctatagcgtcacccttactggaccaggtccatggggcttccgcctccagggcggtaaggattttaacatgccactcactatctctcgaatcacaccaggctctaaagctgcccagagccagctgagtcaaggcgatcttgtagtggccatcgacggcgtaaataccgatacaatgacacatcttgaagcccagaataagatcaaatcagcaagctacaacctgagtctcacactgcagaagtccaagaggcccattcctatttcaaccaccgctcccccagtccagacgccactgccagtcattccccaccagaaagttgtcgtcaactctccagccaatgccgactatcaggagcgatttaacccatctgcgctgaaagattccgccctgagcacacacaagcccatagaggtgaagggccttggaggtaaagctacaatcatccacgcacagtataatacccctattagtatgtatagtcaggacgctatcatggacgccattgcagggcaagcgcaggcccagggatctgattttagtgggtccctgccaattaaagatcttgcggttgacagcgcctccccggtgtatcaggccgtgatcaagtctcagaacaaaccagaagatgaagctgacgagtgggctagaagaagctccaacctccagagtaggagtttccggatactggcacaaatgacagggaccgagttcatgcaggatccagatgaagaagcgctcagacggtcccggcctcaggctagctcctattcaccagctgtcgcggcatccagtgcaccagctactcacacatcatactcggagggccctgccgctcccgctcctaagccccgagtcgtgacaacagccagtatccgcccttccgtgtatcagcctgtccccgcttccacatatagtccaagccccggagctaactattccccaaccccctatacaccctcgccagcccctgcctatacaccaagtcctgcgccagcttataccccgagtcctgtaccaacttacactccctccccagcacctgcctacacgccaagtcctgcgccaaactataatccagcaccttcagtggcctactctggtggacctgcagagccagcatctcggccaccttgggtgaccgacgactccttttcccaaaagttcgctcctggaaaaagtaccactagcattagcaagcaaactcttccccgaggcggtcccgcttatacacctgccggaccccaggtgccccctttagcacggggtacggtacagcgcgctgaacgctttcctgcttctagcagaacacctctatgtgggcactgtaacaatgtgattagggggccattcctcgttgccatgggaaggtcctggcatccggaggaatttacatgcgcgtattgcaaaacttcccttgccgatgtgtgcttcgtggaagagcagaataatgtctattgcgagcgttgttacgagcagttctttgcccctctttgcgcaaaatgcaacacaaagattatgggtgaagtcatgcacgcccttaggcagacttggcacaccacctgtttcgtctgcgccgcttgcaagaaacctttcggtaattctctattccacatggaagacggggagccatattgcgagaaggactacatcaacctgttttctacaaaatgccacggctgtgattttccggtggaagccggagacaagttcatagaggcactcgggcatacatggcatgacacatgtttcatctgcgctgtctgtcatgttaatctggaaggccagcccttctattctaagaaagaccgaccactttgtaaaaaacatgcgcacactatcaatctgtag

SEQ ID NO: 36022 - DNA, 1413 bp, Artificial Sequence
  derived and/or modified sequence
atgtcttacagcgtgactttgaccggccctgggccttggggctttcggctccaggggggaaaggactttaatatgccactcacaatctctcgcataaccccaggcagtaaagccgcacagtcacagctcagccagggggacctggtggtagcaatagacggggtcaataccgatactatgacacaccttgaggcccagaataaaatcaaaagcgcctcctataacttgtctctcactttacagaaaagcaaacgcccaattccgatcagcactactgcccctccggttcagacgccgttgcctgtcatcccacaccagaaggctagcagttattcccccgctgttgctgcctctagcgctcctgcaacccacacttcttacagcgagggccctgcggcacccgctcccaaacctagagtggtcaccactgccagcatcagaccttctgtataccagccagtacccgctagtacttactcaccttctcccggtgcgaactatagtccaacaccctacacccctagccccgcaccagcctacactccatctcctgctcccgcatatactccgtcccccgttcctacttataccccatctcccgctccagcctacaccccatcccccgcaccaaactataatcctgctccctctgtggcatacagtggcggacctgctgaacctgcaagccgtccgccatgggttacagacgactccttcagccagaaattcgccccaggtaaaagcacaacatctattagtaaacagacactgcccaggggtgggccagcctatacaccagcaggtcctcaagtgcctcccctggcaaggggcaccgtacagcgggcagagcgcttccccgcatcttcacgcacaccactgtgtggtcattgtaataacgtgattaggggaccatttctcgttgcgatgggacggagctggcaccctgaagagttcacgtgtgcctactgcaagacaagcctggctgatgtgtgctttgtggaagagcagaataatgtatactgcgagagatgctatgagcaattcttcgctcctctgtgcgccaagtgtaacaccaaaatcatgggtgaagtgatgcacgccttaaggcagacctggcataccacatgtttcgtgtgtgctgcctgcaagaaaccatttgggaactctctatttcacatggaggatggtgagccctactgcgagaaagattacattaacctctttagtacaaaatgccacggctgtgacttcccggtggaggcgggagataaatttatcgaggcactcgggcacacctggcacgatacctgctttatctgtgcggtctgtcacgttaaccttgagggacagccattctactcaaagaaggacaggcccctgtgcaagaaacatgcgcacacgatcaacctgtag

SEQ ID NO: 36023 - DNA, 2184 bp, Artificial Sequence
  derived and/or modified sequence
atgtcttacagcgtcactctgacaggacccggtccctggggatttcggcttcaggggggaaaggattttaatatgccactgacaatctcgcgaataaccccaggcagtaaggccgctcaatcccaactatctcagggcgacctcgttgtggcaattgatggcgttaacacagacaccatgacccatctggaggcacagaacaaaattaagtccgcctcctataatctctctctgaccttgcagaaaagcaagcggccaatccctatttcaaccacagcaccaccagtgcagactccactcccagtcattcctcatcagaaagatccggctcttgacaccaatgggagtctagtggcaccgtctccatctcccgaggcaagagcttcccccggaaccccgggtacaccggagctgcggcctaccttttctcccgctttctctaggccctctgcttttagctccctggctgaggcctcagatcccggtcccccaagagctagtctgcgggctaaaacttcgccagaaggcgctcgagatctactgggaccaaaggcactacccggttcatcacagccccgacagtacaataaccccattggcttatattcagccgagactttgcgggaaatggcccagatgtaccagatgtccctgcggggaaaggcctccggcgttggattgccaggtggatcactaccgatcaaggatctcgccgttgactccgcctctcctgtctatcaggctgtcattaaatcccaaaacaaaccagaagatgaagccgatgagtgggcacggagatcaagcaatttgcagtccaggtcgttcaggatcttggcgcagatgacgggcacggagttcatgcaggacccagacgaagaagcgcttaggagatcaagcacacccatcgaacacgcccctgtttgcacctcccaagccacgacacctctattaccggcttcagctcagcctcccgctgcagctagtcctagcgccgctagccctcccttggcaacagccgcagcccacaccgctatcgcttctgccagtacaacggcccctgctagctctcctgccgattccccacgcccacaggccagtagttattcgccagctgtggccgctagcagcgctcccgctacgcatacctcttactccgaaggccctgctgccccagcccctaagcccagggtggtgacaactgcttccattaggccatccgtgtaccagcctgtacccgcttcgacttacagccctagtccgggagcaaactactcacccactccatatacccctagtcccgctccggcttacactcccagtcccgctcctgcatatactccaagcccagtccctacttacacaccttccccagctccagcatacacaccgagccccgctccaaattataaccctgcgcctagcgtggcatactcagggggtcctgccgaacccgcttcaagacctccttgggtaacagatgacagcttttcccagaagttcgctcctggcaagagtacaacctccatatctaagcagactctaccacgtggcggtcctgcatatacacccgctggaccacaagtccctcctctggcccgagggaccgtccagcgcgcagaaagattcccagcttcctcacgaactcccttgtgtggccactgtaacaatgtgatacggggaccctttctcgttgcgatgggaagatcctggcaccctgaggagtttacatgcgcgtattgcaagacttcactagccgacgtgtgcttcgtggaggagcagaacaatgtgtactgtgagcggtgttatgaacagttttttgctcctctttgtgccaaatgtaatacaaaaatcatgggagaggtgatgcacgctctgcgacagacgtggcacaccacctgctttgtgtgcgcagcctgcaaaaaacccttcgggaactccttgtttcacatggaggacggagagccttattgtgaaaaggattatattaatctgttctccactaagtgtcacgggtgcgattttccagttgaggccggtgataaatttatcgaagccctgggccatacctggcacgatacatgttttatctgcgcagtgtgccacgtcaatttggaaggccaaccattttactcaaaaaaagaccgcccactgtgcaaaaagcacgcccacaccattaacctgtag

SEQ ID NO: 36024 - DNA, 1854 bp, Artificial Sequence
  derived and/or modified sequence
atgtcctattctgtgactcttactggccctggcccttgggggtttcgcctccaaggcggaaaggattttaacatgccgcttacaatcagtaggataacaccaggatcgaaggctgctcagagccaattgagtcagggagacctcgttgtcgctatagacggggtaaacaccgataccatgacccacttagaggcgcagaataagattaaatcagcttcttacaatctgtccttgacgctgcagaaaagcaagagacccattccaatttcaacaaccgccccacccgtgcagactcctctccccgttatacctcaccagaaggtagtggtcaactccccagcgaacgctgactaccaggaacgctttaaccccagcgcgctgaaagacagcgctctttcaactcacaaacccattgaagtgaaggggcttgggggaaaagcgaccatcattcatgctcagtacaatacacctatcagtatgtattcccaggatgccatcatggatgcaatcgcgggacaggctcaggctcagggaagcgacttcagtgggtcacttcccatcaaggatctggcagtggacagtgcatcccccgtctatcaggctgtgataaaatctcagaataagcctgaggacgaggcggatgagtgggccaggaggtcttcaaatcttcagtccaggagctttcgtatcttggctcaaatgactgggaccgaattcatgcaggaccccgacgaagaggccctgcggaggtcccgcccacaagcctcgagctattcccctgccgtagcagcctcatctgcacctgctactcataccagctactcagaggggcctgccgctcccgctccaaaacccagagtagtcactacagccagtatcagaccctctgtgtaccaaccagtccctgcctccacatattccccaagccctggcgcaaattattcgccaaccccttacactccatcccctgcgcctgcctacacaccttcacctgcacctgcctacacccctagccctgttccaacatacactccaagtcccgctcccgcttacaccccaagccctgcccctaactacaaccccgctccatctgtcgcctactccggtgggcctgctgaacctgctagccgccctccgtgggttactgatgactcattcagccaaaaattcgctccgggaaagtctacgactagtatttctaagcagacgttaccacggggaggaccagcctatactcctgctggtccccaggtgccccctctcgctaggggtactgtgcaacgggctgaacggttccctgcctcgagccgaacgcctctgtgtggacattgtaataacgttattcgcggtccattcctggtggccatggggaggagctggcaccccgaggagttcacctgtgcctactgcaaaaccagcctcgcagatgtgtgcttcgtcgaagagcagaataatgtgtactgcgaacgatgttacgagcagttcttcgctccactctgcgccaagtgcaacactaagattatgggcgaagtcatgcacgcccttcgccagacctggcacactacctgcttcgtgtgtgctgcttgcaagaagccttttggcaactcacttttccacatggaggacggggaaccctactgcgagaaagattacatcaacctctttagcacaaaatgtcacgggtgtgattttcccgtcgaagcaggcgataaatttattgaggctcttgggcacacttggcacgatacttgcttcatctgtgccgtatgtcacgttaacctggaggggcagccgttctattcaaagaaagaccggccactctgtaaaaaacacgcgcacactatcaacttgtag

SEQ ID NO: 36025 - DNA, 1854 bp, Artificial Sequence
  derived and/or modified sequence
atgagctacagcgtgaccctgaccggccccggcccctggggcttcagactgcagggcggcaaggacttcaacatgcccctgaccatcagcagaatcacccccggcagcaaggccgcccagagccagctgagccagggcgacctggtggtggccatcgacggcgtgaacaccgacaccatgacccacctggaggcccagaacaagatcaagagcgccagctacaacctgagcctgaccctgcagaagagcaagagacccatccccatcagcaccaccgccccccccgtgcagacccccctgcccgtgatcccccaccagaaggtggtggtgaacagccccgccaacgccgactaccaggagagattcaaccccagcgccctgaaggacagcgccctgagcacccacaagcccatcgaggtgaagggcctgggcggcaaggccaccatcatccacgcccagtacaacacccccatcagcatgtacagccaggacgccatcatggacgccatcgccggccaggcccaggcccagggcagcgacttcagcggcagcctgcccatcaaggacctggccgtggacagcgccagccccgtgtaccaggccgtgatcaagagccagaacaagcccgaggacgaggccgacgagtgggccagaagaagcagcaacctgcagagcagaagcttcagaatcctggcccagatgaccggcaccgagttcatgcaggaccccgacgaggaggccctgagaagaagcagaccccaggccagcagctacagccccgccgtggccgccagcagcgcccccgccacccacaccagctacagcgagggccccgccgcccccgcccccaagcccagagtggtgaccaccgccagcatcagacccagcgtgtaccagcccgtgcccgccagcacctacagccccagccccggcgccaactacagccccaccccctacacccccagccccgcccccgcctacacccccagccccgcccccgcctacacccccagccccgtgcccacctacacccccagccccgcccccgcctacacccccagccccgcccccaactacaaccccgcccccagcgtggcctacagcggcggccccgccgagcccgccagcagacccccctgggtgaccgacgacagcttcagccagaagttcgcccccggcaagagcaccaccagcatcagcaagcagaccctgcccagaggcggccccgcctacacccccgccggcccccaggtgccccccctggccagaggcaccgtgcagagagccgagagattccccgccagcagcagaacccccctgtgcggccactgcaacaacgtgatcagaggccccttcctggtggccatgggcagaagctggcaccccgaggagttcacctgcgcctactgcaagaccagcctggccgacgtgtgcttcgtggaggagcagaacaacgtgtactgcgagagatgctacgagcagttcttcgcccccctgtgcgccaagtgcaacaccaagatcatgggcgaggtgatgcacgccctgagacagacctggcacaccacctgcttcgtgtgcgccgcctgcaagaagcccttcggcaacagcctgttccacatggaggacggcgagccctactgcgagaaggactacatcaacctgttcagcaccaagtgccacggctgcgacttccccgtggaggccggcgacaagttcatcgaggccctgggccacacctggcacgacacctgcttcatctgcgccgtgtgccacgtgaacctggagggccagcccttctacagcaagaaggacagacccctgtgcaagaagcacgcccacaccatcaacctgtag

SEQ ID NO: 36026 - DNA, 1413 bp, Artificial Sequence
  derived and/or modified sequence
atgagctacagcgtgaccctgaccggccccggcccctggggcttcagactgcagggcggcaaggacttcaacatgcccctgaccatcagcagaatcacccccggcagcaaggccgcccagagccagctgagccagggcgacctggtggtggccatcgacggcgtgaacaccgacaccatgacccacctggaggcccagaacaagatcaagagcgccagctacaacctgagcctgaccctgcagaagagcaagagacccatccccatcagcaccaccgccccccccgtgcagacccccctgcccgtgatcccccaccagaaggccagcagctacagccccgccgtggccgccagcagcgcccccgccacccacaccagctacagcgagggccccgccgcccccgcccccaagcccagagtggtgaccaccgccagcatcagacccagcgtgtaccagcccgtgcccgccagcacctacagccccagccccggcgccaactacagccccaccccctacacccccagccccgcccccgcctacacccccagccccgcccccgcctacacccccagccccgtgcccacctacacccccagccccgcccccgcctacacccccagccccgcccccaactacaaccccgcccccagcgtggcctacagcggcggccccgccgagcccgccagcagacccccctgggtgaccgacgacagcttcagccagaagttcgcccccggcaagagcaccaccagcatcagcaagcagaccctgcccagaggcggccccgcctacacccccgccggcccccaggtgccccccctggccagaggcaccgtgcagagagccgagagattccccgccagcagcagaacccccctgtgcggccactgcaacaacgtgatcagaggccccttcctggtggccatgggcagaagctggcaccccgaggagttcacctgcgcctactgcaagaccagcctggccgacgtgtgcttcgtggaggagcagaacaacgtgtactgcgagagatgctacgagcagttcttcgcccccctgtgcgccaagtgcaacaccaagatcatgggcgaggtgatgcacgccctgagacagacctggcacaccacctgcttcgtgtgcgccgcctgcaagaagcccttcggcaacagcctgttccacatggaggacggcgagccctactgcgagaaggactacatcaacctgttcagcaccaagtgccacggctgcgacttccccgtggaggccggcgacaagttcatcgaggccctgggccacacctggcacgacacctgcttcatctgcgccgtgtgccacgtgaacctggagggccagcccttctacagcaagaaggacagacccctgtgcaagaagcacgcccacaccatcaacctgtag

SEQ ID NO: 36027 - DNA, 2184 bp, Artificial Sequence
  derived and/or modified sequence
atgagctacagcgtgaccctgaccggccccggcccctggggcttcagactgcagggcggcaaggacttcaacatgcccctgaccatcagcagaatcacccccggcagcaaggccgcccagagccagctgagccagggcgacctggtggtggccatcgacggcgtgaacaccgacaccatgacccacctggaggcccagaacaagatcaagagcgccagctacaacctgagcctgaccctgcagaagagcaagagacccatccccatcagcaccaccgccccccccgtgcagacccccctgcccgtgatcccccaccagaaggaccccgccctggacaccaacggcagcctggtggcccccagccccagccccgaggccagagccagccccggcacccccggcacccccgagctgagacccaccttcagccccgccttcagcagacccagcgccttcagcagcctggccgaggccagcgaccccggcccccccagagccagcctgagagccaagaccagccccgagggcgccagagacctgctgggccccaaggccctgcccggcagcagccagcccagacagtacaacaaccccatcggcctgtacagcgccgagaccctgagagagatggcccagatgtaccagatgagcctgagaggcaaggccagcggcgtgggcctgcccggcggcagcctgcccatcaaggacctggccgtggacagcgccagccccgtgtaccaggccgtgatcaagagccagaacaagcccgaggacgaggccgacgagtgggccagaagaagcagcaacctgcagagcagaagcttcagaatcctggcccagatgaccggcaccgagttcatgcaggaccccgacgaggaggccctgagaagaagcagcacccccatcgagcacgcccccgtgtgcaccagccaggccaccacccccctgctgcccgccagcgcccagccccccgccgccgccagccccagcgccgccagcccccccctggccaccgccgccgcccacaccgccatcgccagcgccagcaccaccgcccccgccagcagccccgccgacagccccagaccccaggccagcagctacagccccgccgtggccgccagcagcgcccccgccacccacaccagctacagcgagggccccgccgcccccgcccccaagcccagagtggtgaccaccgccagcatcagacccagcgtgtaccagcccgtgcccgccagcacctacagccccagccccggcgccaactacagccccaccccctacacccccagccccgcccccgcctacacccccagccccgcccccgcctacacccccagccccgtgcccacctacacccccagccccgcccccgcctacacccccagccccgcccccaactacaaccccgcccccagcgtggcctacagcggcggccccgccgagcccgccagcagacccccctgggtgaccgacgacagcttcagccagaagttcgcccccggcaagagcaccaccagcatcagcaagcagaccctgcccagaggcggccccgcctacacccccgccggcccccaggtgccccccctggccagaggcaccgtgcagagagccgagagattccccgccagcagcagaacccccctgtgcggccactgcaacaacgtgatcagaggccccttcctggtggccatgggcagaagctggcaccccgaggagttcacctgcgcctactgcaagaccagcctggccgacgtgtgcttcgtggaggagcagaacaacgtgtactgcgagagatgctacgagcagttcttcgcccccctgtgcgccaagtgcaacaccaagatcatgggcgaggtgatgcacgccctgagacagacctggcacaccacctgcttcgtgtgcgccgcctgcaagaagcccttcggcaacagcctgttccacatggaggacggcgagccctactgcgagaaggactacatcaacctgttcagcaccaagtgccacggctgcgacttccccgtggaggccggcgacaagttcatcgaggccctgggccacacctggcacgacacctgcttcatctgcgccgtgtgccacgtgaacctggagggccagcccttctacagcaagaaggacagacccctgtgcaagaagcacgcccacaccatcaacctgtag

SEQ ID NO: 36028 - protein, 330 aa, Artificial Sequence
  derived and/or modified sequence
MSYSVTLTGPGPWGFRLQGGKDFNMPLTISRITPGSKAAQSQLSQGDLVVAIDGVNTDTMTHLEAQNKIKSASYNLSLTLQKSKRPIPISTTAPPVQTPLPVIPHQKDPALDTNGSLVAPSPSPEARASPGTPGTPELRPTFSPAFSRPSAFSSLAEASDPGPPRASLRAKTSPEGARDLLGPKALPGSSQPRQYNNPIGLYSAETLREMAQMYQMSLRGKASGVGLPGGSLPIKDLAVDSASPVYQAVIKSQNKPEDEADEWARRSSNLQSRSFRILAQMTGTEFMQDPDEEALRRSRERFETERNSPRFAKLRNWHHGLSAQILNVKS

SEQ ID NO: 36029 - DNA, 993 bp, Artificial Sequence
  derived and/or modified sequence
atgagctattctgtcacccttacaggtccaggcccatgggggtttcgtcttcagggaggcaaagactttaacatgcctttaactatttctagaatcaccccggggagcaaagctgcccagagtcagctgtcacagggggacctggtagttgcaatagatggggtgaacaccgacactatgacccaccttgaggcccaaaataagatcaaaagtgccagctacaacttgagcttgacactgcagaaaagcaagagacccatccccatctccacaactgctccccccgttcagacccccttgcccgtcattccgcatcaaaaggacccggccctggataccaacggcagcctggttgccccctcaccgagtccagaggcaagagcttctcctggcacccccggaacccccgaactcagaccaacatttagtcccgccttctcacgccctagtgccttttcctcccttgccgaggcctccgacccaggtcctccgcgggctagtctacgggctaaaacctccccagaaggagctagagacttactgggtcctaaggctctccccggctccagtcagcccaggcaatataacaatcctatcgggctttacagcgccgaaacgctccgggaaatggcccagatgtatcagatgtctctcagaggaaaggcgtccggcgtggggctgcccggtggaagtctcccaatcaaggatctggccgtggattcggctagtcccgtctaccaagcggtcattaaaagtcaaaataaaccggaggacgaggctgatgagtgggcccgccggtcttctaatctgcagagcaggtcatttagaatcttagcccagatgactggcaccgaattcatgcaggaccccgacgaggaagccctgcgtcggtctcgcgagagatttgaaaccgagagaaattctccacggttcgccaagctgcgcaactggcaccatggcctgagtgctcaaatcctcaatgtgaagtcatag

SEQ ID NO: 36030 - DNA, 696 bp, Artificial Sequence
  derived and/or modified sequence
atgtcttactctgtgacactcactggtcccgggccctggggatttcgcctccaagggggaaaggattttaacatgcccctgaccatcagccgaatcacgcccggctcaaaggcagcacagtcgcagttatcccagggtgatctcgttgttgcaatcgacggggtgaatacggataccatgacccaccttgaggctcagaataaaatcaaatcagctagctataatctctctctgactctgcagaagagtaaacgcccaatacccatcagtactaccgccccacccgtccagactccactgccggtgatcccccaccagaaagatcccgcactggacacgaatggatctctcgtggcgccttccccatccccagaagctagagcctcaccaggtactccggggactccggagctgagacctactttctcacccgcgttcagccggccgagtgcgttttctagtctggctgaggcctcagatcccggccctccgcgcgcttcactccgggctaagactagcccggaaggcgctcgcgacttgctgggcccaaaggccctgccaggatcctctcagcctaggcagtacaacaatcctatcggcttgtacagcgcagaaacgctccgggagatggcacaaatgtatcagatgagtttaaggggcaaagcctccggcgtggggcttccaggcggatggtag

SEQ ID NO: 36031 - DNA, 993 bp, Artificial Sequence
  derived and/or modified sequence
atgagctacagcgtgaccctgaccggccctggcccctggggcttccggctgcagggcggcaaggacttcaacatgcccctgaccatcagccgcatcaccccaggcagcaaggccgcccagagccagctgagccagggcgacctggtggtggccattgatggagtgaacacagacaccatgacccacctggaggcccagaacaagatcaagagcgccagctacaacctgagcctgaccctgcagaagagcaagaggcccatccccatcagcaccacagcccctcctgtgcagacccccctgcctgtgatcccccaccagaaggaccctgccctggacaccaacggcagcctggtggcccccagccccagccctgaggcccgggccagccctggcaccccaggcaccccagagctgcggcccaccttcagccctgccttcagccggcccagcgccttcagcagcctggccgaggccagtgaccccggccccccccgggccagcctgcgggccaagaccagccctgagggcgcccgggacctgctgggccccaaggccctgcccggcagcagccagccccggcagtacaacaaccccatcggcctgtacagcgctgagaccctgcgggagatggcccagatgtaccagatgagcctgcggggcaaggccagcggcgtgggcctgcccggcggcagcctgcccatcaaggacctggccgtggacagcgccagccctgtgtaccaggccgtcatcaagagccagaacaagccagaagatgaagcagatgagtgggcccggcgcagcagcaacctgcagagccgctccttccgcatcctggcccagatgactggaacagagttcatgcaggaccctgatgaggaggccctgcggcgcagccgggagagatttgaaacagagaggaacagccccaggtttgccaagctgaggaactggcaccacggcctgagcgcccagatcctgaatgtgaagagctag

SEQ ID NO: 36032 - DNA, 696 bp, Artificial Sequence
  derived and/or modified sequence
atgagctacagcgtgaccctgaccggccctggcccctggggcttccggctgcagggcggcaaggacttcaacatgcccctgaccatcagccgcatcaccccaggcagcaaggccgcccagagccagctgagccagggcgacctggtggtggccattgatggagtgaacacagacaccatgacccacctggaggcccagaacaagatcaagagcgccagctacaacctgagcctgaccctgcagaagagcaagaggcccatccccatcagcaccacagcccctcctgtgcagacccccctgcctgtgatcccccaccagaaggaccctgccctggacaccaacggcagcctggtggcccccagccccagccctgaggcccgggccagccctggcaccccaggcaccccagagctgcggcccaccttcagccctgccttcagccggcccagcgccttcagcagcctggccgaggccagtgaccccggccccccccgggccagcctgcgggccaagaccagccctgagggcgcccgggacctgctgggccccaaggccctgcccggcagcagccagccccggcagtacaacaaccccatcggcctgtacagcgctgagaccctgcgggagatggcccagatgtaccagatgagcctgcggggcaaggccagcggcgtgggcctgcccggcggctggtag

SEQ ID NO: 36033 - DNA, 1695 bp, Artificial Sequence
  derived and/or modified sequence
aggcggccgctgacagcaccagcatgtcttacagtgtgaccctgactgggcccgggccctggggcttccgtctgcaggggggcaaggacttcaacatgcccctcactatctcccggatcacaccaggcagcaaggcagcccagtcccagctcagccagggtgacctcgtggtggccattgacggcgtcaacacagacaccatgacccacctggaagcccagaacaagatcaagtctgccagctacaacttgagcctcaccctgcagaaatcaaagcgtcccattcccatctccacgacagcacctccagtccagacccctctgccggtgatccctcaccagaaggaccccgctctggacacgaacggcagcctggtggcacccagccccagccctgaggcgagggccagcccaggcaccccaggcaccccggagctcaggcccacctttagccctgccttctcccggccctccgccttctcctcactcgccgaggcctctgaccctggccctccgcgggccagcctgagggccaagaccagcccagagggggcccgggacctactcggcccaaaagccctgccgggctcgagccagccgaggcaatataacaaccccattggcctgtactcggcagagaccctgagggagatggctcagatgtaccagatgagcctccgagggaaggcctcgggtgtcggactcccaggagggagcctccctattaaggaccttgccgtagacagcgcctctcccgtctaccaggctgtgattaagagccagaacaagccagaagatgaggctgacgagtgggcacgccgttcctccaacctgcagtctcgctccttccgcatcctggcccagatgacggggacagaattcatgcaagaccctgatgaagaagctctgcgaaggtcaagggaaaggtttgaaacggaacgtaacagcccacgttttgccaaattgcgcaactggcaccatggcctttcagcccaaatccttaatgttaaaagctaaaaggctgcctggaatccccccaccccaacaggctggactccctccatccttacccccacacagatctggcatgtgagccccacggtgatgcttgacaatgtataactctgctgggggcacctctgatggccaaccgcagcatttctgtcctctgcccaccccagagctgatgctggggcccagccccctgcagctctgtacccaccaaacctccccagggcaaccctcgccaccccccaaatagcccgtagcccaatcccctgccctctgcacagggccttagctgtagaccagagagggcaggaggggtttgctggcataacaccccagaaccaagggaaatggatgggccgctgctcagtttcccaccatcctcagctcctggcctcatcccctcctagaatgagtcacccgtagatcagggtctggggaagaggctgatccctggcgctgcccggctccctcgctgccctctggagctcagggcagcccggaatagggctctttgaagaggaagtagaagccccagggtaatgaggcagagacccctcctggcagtggtgaggtgggggcatgcaccctcctttctgtaccgtgtgtgctggctccatagttctctcttctgtacatataagcatgcttgttctgaaataaagaagatttgaagtgaaccacacca

SEQ ID NO: 36034 - DNA, 993 bp, Artificial Sequence
  derived and/or modified sequence
atgagctacagcgtgaccctgaccggccccggcccctggggcttcaggctgcaaggaggcaaggacttcaacatgcctctgacaatcagcaggattacccccgggtcaaaggctgcacagtcgcagctgtctcaaggagatctggtggtagctatcgacggagtaaataccgacacaatgacccatctggaggcccagaataaaatcaagtccgcctcctacaatttgagcctgaccctgcagaaatccaaacggcccatacccatctctacgacagccccccccgttcagactccactccccgtaattccccatcagaaagacccggccctagataccaatggctctcttgtagcccccagcccaagccccgaggcacgggcttcccccggcactccagggaccccggagctacgccctaccttctcccccgcgtttagtcgcccatccgcatttagctctttggccgaagcatctgaccctggtccaccccgagcctccctgcgtgctaaaacttccccagagggagcgcgagatcttttgggacccaaagctctgccaggaagctcgcagccccgccaatacaacaatccgatcgggctgtactccgccgaaacgctccgggaaatggcgcagatgtatcaaatgagcttgcgcggcaaagcctccggcgtgggtctccccgggggatcacttcctataaaggatttggccgttgattcggcatcacctgtgtatcaggccgtgatcaaaagtcagaataagcccgaagatgaagctgatgaatgggcaaggagatccagtaatctgcaaagcaggtcattcaggatcctggcccagatgacaggaaccgagtttatgcaagatcctgatgaagaggctcttaggcggtcaagagaacgatttgagaccgagagaaattctccacggttcgcgaaactaagaaactggcaccacggtctatctgcgcagattctgaacgtgaaaagctag

SEQ ID NO: 36035 - DNA, 696 bp, Artificial Sequence
  derived and/or modified sequence
atgagctacagcgtgaccctgaccggccccggcccctggggcttccgtttacagggcggcaaagactttaacatgcctctcacaatcagtcgcatcacccccggctcgaaagcggcgcagtcacagttaagccagggcgatctggtggtggctatagacggcgttaacacagacactatgacacacttagaggctcagaacaagatcaagagtgcgtcttacaacctgtcccttacactccagaagtccaaacggcctatccctatctccacaacagctccacctgtgcagaccccacttcctgtgatcccccaccagaaagaccctgcgcttgatactaacggctcccttgtcgccccgagcccaagtccagaggcgcgggcttcccccggcaccccagggacccccgagctcaggcctacatttagtcccgccttcagtcgaccctcagcttttagctctctggccgaagcttcagatcctggcccaccccgcgcgagtctccgcgctaaaaccagccccgaaggtgctcgcgacctcctcgggcctaaggcacttcctggatcgtctcagccacgacaatacaacaaccctattggtctctatagtgccgaaacactgagagagatggcccagatgtatcagatgagcctccgggggaaggcatccggcgtagggttgcctggtggatggtag

SEQ ID NO: 36036 - DNA, 993 bp, Artificial Sequence
  derived and/or modified sequence
atgtcctacagcgtgacccttacaggacccggaccatggggtttcaggttacagggtgggaaggatttcaatatgccactgacaattagtcggatcacccccggtagtaaagctgcacagtcgcagctctctcagggcgatctcgttgtggccattgatggcgtcaataccgatactatgactcatctggaagctcaaaacaagattaaatctgcctcctacaacttgtcattaactctgcaaaagagcaagaggcctatccctatctccactaccgccccacctgtgcagactcctctccccgttattccccatcagaaagaccccgcactagacacgaacggtagtttggttgctccctccccgtcccccgaagcgagagcgagtccaggaaccccaggaacccccgagctcaggccaacattttcgccagccttcagtaggccgtccgctttcagctctctcgccgaggccagtgacccgggacctcctcgagcaagcttgcgcgcaaagactagtcctgagggggcacgcgatctgcttggaccaaaagcactgcccggtagcagccagcctagacagtataacaatcccatcggactgtactctgcggagactctgagggaaatggcgcaaatgtaccagatgtctcttcgcggaaaagcaagcggagtcggactgccaggaggatccctgccaattaaggacctggctgtcgacagtgcctctccggtctaccaggccgtgatcaagagtcagaacaaaccggaggacgaggccgacgagtgggccaggcgctcttccaacttgcaatctcgatctttccgaattctagcgcaaatgaccggaactgagtttatgcaagatcctgatgaagaggccctacgtcgcagccgtgagagattcgagaccgagaggaactcaccgagatttgcaaagttgcgtaattggcaccatgggctcagtgcccaaatcttgaacgtcaaaagttag

SEQ ID NO: 36037 - DNA, 696 bp, Artificial Sequence
  derived and/or modified sequence
atgagctactcagtgacattgacaggaccgggaccgtgggggtttcgcctccaaggcggaaaagacttcaatatgcctctgactatatctaggatcacaccgggttccaaggctgcacaaagccagctgtcccaaggcgacctggtcgtggctatcgatggcgtgaatactgacactatgacacaccttgaggcacagaacaaaatcaaaagtgcatcttataacctgagtctgactttacagaagtctaagcgccctatccccatttctaccaccgcaccccctgtacagacacccctaccagtgatccctcaccagaaggaccctgcgttggacaccaatggcagtttagtggcccctagcccgagccccgaagctcgggcttcacctgggacgccaggcacccccgagttacgacctacctttagccctgcattttctcgaccttctgcctttagtagtctggctgaagcctccgacccaggcccaccgcgtgcctccctgcgagcaaagacatcccctgagggtgcaagagacctgctggggccaaaagccttgcccggaagctcccaaccgcgtcagtacaataatccgattgggctgtacagtgcagaaactctccgtgaaatggcccagatgtaccagatgtcactccgcggaaaagcttcaggtgttggccttccagggggttggtag

SEQ ID NO: 36038 - DNA, 993 bp, Artificial Sequence
  derived and/or modified sequence
atgagctacagcgtgaccctgaccggccccggcccctggggcttcagactgcagggcggcaaggacttcaacatgcccctgaccatcagcagaatcacccccggcagcaaggccgcccagagccagctgagccagggcgacctggtggtggccatcgacggcgtgaacaccgacaccatgacccacctggaggcccagaacaagatcaagagcgccagctacaacctgagcctgaccctgcagaagagcaagagacccatccccatcagcaccaccgccccccccgtgcagacccccctgcccgtgatcccccaccagaaggaccccgccctggacaccaacggcagcctggtggcccccagccccagccccgaggccagagccagccccggcacccccggcacccccgagctgagacccaccttcagccccgccttcagcagacccagcgccttcagcagcctggccgaggccagcgaccccggcccccccagagccagcctgagagccaagaccagccccgagggcgccagagacctgctgggccccaaggccctgcccggcagcagccagcccagacagtacaacaaccccatcggcctgtacagcgccgagaccctgagagagatggcccagatgtaccagatgagcctgagaggcaaggccagcggcgtgggcctgcccggcggcagcctgcccatcaaggacctggccgtggacagcgccagccccgtgtaccaggccgtgatcaagagccagaacaagcccgaggacgaggccgacgagtgggccagaagaagcagcaacctgcagagcagaagcttcagaatcctggcccagatgaccggcaccgagttcatgcaggaccccgacgaggaggccctgagaagaagcagagagagattcgagaccgagagaaacagccccagattcgccaagctgagaaactggcaccacggcctgagcgcccagatcctgaacgtgaagagctag

SEQ ID NO: 36039 - DNA, 696 bp, Artificial Sequence
  derived and/or modified sequence
atgagctacagcgtgaccctgaccggccccggcccctggggcttcagactgcagggcggcaaggacttcaacatgcccctgaccatcagcagaatcacccccggcagcaaggccgcccagagccagctgagccagggcgacctggtggtggccatcgacggcgtgaacaccgacaccatgacccacctggaggcccagaacaagatcaagagcgccagctacaacctgagcctgaccctgcagaagagcaagagacccatccccatcagcaccaccgccccccccgtgcagacccccctgcccgtgatcccccaccagaaggaccccgccctggacaccaacggcagcctggtggcccccagccccagccccgaggccagagccagccccggcacccccggcacccccgagctgagacccaccttcagccccgccttcagcagacccagcgccttcagcagcctggccgaggccagcgaccccggcccccccagagccagcctgagagccaagaccagccccgagggcgccagagacctgctgggccccaaggccctgcccggcagcagccagcccagacagtacaacaaccccatcggcctgtacagcgccgagaccctgagagagatggcccagatgtaccagatgagcctgagaggcaaggccagcggcgtgggcctgcccggcggctggtag

SEQ ID NO: 36040 - protein, 283 aa, Artificial Sequence
  derived and/or modified sequence
MSYSVTLTGPGPWGFRLQGGKDFNMPLTISRITPGSKAAQSQLSQGDLVVAIDGVNTDTMTHLEAQNKIKSASYNLSLTLQKSKRPIPISTTAPPVQTPLPVIPHQKVVVNSPANADYQERFNPSALKDSALSTHKPIEVKGLGGKATIIHAQYNTPISMYSQDAIMDAIAGQAQAQGSDFSGSLPIKDLAVDSASPVYQAVIKSQNKPEDEADEWARRSSNLQSRSFRILAQMTGTEFMQDPDEEALRRSRERFETERNSPRFAKLRNWHHGLSAQILNVKS

SEQ ID NO: 36041 - DNA, 852 bp, Artificial Sequence
  derived and/or modified sequence
atgtcctatagcgtcacactcaccggccccgggccctggggctttcggctgcagggtggtaaagatttcaatatgccactcacaatttcaaggatcacccctggcagcaaagccgcacagtctcagctctcccaaggagaccttgtggttgcaattgatggggtgaacactgatacaatgacccacctcgaggctcagaataagatcaagagcgccagctacaatctcagcctgaccctgcaaaagtctaagagacctataccaatctccaccacggccccccctgtccaaacaccgcttcccgtcattcctcatcaaaaggtagtcgtcaactcccccgccaatgcagattatcaagagcgctttaatccttctgcactcaaagattcggctttgagcacacataagcccattgaggttaaaggactcgggggcaaggcaaccatcatccacgcccagtataacaccccgattagcatgtattcccaggatgctatcatggacgccatagccgggcaggcccaggcccaagggtctgattttagtggcagcctaccaatcaaggacctggctgtggattcagcctctccggtctaccaagctgtcatcaaaagtcaaaataagcccgaagacgaagcagacgagtgggcccggagatcttctaatctgcagtctagaagttttaggattttagcccagatgacaggaacggaattcatgcaggatccagacgaagaagcactacggcgaagtcgtgagcgtttcgaaactgagaggaattcgccccgatttgccaaactgcgaaactggcaccatggcctgtcagcccagattctcaatgtcaagtcctag

SEQ ID NO: 36042 - DNA, 852 bp, Artificial Sequence
  derived and/or modified sequence
atgagctacagcgtgaccctgaccggccctggcccctggggcttccggctgcagggcggcaaggacttcaacatgcccctgaccatcagccgcatcaccccaggcagcaaggccgcccagagccagctgagccagggcgacctggtggtggccattgatggagtgaacacagacaccatgacccacctggaggcccagaacaagatcaagagcgccagctacaacctgagcctgaccctgcagaagagcaagaggcccatccccatcagcaccacagcccctcctgtgcagacccccctgcctgtgatcccccaccagaaggtggtggtgaacagccctgccaatgctgactaccaggagcgcttcaaccccagcgccctgaaggacagcgccctgagcacccacaagcccatcgaggtgaagggcctgggcggcaaggccaccatcatccacgcccagtacaacacccccatctccatgtacagccaggatgccatcatggatgccatcgccggccaggcccaggcccagggcagtgacttcagcggcagcctgcccatcaaggacctggccgtggacagcgccagccctgtgtaccaggccgtcatcaagagccagaacaagccagaagatgaagcagatgagtgggcccggcgcagcagcaacctgcagagccgctccttccgcatcctggcccagatgactggaacagagttcatgcaggaccctgatgaggaggccctgcggcgcagccgggagagatttgaaacagaaagaaacagccccaggtttgccaagctgaggaactggcaccacggcctgagcgcccagatcctgaatgtgaagagctag

SEQ ID NO: 36043 - DNA, 1598 bp, Artificial Sequence
  derived and/or modified sequence
gcaggcggagtgcctgagtgccctctcactcaaccctctctaccctttgtctgcagaggcggccgctgacagcaccagcatgtcttacagtgtgaccctgactgggcccgggccctggggcttccgtctgcaggggggcaaggacttcaacatgcccctcactatctcccggatcacaccaggcagcaaggcagcccagtcccagctcagccagggtgacctcgtggtggccattgacggcgtcaacacagacaccatgacccacctggaagcccagaacaagatcaagtctgccagctacaacttgagcctcaccctgcagaaatcaaagcgtcccattcccatctccacgacagcacctccagtccagacccctctgccggtgatccctcaccagaaggtggtagtcaactctccagccaacgccgactaccaggaacgcttcaaccccagtgccctgaaggactcggccctgtccacccacaagcccatcgaggtgaaggggctgggcggcaaggccaccatcatccatgcgcagtacaacacgcccatcagcatgtattcccaggatgccatcatggatgccatcgctgggcaggcccaagcccaaggcagtgacttcagtgggagcctccctattaaggaccttgccgtagacagcgcctctcccgtctaccaggctgtgattaagagccagaacaagccagaagatgaggctgacgagtgggcacgccgttcctccaacctgcagtctcgctccttccgcatcctggcccagatgacggggacagaattcatgcaagaccctgatgaagaagctctgcgaaggtcaagggaaaggtttgaaacggaacgtaacagcccacgttttgccaaattgcgcaactggcaccatggcctttcagcccaaatccttaatgttaaaagctaaaaggctgcctggaatccccccaccccaacaggctggactccctccatccttacccccacacagatctggcatgtgagccccacggtgatgcttgacaatgtataactctgctgggggcacctctgatggccaaccgcagcatttctgtcctctgcccaccccagagctgatgctggggcccagccccctgcagctctgtacccaccaaacctccccagggcaaccctcgccaccccccaaatagcccgtagcccaatcccctgccctctgcacagggccttagctgtagaccagagagggcaggaggggtttgctggcataacaccccagaaccaagggaaatggatgggccgctgctcagtttcccaccatcctcagctcctggcctcatcccctcctagaatgagtcacccgtagatcagggtctggggaagaggctgatccctggcgctgcccggctccctcgctgccctctggagctcagggcagcccggaatagggctctttgaagaggaagtagaagccccagggtaatgaggcagagacccctcctggcagtggtgaggtgggggcatgcaccctcctttctgtaccgtgtgtgctggctccatagttctctcttctgtacatataagcatgcttgttctgaaataaagaagatttgaag

SEQ ID NO: 36044 - DNA, 852 bp, Artificial Sequence
  derived and/or modified sequence
atgagctacagcgtgaccctgaccggccccggcccctggggcttccggctgcagggtggcaaggactttaacatgccactaactataagccggataacaccaggctccaaggccgctcaatctcaactgtctcagggcgacctggttgtggcgattgacggtgtgaacaccgatactatgactcacctcgaggcccagaataagatcaaatctgcgtcttacaatctctcccttactttgcagaagtcaaagagacctattcctatctccacgacagctccacccgtacagacaccactgccagtgattccacaccaaaaagtagtggtgaattcgccagctaatgctgattaccaggagcgtttcaatccctccgctctgaaagacagcgctctgagcacgcacaagcccatcgaagtgaaaggattgggcgggaaggccactattattcatgcccagtataacaccccgatcagtatgtacagtcaggatgccatcatggatgccatcgccggccaggctcaagcccagggctccgattttagcggctctctccctatcaaggaccttgccgtggattctgccagccccgtatatcaggctgtcattaaaagtcagaataagcccgaggatgaggccgatgagtgggcccgcaggagctcaaacctccagtctcgttcattccgcatcctggcccaaatgacggggaccgaattcatgcaggacccggatgaggaggcactacggcgcagcagagagcggttcgaaaccgaacggaacagtcccaggtttgccaagcttaggaactggcaccacggcctgtccgcacagattctcaatgtgaagtcttag

SEQ ID NO: 36045 - DNA, 852 bp, Artificial Sequence
  derived and/or modified sequence
atgtcgtactctgttactctgaccggtcccggaccatgggggttccgactgcagggtgggaaagattttaatatgccgttgacaattagccgcatcacccccggatctaaggctgcccagtcacagctgagtcagggtgacctcgtggtggcaatcgatggggtaaataccgacactatgacacacctggaggctcagaacaagattaagtccgccagctataacctatccctaaccctgcaaaaatctaaaagaccaatcccaatctctaccaccgcgcctcctgtgcagacccctctcccagtcatacctcatcagaaggtggtggtcaacagccccgcaaacgccgattaccaggagaggttcaatccctccgcgctgaaggactcggcactctccacgcataaaccaattgaagtaaagggattgggtggtaaagccaccattatccatgcccaatacaataccccaatcagtatgtactcgcaggatgctattatggacgcaatcgccggacaggcacaggcacagggttccgactttagcgggtccctgccgatcaaggaccttgcggtggactctgcttctcccgtttatcaggccgtaattaagtcccagaacaagcccgaggacgaagcagacgagtgggcaaggcggtcttctaatctccagtcccggagttttcggatcctcgcgcaaatgacaggtacagagttcatgcaggaccccgacgaggaagctttgagaagaagtcgggaacggttcgagactgaaagaaattcgccaaggttcgcaaagcttaggaactggcatcatgggctgtccgcccagatcctcaacgtgaaatcctag

SEQ ID NO: 36046 - DNA, 852 bp, Artificial Sequence
  derived and/or modified sequence
atgagctacagcgtgaccctgaccggccccggcccctggggcttcagactgcagggcggcaaggacttcaacatgcccctgaccatcagcagaatcacccccggcagcaaggccgcccagagccagctgagccagggcgacctggtggtggccatcgacggcgtgaacaccgacaccatgacccacctggaggcccagaacaagatcaagagcgccagctacaacctgagcctgaccctgcagaagagcaagagacccatccccatcagcaccaccgccccccccgtgcagacccccctgcccgtgatcccccaccagaaggtggtggtgaacagccccgccaacgccgactaccaggagagattcaaccccagcgccctgaaggacagcgccctgagcacccacaagcccatcgaggtgaagggcctgggcggcaaggccaccatcatccacgcccagtacaacacccccatcagcatgtacagccaggacgccatcatggacgccatcgccggccaggcccaggcccagggcagcgacttcagcggcagcctgcccatcaaggacctggccgtggacagcgccagccccgtgtaccaggccgtgatcaagagccagaacaagcccgaggacgaggccgacgagtgggccagaagaagcagcaacctgcagagcagaagcttcagaatcctggcccagatgaccggcaccgagttcatgcaggaccccgacgaggaggccctgagaagaagcagagagagattcgagaccgagagaaacagccccagattcgccaagctgagaaactggcaccacggcctgagcgcccagatcctgaacgtgaagagctag

SEQ ID NO: 36047 - protein, 253 aa, Artificial Sequence
  derived and/or modified sequence
MANLGCWMLVLFVATWSDLGLCKKRPKPGGWNTGGSRYPGQGSPGGNRYPPQGGGGWGQPHGGGWGQPHGGGWGQPHGGGWGQPHGGGWGQGGGTHSQWNKPSKPKTNMKHMAGAAAAGAVVGGLGGYMLGSAMSRPIIHFGSDYEDRYYRENMHRYPNQVYYRPMDEYSNQNNFVHDCVNITIKQHTVTTTTKGENFTETDVKMMERVVEQMCITQYERESQAYYQRGSSMVLFSSPPVILLISFLIFLIVG

SEQ ID NO: 36048 - protein, 249 aa, Artificial Sequence
  derived and/or modified sequence
MANLGCWMLVLFVATWSDLGLCKKRPKPGGWNTGGSRYPGQGSPGGNRYPPQGGGGWGQPHGGGWGQPHGGGWGQPHGGGWGQPHGGGWGQGGGTHSQWNKPSKPKTNMKHMAGAAAAGAVVGGLGGYMLGSAMSRPIIHFGSDYEDRYYRENMHRYPNQVYYRPMDEYSNQNNFVHDCVNITIKQHTVTTTTKGENFTETDVKMMERVVEQMCITQYERESQAYYQRGSSMVLFSSPPVILLISFLIF

SEQ ID NO: 36049 - protein, 192 aa, Artificial Sequence
  derived and/or modified sequence
MEHWGQPHGGGWGQPHGGGWGQPHGGGWGQGGGTHSQWNKPSKPKTNMKHMAGAAAAGAVVGGLGGYMLGSAMSRPIIHFGSDYEDRYYRENMHRYPNQVYYRPMDEYSNQNNFVHDCVNITIKQHTVTTTTKGENFTETDVKMMERVVEQMCITQYERESQAYYQRGSSMVLFSSPPVILLISFLIFLIVG

SEQ ID NO: 36050 - protein, 217 aa, Artificial Sequence
  derived and/or modified sequence
MANLGCWMLVLFVATWSDLGLCKKRPKPGGWNTGGSRYPGQGSPGGNRYPPQGGGGWGQPHGGGWGQPHGGGWGQPHGGGWGQPHGGGWGQGGGTHSQWNKPSKPKTNMKHMAGAAAAGAVVGGLGGYMLGSAMSRPIIHFGSDYEDRYYRENMHRYPNQVYYRPMDEYSNQNNFVHDCVNITIKQHTVTTTTKGENFTETDVKMMERVVEQMCITQ

SEQ ID NO: 36051 - DNA, 504 bp, Artificial Sequence
  derived and/or modified sequence
atgcccatgaagcccccacgctgcaccaggaccagccgcagcagctgcagcaggaccaccctgcggcctgctgccagccccaacaccaccagcagccggggccagacagtgcaccccccctgcagcagcaagctgaggatggaccccaccccagcctggccagccagctgtgaggccctgatgggccccagcagcagcgctggccctgcccggctgcggctgcccccaagaagacacagcagcctgcccccaagaagagccagcttcctgattgtgtcccgggccagcaagtcctgggagtgtgccggccctgtgcctgccctgcctggaggagtggtggccgtgcccaccagccagcaggacccccagtgccggggcagccaggtggcccaccggcgctgcctgagccgggccatcctgcagagcggcccccagtgccagagctgcctgagcatctgggtgaccagcgcccggagccgggtgcaggccagcagccgctcctag

SEQ ID NO: 36052 - DNA, 426 bp, Artificial Sequence
  derived and/or modified sequence
atgagcagccccccccacagcggccagacagtgcaccccccctgcagcagcaagctgaggatggaccccaccccagcctggccagccagctgtgaggccctgatgggccccagcagcagcgctggccctgcccggctgcggctgcccccaagaagacacagcagcctgcccccaagaagagccagcttcctgattgtgtcccgggccagcaagtcctgggagtgtgccggccctgtgcctgccctgcctggaggagtggtggccgtgcccaccagccagcaggacccccagtgccggggcagccaggtggcccaccggcgctgcctgagccgggccatcctgcagagcggcccccagtgccagagctgcctgagcatctgggtgaccagcgcccggagccgggtgcaggccagcagccgctcctag

SEQ ID NO: 36053 - DNA, 762 bp, Artificial Sequence
  derived and/or modified sequence
atggccaatctggggtgttggatgcttgtgctgttcgtggccacttggagcgacctcggactgtgcaaaaaacgcccaaagcccgggggctggaacacggggggatcaagataccctggccagggaagtcctggaggtaaccgctacccaccacagggcgggggagggtggggacagccgcacggtggtggctggggccagccccacgggggcggctgggggcaacctcacgggggcggctggggccagcctcacggtggcggttgggggcagggcggagggacacattcgcagtggaacaagccctcaaagccaaagaccaatatgaaacacatggcaggcgccgctgctgcgggcgctgtcgtcggcggcctgggcggctacatgttgggttctgccatgtctcgaccaataattcattttgggtcggattacgaggatcgctattaccgggagaacatgcacagataccctaatcaagtgtattaccggccgatggatgagtattccaatcagaataatttcgtccacgattgcgtaaatatcactataaagcagcacactgtgactactactacaaaaggggagaattttaccgagacagatgtcaagatgatggaaagagtcgttgagcaaatgtgcatcacacagtatgaaagagaatcgcaggcctactaccaaaggggtagcagcatggtgctgtttagcagtccccccgtcatcctgctgatttcttttctcatcttcctcatcgtgggatag

SEQ ID NO: 36054 - DNA, 750 bp, Artificial Sequence
  derived and/or modified sequence
atggccaacctgggctgctggatgctggtgcttttcgtcgcaacctggtcagatttggggctgtgtaagaagcgccccaaaccgggagggtggaataccggcgggtcaagatacccaggccaggggagccccggcggcaaccggtatccaccgcaaggaggcggagggtggggacaaccacacggaggcgggtggggccagcctcacggaggcggctggggccagccgcacggtggcggttgggggcagccccacggtggtggatgggggcaggggggcgggactcattctcaatggaacaagcccagtaagccgaaaactaacatgaagcatatggcgggggccgctgccgcgggggctgttgtgggggggctgggcgggtacatgttaggcagtgcaatgtcccgcccaataatccatttcggtagcgactacgaggaccggtattatagagaaaatatgcaccggtatcccaatcaagtgtactatagacccatggacgagtacagcaaccagaacaactttgtccatgattgcgttaatatcaccatcaagcagcacacagtgactactacgactaagggagaaaattttactgagacagacgtcaagatgatggaacgcgtggtcgagcagatgtgcatcacccagtatgagcgtgagagccaagcatactatcaacgcggttcatctatggtgttgttttcctccccccccgtgattctgctgatttccttcctgattttctag

SEQ ID NO: 36055 - DNA, 762 bp, Artificial Sequence
  derived and/or modified sequence
atggcgaatttaggatgttggatgttggttttgtttgtggccacatggtccgatctggggctatgtaagaagcggccaaaaccgggcggttggaatacaggtggcagccgataccctggacaagggtctcccggaggaaatagatatcctcctcagggcggaggcgggtgggggcaacctcacggaggggggtggggacagcctcatggggggggctggggacagccacatgggggtggatggggacagcctcacggaggagggtggggccaaggcggcggaacccacagtcagtggaataaaccaagtaagcccaaaaccaacatgaaacacatggcaggcgccgcggccgccggtgctgttgtgggcggcctgggcggctacatgctgggctctgccatgagtcggcccattatccactttggcagcgattatgaggatcgctattaccgggagaacatgcaccgctaccctaaccaagtctactacagaccgatggacgagtacagcaatcagaataacttcgtgcatgattgtgtgaatattacaattaaacagcacaccgttacgaccacaacgaaaggcgaaaactttaccgaaaccgacgtgaagatgatggagcgcgtggtcgaacagatgtgcataacgcagtacgaacgcgaatcccaggcttactatcagcgcgggagctccatggtgctgtttagctctccaccagtcattttacttatctcattcttgatctttttgattgtgggttag

SEQ ID NO: 36056 - DNA, 579 bp, Artificial Sequence
  derived and/or modified sequence
atggaacattggggccagcctcatggaggaggttggggccagccacacggcggcggctggggacagcctcacggcggaggctggggtcagggcggcgggacccactcccaatggaataagccctctaagccaaaaactaacatgaaacatatggcaggcgccgcagctgccggtgccgtggtgggcggcctgggcgggtacatgctgggatccgctatgagcaggccaatcatacattttggctcagactatgaagaccggtactatcgcgagaacatgcaccgctatccaaatcaggtgtactacaggcccatggacgaatactcaaatcagaataactttgtccacgactgcgtcaatataactattaaacagcacaccgtcacgactacgaccaagggtgagaactttactgaaaccgatgtgaaaatgatggaaagagtggtcgagcagatgtgtatcacgcagtacgaacgcgaaagtcaggcgtattaccagcgcgggagtagcatggtcctgttttcgtctccacctgtgattttattgatctccttcttaattttccttatcgtaggttag

SEQ ID NO: 36057 - DNA, 654 bp, Artificial Sequence
  derived and/or modified sequence
atggccaacctgggctgttggatgctcgtcttatttgttgccacgtggagtgatttaggtctctgcaaaaagagacctaaacccggaggttggaatactggcgggtctaggtacccgggccagggttcaccgggcggtaaccgatacccaccgcaaggcggcggcggctggggccagcctcacggcggcggctgggggcaacctcacggggggggctggggccagcctcatggggggggctggggccagccccatggcggcgggtggggccagggcggtgggacccattctcagtggaataaaccatctaaaccaaagaccaacatgaagcatatggctggcgccgccgcagccggggccgttgtgggtgggctcgggggatatatgttgggatccgctatgtctcgacctataatccacttcgggtcagattacgaagatagatactacagggagaacatgcacaggtaccccaatcaggtctattatcgccccatggacgagtacagcaaccagaataacttcgttcatgattgcgttaatattactatcaagcaacacactgtgacaacaacgacgaagggagagaatttcaccgagaccgatgtaaaaatgatggaaagagtggttgaacagatgtgtattacccaatag

SEQ ID NO: 36058 - DNA, 762 bp, Artificial Sequence
  derived and/or modified sequence
atggccaacctgggctgctggatgctggtgctgtttgtggccacctggagcgacctgggcctgtgcaagaagaggcccaagccaggcggctggaacacaggaggcagccgctacccaggccagggcagccctgggggcaaccgctacccaccccagggcggcggcggctggggccagccccatggaggcggctggggccagccccatggaggcggctggggccagccccatggaggcggctggggccagccccatggaggcggctggggccagggcggcggcacccacagccagtggaacaagcccagcaagcccaagaccaacatgaagcacatggccggggctgctgctgctggagctgtggtgggcggcctgggcggctacatgctgggcagcgccatgagccggcccatcatccactttggaagtgactatgaggaccgctactaccgggagaacatgcaccgctaccccaaccaggtgtactaccggcccatggatgagtacagcaaccagaacaactttgtgcatgactgtgtgaacatcaccatcaagcagcacacagtgaccaccaccaccaagggggagaacttcacagaaacagatgtgaagatgatggagcgggtggtggagcagatgtgcatcacccagtatgaaagagagagccaggcctactaccagaggggcagctccatggtgctcttcagcagcccccctgtgatcctgctgatctccttcctgatcttcctgattgtgggctag

SEQ ID NO: 36059 - DNA, 750 bp, Artificial Sequence
  derived and/or modified sequence
atggccaacctgggctgctggatgctggtgctgtttgtggccacctggagcgacctgggcctgtgcaagaagaggcccaagccaggcggctggaacacaggaggcagccgctacccaggccagggcagccctgggggcaaccgctacccaccccagggcggcggcggctggggccagccccatggaggcggctggggccagccccatggaggcggctggggccagccccatggaggcggctggggccagccccatggaggcggctggggccagggcggcggcacccacagccagtggaacaagcccagcaagcccaagaccaacatgaagcacatggccggggctgctgctgctggagctgtggtgggcggcctgggcggctacatgctgggcagcgccatgagccggcccatcatccactttggaagtgactatgaggaccgctactaccgggagaacatgcaccgctaccccaaccaggtgtactaccggcccatggatgagtacagcaaccagaacaactttgtgcatgactgtgtgaacatcaccatcaagcagcacacagtgaccaccaccaccaagggggagaacttcacagaaacagatgtgaagatgatggagcgggtggtggagcagatgtgcatcacccagtatgaaagagagagccaggcctactaccagaggggcagctccatggtgctcttcagcagcccccctgtgatcctgctgatctccttcctgatcttctag

SEQ ID NO: 36060 - DNA, 579 bp, Artificial Sequence
  derived and/or modified sequence
atggagcactggggccagccccacggcggcggctggggccagccccacggcggcggctggggccagccccacggcggcggctggggccagggcggcggcacccacagccagtggaacaagcccagcaagcccaagaccaacatgaagcacatggccggggctgctgctgctggagctgtggtgggcggcctgggcggctacatgctgggcagcgccatgagccggcccatcatccacttcggcagtgactatgaagatcgctactaccgggagaacatgcaccgctaccccaaccaggtgtactaccggcccatggatgagtacagcaaccagaacaactttgtgcatgactgtgtgaacatcaccatcaagcagcacacagtgaccaccaccaccaagggggagaacttcacagaaacagatgtgaagatgatggagcgggtggtggagcagatgtgcatcacccagtatgagcgggagagccaggcctactaccagaggggcagctccatggtgctcttcagcagcccccctgtgatcctgctgatctccttcctgatcttcctgattgtgggctag

SEQ ID NO: 36061 - DNA, 654 bp, Artificial Sequence
  derived and/or modified sequence
atggccaacctgggctgctggatgctggtgctgtttgtggccacctggagcgacctgggcctgtgcaagaagaggcccaagccaggcggctggaacacaggaggcagccgctacccaggccagggcagccctgggggcaaccgctacccaccccagggcggcggcggctggggccagccccatggaggcggctggggccagccccatggaggcggctggggccagccccatggaggcggctggggccagccccatggaggcggctggggccagggcggcggcacccacagccagtggaacaagcccagcaagcccaagaccaacatgaagcacatggccggggctgctgctgctggagctgtggtgggcggcctgggcggctacatgctgggcagcgccatgagccggcccatcatccactttggaagtgactatgaggaccgctactaccgggagaacatgcaccgctaccccaaccaggtgtactaccggcccatggatgagtacagcaaccagaacaactttgtgcatgactgtgtgaacatcaccatcaagcagcacacagtgaccaccaccaccaagggggagaacttcacagaaacagatgtgaagatgatggagcgggtggtggagcagatgtgcatcacccagtag

SEQ ID NO: 36062 - DNA, 762 bp, Artificial Sequence
  derived and/or modified sequence
atggccaacctgggctgctggatgctggtgctgttcgtggccacctggtctgatttaggcttgtgcaaaaaacggcccaaaccaggcggctggaacacaggcggaagccgctaccctggacagggatcccccggggggaataggtatcctcctcaagggggaggaggctggggccagccacatggcggcgggtgggggcaaccccacggtggcggctggggccagccgcacgggggaggatggggccagccccatggcgggggctggggtcaggggggaggaactcactcacaatggaataaaccatctaagcccaaaaccaatatgaagcacatggctggagccgctgccgccggagctgttgtgggagggctcggtggatacatgctggggagcgccatgtcccgacccattatccacttcggaagtgactatgaggacagatactatcgggagaacatgcatagatacccaaaccaggtgtactatcggccaatggacgaatactccaaccagaacaactttgtgcacgattgtgtgaacattactatcaagcaacacaccgtgactactacgacaaaaggggaaaacttcactgagaccgacgttaaaatgatggaacgcgtggtcgagcagatgtgtatcactcaatatgagagggagagccaggcatactatcagagagggagctcaatggtgctttttagctctcctcctgtgatcctcctgatatcatttctgattttcctgatagtcggctag

SEQ ID NO: 36063 - DNA, 750 bp, Artificial Sequence
  derived and/or modified sequence
atggccaacctgggctgctggatgctggtgctgttcgtggccacctggagtgatctgggtctgtgtaaaaagcggccaaaacctggcggatggaatactggagggtccagataccccggacagggatcaccgggtggcaacaggtaccctccacaggggggcggtggatggggacagccacacggtggaggatggggccagccccacggggggggatggggccagccacacggaggggggtggggacagcctcacgggggcggctgggggcagggcggggggacccacagccagtggaacaagccttcaaaacccaaaactaacatgaaacacatggctggcgccgccgccgctggcgctgtggttggcggactggggggttatatgctggggtctgcgatgtctcgccccatcattcacttcgggagtgattacgaggaccgatattaccgtgaaaacatgcatcggtaccctaatcaggtttattaccgccccatggatgagtattctaaccaaaacaacttcgtccacgactgtgtgaatattactattaaacaacacacagtgactacaactaccaagggggagaatttcacggaaaccgacgtgaaaatgatggagcgtgtggtagaacaaatgtgtatcactcagtatgagcgtgagtcacaggcgtactatcaacgaggctcaagcatggttctgttttcaagtccgccagtcatcctgctgatctcatttttgattttttag

SEQ ID NO: 36064 - DNA, 762 bp, Artificial Sequence
  derived and/or modified sequence
atggccaacctgggctgctggatgctggtgctgttcgtggccacctggagcgacctcggattgtgcaagaaaaggcccaaaccaggcggatggaacaccggaggaagccggtatcctggccagggaagcccaggcgggaacagataccccccccaggggggaggaggatgggggcagccccacggagggggttggggacagccacacgggggtggatggggacagcctcacggcggcgggtgggggcagccccatggcggaggctggggacagggtggagggacacatagtcaatggaacaagcctagcaagcccaagacgaatatgaagcacatggccggggcagccgccgccggcgcggtggtggggggtttgggtggctatatgttagggagtgccatgtcacgaccaatcatccacttcggtagtgactatgaggacaggtactaccgggaaaatatgcataggtatcccaaccaggtgtattaccggcccatggatgaatactccaatcagaacaacttcgtgcacgattgtgtcaatatcactatcaagcaacataccgtaaccaccacgaccaaaggggagaattttacggagacggatgttaagatgatggagcgtgtcgtcgagcagatgtgcataacacagtacgaacgggagtctcaggcgtattatcagcgcggatccagcatggtgctcttcagctcccctcccgtgattctgctcatcagcttcctcatctttctgattgtgggatag

SEQ ID NO: 36065 - DNA, 579 bp, Artificial Sequence
  derived and/or modified sequence
atggagcactggggccagccccacggcggcggctggggccagccccacggcggaggctgggggcaaccacatgggggtggatgggggcagggtggtgggacacatagccagtggaataagcctagtaaacctaaaacaaatatgaaacacatggctggggctgcggcagccggggccgtggtggggggccttgggggatatatgcttgggtccgcgatgtcacgacctatcattcactttggtagcgactatgaagacaggtactaccgggagaacatgcatcggtatccgaatcaagtgtattaccggcccatggacgagtatagcaaccagaataatttcgtacacgactgcgtgaatatcacaatcaaacaacacaccgtaactactacaaccaaaggggagaacttcactgagacagatgtgaagatgatggaaagggtggtggaacaaatgtgcattacccaatacgagcgtgagagccaggcctactaccaaaggggatccagtatggtgctgttcagctcaccgcctgttatcttactaatttctttcctgatctttctgatcgtgggctag

SEQ ID NO: 36066 - DNA, 654 bp, Artificial Sequence
  derived and/or modified sequence
atggccaacctgggctgctggatgctggtgctgttcgtggccacctggagcgacctgggcctttgcaagaagcgccctaagccaggcggatggaacacaggaggtagccgctaccccgggcagggatcacctggcggtaacaggtatcctccacaaggtggtgggggatgggggcaaccacatggtggcgggtggggacagcctcatggaggcggttggggtcagccacacggtgggggatggggacagccgcatgggggcggatgggggcagggcggcgggactcacagccaatggaataagccatccaagcctaaaacaaacatgaagcacatggctggagctgccgcagccggcgctgtggtcggcgggctcggaggatacatgctgggtagcgccatgtcccggccgattattcattttggaagcgattatgaggaccggtactatcgcgagaatatgcacagatacccaaaccaggtatactacaggcctatggacgaatactctaatcagaacaattttgttcacgattgcgtgaacatcacaatcaagcaacataccgttaccacaaccactaaaggcgagaacttcacggagacagacgtgaagatgatggagagggtggtggagcagatgtgtattacgcagtag

SEQ ID NO: 36067 - DNA, 2657 bp, Artificial Sequence
  derived and/or modified sequence
gaatctcaactcgttttttccggtgactcattcccggccctgcttggcagcgctgcaccctttaacttaaacctcggccggccgcccgccgggggcacagagtgtgcgccgggccgcgcggcaattggtccccgcgccgacctccgcccgcgagcgccgccgcttcccttccccgccccgcgtccctccccctcggccccgcgcgtcgcctgtcctccgagccagtcgctgacagccgcggcgccgcgagcttctcctctcctcacgaccgaggcagagcagtcattatggcgaaccttggctgctggatgctggttctctttgtggccacatggagtgacctgggcctctgcaagaagcgcccgaagcctggaggatggaacactgggggcagccgatacccggggcagggcagccctggaggcaaccgctacccacctcagggcggtggtggctgggggcagcctcatggtggtggctgggggcagcctcatggtggtggctgggggcagccccatggtggtggctggggacagcctcatggtggtggctggggtcaaggaggtggcacccacagtcagtggaacaagccgagtaagccaaaaaccaacatgaagcacatggctggtgctgcagcagctggggcagtggtggggggccttggcggctacatgctgggaagtgccatgagcaggcccatcatacatttcggcagtgactatgaggaccgttactatcgtgaaaacatgcaccgttaccccaaccaagtgtactacaggcccatggatgagtacagcaaccagaacaactttgtgcacgactgcgtcaatatcacaatcaagcagcacacggtcaccacaaccaccaagggggagaacttcaccgagaccgacgttaagatgatggagcgcgtggttgagcagatgtgtatcacccagtacgagagggaatctcaggcctattaccagagaggatcgagcatggtcctcttctcctctccacctgtgatcctcctgatctctttcctcatcttcctgatagtgggatgaggaaggtcttcctgttttcaccatctttctaatctttttccagcttgagggaggcggtatccacctgcagcccttttagtggtggtgtctcactctttcttctctctttgtcccggataggctaatcaatacccttggcactgatgggcactggaaaacatagagtagacctgagatgctggtcaagccccctttgattgagttcatcatgagccgttgctaatgccaggccagtaaaagtataacagcaaataaccattggttaatctggacttatttttggacttagtgcaacaggttgaggctaaaacaaatctcagaacagtctgaaatacctttgcctggatacctctggctccttcagcagctagagctcagtatactaatgccctatcttagtagagatttcatagctatttagagatattttccattttaagaaaacccgacaacatttctgccaggtttgttaggaggccacatgatacttattcaaaaaaatcctagagattcttagctcttgggatgcaggctcagcccgctggagcatgagctctgtgtgtaccgagaactggggtgatgttttacttttcacagtatgggctacacagcagctgttcaacaagagtaaatattgtcacaacactgaacctctggctagaggacatattcacagtgaacataactgtaacatatatgaaaggcttctgggacttgaaatcaaatgtttgggaatggtgcccttggaggcaacctcccattttagatgtttaaaggaccctatatgtggcattcctttctttaaactataggtaattaaggcagctgaaaagtaaattgccttctagacactgaaggcaaatctcctttgtccatttacctggaaaccagaatgattttgacatacaggagagctgcagttgtgaaagcaccatcatcatagaggatgatgtaattaaaaaatggtcagtgtgcaaagaaaagaactgcttgcatttctttatttctgtctcataattgtcaaaaaccagaattaggtcaagttcatagtttctgtaattggcttttgaatcaaagaatagggagacaatctaaaaaatatcttaggttggagatgacagaaatatgattgatttgaagtggaaaaagaaattctgttaatgttaattaaagtaaaattattccctgaattgtttgatattgtcacctagcagatatgtattacttttctgcaatgttattattggcttgcactttgtgagtattctatgtaaaaatatatatgtatataaaatatatattgcataggacagacttaggagttttgtttagagcagttaacatctgaagtgtctaatgcattaacttttgtaaggtactgaatacttaatatgtgggaaacccttttgcgtggtccttaggcttacaatgtgcactgaatcgtttcatgtaagaatccaaagtggacaccattaacaggtctttgaaatatgcatgtactttatattttctatatttgtaactttgcatgttcttgttttgttatataaaaaaattgtaaatgtttaatatctgactgaaattaaacgagcgaagatgagcaccacc

SEQ ID NO: 36068 - DNA, 806 bp, Artificial Sequence
  derived and/or modified sequence
agtcgctgacagccgcggcgccgcgagcttctcctctcctcacgaccgaggcagtcattatggcgaaccttggctgctggatgctggttctctttgtggccacatggagtgacctgggcctctgcaagaagcgcccgaagcctggaggatggaacactgggggcagccgatacccggggcagggcagccctggaggcaaccgctacccacctcagggcggtggtggctgggggcagcctcatggtggtggctgggggcagcctcatggtggtggctgggggcagccccatggtggtggctggggacagcctcatggtggtggctggggtcaaggaggtggcacccacagtcagtggaacaagccgagtaagccaaaaaccaacatgaagcacatggctggtgctgcagcagctggggcagtggtggggggccttggcggctacatgctgggaagtgccatgagcaggcccatcatacatttcggcagtgactatgaggaccgttactatcgtgaaaacatgcaccgttaccccaaccaagtgtactacaggcccatggatgagtacagcaaccagaacaactttgtgcacgactgcgtcaatatcacaatcaagcagcacacggtcaccacaaccaccaagggggagaacttcaccgagaccgacgttaagatgatggagcgcgtggttgagcagatgtgtatcacccagtacgagagggaatctcaggcctattaccagagaggatcgagcatggtcctcttctcctctccacctgtgatcctcctgatctctttcctcatcttc

SEQ ID NO: 36069 - DNA, 762 bp, Artificial Sequence
  derived and/or modified sequence
atggcgaatctgggctgctggatgctggttcttttcgttgctacatggagcgaccttggactctgtaagaaaaggcccaagcccggaggctggaatacaggagggtctaggtaccctggacaggggagtcccggaggcaaccggtatccccctcagggaggaggcggttggggccagccccacggcggaggatggggacaaccccacggagggggatggggtcaaccccacggaggaggatggggacaaccacatggtgggggttggggacagggaggcggaactcatagtcagtggaataagccctcaaaacctaagaccaatatgaaacatatggccggtgcagccgcagctggggcagttgttggaggacttggagggtacatgcttggctccgccatgtcgagaccaatcatccattttggcagcgactacgaagacagatactaccgggaaaacatgcatagataccccaatcaggtgtattacagacctatggacgaatattcaaatcagaacaatttcgtgcatgactgcgttaacattacaattaaacagcacaccgtgacaactactaccaagggcgaaaatttcaccgaaacagacgttaagatgatggagagggtcgtcgaacagatgtgcatcactcagtatgaaagagagagccaggcatattatcagaggggatcctcaatggtgctgttttcttcccctccggtgatcctcctgatctcatttctcatttttctcattgtaggttag

SEQ ID NO: 36070 - DNA, 750 bp, Artificial Sequence
  derived and/or modified sequence
atggcgaaccttggatgttggatgttggtcctcttcgtggccacatggagtgaccttggtctgtgtaagaaacgccctaagcccggaggctggaacacaggcggaagtaggtatcccggacagggatcccccggtggaaacagatacccaccccagggtggaggcggatggggccaaccccatggcggagggtggggccaaccgcatggagggggttggggccagccgcacgggggtggctggggccaacctcacggaggcggttggggccagggcggaggcacccacagccagtggaacaagccctccaaacctaaaaccaacatgaagcatatggccggtgccgctgctgccggtgccgtggtggggggattgggagggtacatgctcggctctgctatgtcccgccctatcattcacttcggcagcgactatgaggacagatattatcgggagaacatgcataggtatcccaaccaggtgtattatagacccatggatgagtacagcaatcaaaataatttcgtgcatgactgcgtgaatatcacgattaagcagcacacagtcactactacaaccaaaggtgaaaacttcactgagactgatgtcaaaatgatggaacgggttgtggagcagatgtgcataacccagtacgaacgggagtcccaggcttattatcaacgaggaagtagtatggtcctattcagctcccctcccgtgatccttctcatctccttcttgatcttttag

SEQ ID NO: 36071 - DNA, 762 bp, Artificial Sequence
  derived and/or modified sequence
atggctaacttaggatgctggatgctggtcctcttcgtggcaacgtggagcgacctggggctctgtaagaagcgccctaagcctggaggctggaacacagggggaagccgctaccccggacaaggcagccctggcggaaacagatatccacctcaggggggaggcggatggggccagccacacggcggaggctgggggcaaccccacggagggggttggggacagcctcatggtgggggatggggccagcctcatggaggcggatgggggcaggggggaggtactcatagccagtggaacaaaccctctaaaccaaagacaaatatgaagcacatggcaggggctgccgcagccggtgcagtggtgggcggactgggaggatacatgctcggaagtgccatgtcaagacccatcattcatttcggtagtgactacgaggaccgctattatcgtgagaacatgcacaggtaccccaatcaggtgtactatcgccctatggacgagtactccaaccagaacaactttgtccacgactgcgtcaatatcacaatcaagcagcatactgtcactacaacaacaaaaggcgaaaattttaccgagactgatgtgaagatgatggagagagtcgtggagcaaatgtgcatcacccaatatgaaagggagtcacaggcatattaccagcggggatccagcatggtccttttttcttcccctcctgtcatcctgctgatatcctttttgattttcctgattgtggggtag

SEQ ID NO: 36072 - DNA, 579 bp, Artificial Sequence
  derived and/or modified sequence
atggaacattgggggcagcctcacggcggaggttggggccagccgcacggaggaggatggggccagccacacggcggtggctggggccagggtggtggcacccacagccagtggaacaagcccagcaagcccaagaccaatatgaaacacatggcaggcgcagccgcagccggagcggtggtcgggggactgggcggatacatgctggggtcagctatgagtcgcccaatcattcacttcgggtcagactatgaggatcgctattaccgggagaatatgcaccgatacccaaatcaggtatattatcgacccatggatgaatatagcaatcagaataacttcgtgcacgactgtgtcaacattactataaaacagcacacagtcacaactactaccaaaggcgaaaattttactgagactgatgtgaagatgatggaaagagtcgtggagcagatgtgcatcacacagtacgaacgcgagagccaggcatattaccagcggggaagttctatggtactcttttcttcgccccctgtcatccttctgatctcctttctgatattcctcatcgtcgggtag

SEQ ID NO: 36073 - DNA, 654 bp, Artificial Sequence
  derived and/or modified sequence
atggccaacttgggctgctggatgctcgttttgtttgtggcaacctggtcggatctgggcctgtgcaagaaacggccaaagcccggaggctggaacaccggcggatcccggtatccaggccaaggcagcccgggaggcaacagatatccaccccagggagggggtggatggggtcagccacacggaggcggatggggacagccccatggaggcggttggggccagcctcatggcggaggttggggccaaccccatggcggaggctggggacaaggcggtggcacccacagtcagtggaataaaccttcaaaacccaagaccaatatgaagcacatggcgggagctgccgctgccggagcagtcgtgggagggttaggcggttatatgctgggatctgccatgtcccggcctatcattcactttggaagtgactacgaagacaggtattacagagagaacatgcaccgctaccctaaccaggtgtactaccgaccaatggatgaatatagcaaccagaacaactttgtccacgactgcgtaaatatcacaattaaacagcacaccgtaacaaccaccactaagggtgaaaatttcactgaaaccgacgtcaaaatgatggagagggtggtcgaacagatgtgtattacacagtag

SEQ ID NO: 36074 - DNA, 2539 bp, Artificial Sequence
  derived and/or modified sequence
cgcgcggcaattggtccccgcgccgacctccgcccgcgagcgccgccgcttcccttccccgccccgcgtccctccccctcggccccgcgcgtcgcctgtcctccgagccagtcgctgacagccgcggcgccgcgagcttctcctctcctcacgaccgagagcagtcattatggcgaaccttggctgctggatgctggttctctttgtggccacatggagtgacctgggcctctgcaagaagcgcccgaagcctggaggatggaacactgggggcagccgatacccggggcagggcagccctggaggcaaccgctacccacctcagggcggtggtggctgggggcagcctcatggtggtggctgggggcagcctcatggtggtggctgggggcagccccatggtggtggctggggacagcctcatggtggtggctggggtcaaggaggtggcacccacagtcagtggaacaagccgagtaagccaaaaaccaacatgaagcacatggctggtgctgcagcagctggggcagtggtggggggccttggcggctacatgctgggaagtgccatgagcaggcccatcatacatttcggcagtgactatgaggaccgttactatcgtgaaaacatgcaccgttaccccaaccaagtgtactacaggcccatggatgagtacagcaaccagaacaactttgtgcacgactgcgtcaatatcacaatcaagcagcacacggtcaccacaaccaccaagggggagaacttcaccgagaccgacgttaagatgatggagcgcgtggttgagcagatgtgtatcacccagtacgagagggaatctcaggcctattaccagagaggatcgagcatggtcctcttctcctctccacctgtgatcctcctgatctctttcctcatcttcctgatagtgggatgaggaaggtcttcctgttttcaccatctttctaatctttttccagcttgagggaggcggtatccacctgcagcccttttagtggtggtgtctcactctttcttctctctttgtcccggataggctaatcaatacccttggcactgatgggcactggaaaacatagagtagacctgagatgctggtcaagccccctttgattgagttcatcatgagccgttgctaatgccaggccagtaaaagtataacagcaaataaccattggttaatctggacttatttttggacttagtgcaacaggttgaggctaaaacaaatctcagaacagtctgaaatacctttgcctggatacctctggctccttcagcagctagagctcagtatactaatgccctatcttagtagagatttcatagctatttagagatattttccattttaagaaaacccgacaacatttctgccaggtttgttaggaggccacatgatacttattcaaaaaaatcctagagattcttagctcttgggatgcaggctcagcccgctggagcatgagctctgtgtgtaccgagaactggggtgatgttttacttttcacagtatgggctacacagcagctgttcaacaagagtaaatattgtcacaacactgaacctctggctagaggacatattcacagtgaacataactgtaacatatatgaaaggcttctgggacttgaaatcaaatgtttgggaatggtgcccttggaggcaacctcccattttagatgtttaaaggaccctatatgtggcattcctttctttaaactataggtaattaaggcagctgaaaagtaaattgccttctagacactgaaggcaaatctcctttgtccatttacctggaaaccagaatgattttgacatacaggagagctgcagttgtgaaagcaccatcatcatagaggatgatgtaattaaaaaatggtcagtgtgcaaagaaaagaactgcttgcatttctttatttctgtctcataattgtcaaaaaccagaattaggtcaagttcatagtttctgtaattggcttttgaatcaaagaatagggagacaatctaaaaaatatcttaggttggagatgacagaaatatgattgatttgaagtggaaaaagaaattctgttaatgttaattaaagtaaaattattccctgaattgtttgatattgtcacctagcagatatgtattacttttctgcaatgttattattggcttgcactttgtgagtattctatgtaaaaatatatatgtatataaaatatatattgcataggacagacttaggagttttgtttagagcagttaacatctgaagtgtctaatgcattaacttttgtaaggtactgaatacttaatatgtgggaaacccttttgcgtggtccttaggcttacaatgtgcactgaatcgtttcatgtaagaatccaaagtggacaccattaacaggtctttgaaatatgcatgtactttatattttctatatttgtaactttgcatgttcttgttttgttatataaaaaaattgtaaatgtttaatatctgactgaaattaaacgagcgaagatgagcaccacc

SEQ ID NO: 36075 - DNA, 1431 bp, Artificial Sequence
  derived and/or modified sequence
agtcgctgacagccgcggcgccgcgagcttctcctctcctcacgaccgaggcagagcagtcattatggcgaaccttggctgctggatgctggttctctttgtggccacatggagtgacctgggcctctgcaagaagcgcccgaagcctggaggatggaacactgggggcagcctcatggtggtggctgggggcagccccatggtggtggctggggacagcctcatggtggtggctggggtcaaggaggtggcacccacagtcagtggaacaagccgagtaagccaaaaaccaacatgaagcacatggctggtgctgcagcagctggggcagtggtggggggccttggcggctacatgctgggaagtgccatgagcaggcccatcatacatttcggcagtgactatgaggaccgttactatcgtgaaaacatgcaccgttaccccaaccaagtgtactacaggcccatggatgagtacagcaaccagaacaactttgtgcacgactgcgtcaatatcacaatcaagcagcacacggtcaccacaaccaccaagggggagaacttcaccgagaccgacgttaagatgatggagcgcgtggttgagcagatgtgtatcacccagtacgagagggaatctcaggcctattaccagagaggatcgagcatggtcctcttctcctctccacctgtgatcctcctgatctctttcctcatcttcctgatagtgggatgaggaaggtcttcctgttttcaccatctttctaatctttttccagcttgagggaggcggtatccacctgcagcccttttagtggtggtgtctcactctttcttctctctttgtcccggataggctaatcaatacccttggcactgatgggcactggaaaacatagagtagacctgagatgctggtcaagccccctttgattgagttcatcatgagccgttgctaatgccaggccagtaaaagtataacagcaaataaccattggttaatctggacttatttttggacttagtgcaacaggttgaggctaaaacaaatctcagaacagtctgaaatacctttgcctggatacctctggctccttcagcagctagagctcagtatactaatgccctatcttagtagagatttcatagctatttagagatattttccattttaagaaaacccgacaacatttctgccaggtttgttaggaggccacatgatacttattcaaaaaaatcctagagattcttagctcttgggatgcaggctcagcccgctggagcatgagctctgtgtgtaccgagaactggggtgatgttttacttttcacagtatgggctacacagcagctgttcaacaagagtaaatattgtcacaacactgaacctctggctagaggacatattcacagtgaacataactgtaacatatatg

SEQ ID NO: 36076 - DNA, 855 bp, Artificial Sequence
  derived and/or modified sequence
gggggcaggggagccgcgggggccgagtgaggaccccgggcctcgggtcccaggcgcaagggtgcccggccgggcggggtcgggaccccagtgaggaggggccgggggctgccccgcgggcgcgtgacgcgtctcgggcctgcccggctgcgctggtctccgctcgggtgaggcggcttggcttcgcttttcagagcagtcattatggcgaaccttggctgctggatgctggttctctttgtggccacatggagtgacctgggcctctgcaagaagcgcccgaagcctggaggatggaacactgggggcagccgatacccggggcagggcagccctggaggcaaccgctacccacctcagggcggtggtggctgggggcagcctcatggtggtggctgggggcagcctcatggtggtggctgggggcagccccatggtggtggctggggacagcctcatggtggtggctggggtcaaggaggtggcacccacagtcagtggaacaagccgagtaagccaaaaaccaacatgaagcacatggctggtgctgcagcagctggggcagtggtggggggccttggcggctacatgctgggaagtgccatgagcaggcccatcatacatttcggcagtgactatgaggaccgttactatcgtgaaaacatgcaccgttaccccaaccaagtgtactacaggcccatggatgagtacagcaaccagaacaactttgtgcacgactgcgtcaatatcacaatcaagcagcacacggtcaccacaaccaccaagggggagaacttcaccgagaccgacgttaagatgatggagcgcgtggttgagcagatgtgtatcacccag

SEQ ID NO: 36077 - DNA, 762 bp, Artificial Sequence
  derived and/or modified sequence
atggccaacctgggctgctggatgctggtgctgttcgtggccacctggagcgacctgggcctgtgcaagaagagacccaagcccggcggctggaacaccggcggcagcagataccccggccagggcagccccggcggcaacagataccccccccagggcggcggcggctggggccagccccacggcggcggctggggccagccccacggcggcggctggggccagccccacggcggcggctggggccagccccacggcggcggctggggccagggcggcggcacccacagccagtggaacaagcccagcaagcccaagaccaacatgaagcacatggccggcgccgccgccgccggcgccgtggtgggcggcctgggcggctacatgctgggcagcgccatgagcagacccatcatccacttcggcagcgactacgaggacagatactacagagagaacatgcacagataccccaaccaggtgtactacagacccatggacgagtacagcaaccagaacaacttcgtgcacgactgcgtgaacatcaccatcaagcagcacaccgtgaccaccaccaccaagggcgagaacttcaccgagaccgacgtgaagatgatggagagagtggtggagcagatgtgcatcacccagtacgagagagagagccaggcctactaccagagaggcagcagcatggtgctgttcagcagcccccccgtgatcctgctgatcagcttcctgatcttcctgatcgtgggctag

SEQ ID NO: 36078 - DNA, 750 bp, Artificial Sequence
  derived and/or modified sequence
atggccaacctgggctgctggatgctggtgctgttcgtggccacctggagcgacctgggcctgtgcaagaagagacccaagcccggcggctggaacaccggcggcagcagataccccggccagggcagccccggcggcaacagataccccccccagggcggcggcggctggggccagccccacggcggcggctggggccagccccacggcggcggctggggccagccccacggcggcggctggggccagccccacggcggcggctggggccagggcggcggcacccacagccagtggaacaagcccagcaagcccaagaccaacatgaagcacatggccggcgccgccgccgccggcgccgtggtgggcggcctgggcggctacatgctgggcagcgccatgagcagacccatcatccacttcggcagcgactacgaggacagatactacagagagaacatgcacagataccccaaccaggtgtactacagacccatggacgagtacagcaaccagaacaacttcgtgcacgactgcgtgaacatcaccatcaagcagcacaccgtgaccaccaccaccaagggcgagaacttcaccgagaccgacgtgaagatgatggagagagtggtggagcagatgtgcatcacccagtacgagagagagagccaggcctactaccagagaggcagcagcatggtgctgttcagcagcccccccgtgatcctgctgatcagcttcctgatcttctag

SEQ ID NO: 36079 - DNA, 579 bp, Artificial Sequence
  derived and/or modified sequence
atggagcactggggccagccccacggcggcggctggggccagccccacggcggcggctggggccagccccacggcggcggctggggccagggcggcggcacccacagccagtggaacaagcccagcaagcccaagaccaacatgaagcacatggccggcgccgccgccgccggcgccgtggtgggcggcctgggcggctacatgctgggcagcgccatgagcagacccatcatccacttcggcagcgactacgaggacagatactacagagagaacatgcacagataccccaaccaggtgtactacagacccatggacgagtacagcaaccagaacaacttcgtgcacgactgcgtgaacatcaccatcaagcagcacaccgtgaccaccaccaccaagggcgagaacttcaccgagaccgacgtgaagatgatggagagagtggtggagcagatgtgcatcacccagtacgagagagagagccaggcctactaccagagaggcagcagcatggtgctgttcagcagcccccccgtgatcctgctgatcagcttcctgatcttcctgatcgtgggctag

SEQ ID NO: 36080 - DNA, 654 bp, Artificial Sequence
  derived and/or modified sequence
atggccaacctgggctgctggatgctggtgctgttcgtggccacctggagcgacctgggcctgtgcaagaagagacccaagcccggcggctggaacaccggcggcagcagataccccggccagggcagccccggcggcaacagataccccccccagggcggcggcggctggggccagccccacggcggcggctggggccagccccacggcggcggctggggccagccccacggcggcggctggggccagccccacggcggcggctggggccagggcggcggcacccacagccagtggaacaagcccagcaagcccaagaccaacatgaagcacatggccggcgccgccgccgccggcgccgtggtgggcggcctgggcggctacatgctgggcagcgccatgagcagacccatcatccacttcggcagcgactacgaggacagatactacagagagaacatgcacagataccccaaccaggtgtactacagacccatggacgagtacagcaaccagaacaacttcgtgcacgactgcgtgaacatcaccatcaagcagcacaccgtgaccaccaccaccaagggcgagaacttcaccgagaccgacgtgaagatgatggagagagtggtggagcagatgtgcatcacccagtag

SEQ ID NO: 36081 - protein, 538 aa, Artificial Sequence
  derived and/or modified sequence
MEGGRRARVVIESKRNFFLGAFPTPFPAEHVELGRLGDSETAMVPGKGGADYILLPFKKMDFSRNLYDIGEQLDSEDLASLKFLSLDYIPQRKQEPIKDALMLFQRLQEKRMLEESNLSFLKELLFRINRLDLLITYLNTRKEEMERELQTPGRAQISAYRVMLYQISEEVSRSELRSFKFLLQEEISKCKLDDDMNLLDIFIEMEKRVILGEGKLDILKRVCAQINKSLLKIINDYEEFSKERSSSLEGSPDEFSNGEELCGVMTISDSPREQDSESQTLDKVYQMKSKPRGYCLIINNHNFAKAREKVPKLHSIRDRNGTHLDAGALTTTFEELHFEIKPHDDCTVEQIYEILKIYQLMDHSNMDCFICCILSHGDKGIIYGTDGQEAPIYELTSQFTGLKCPSLAGKPKVFFIQACQGDNYQKGIPVETDSEEQPYLEMDLSSPQTRYIPDEADFLLGMATVNNCVSYRNPAEGTWYIQSLCQSLRERCPRGDDILTILTEVNYEVSNKDDKKNMGKQMPQPTFTLRKKLVFPSD

SEQ ID NO: 36082 - protein, 116 aa, Artificial Sequence
  derived and/or modified sequence
MDFSRNLYDIGEQLDSEDLASLKFLSLDYIPQRKQEPIKDALMLFQRLQEKRMLEESNLSFLKELLFRINRLDLLITYLNTRKEEMERELQTPGRAQISAYRVMLYQISEEVSRSE

SEQ ID NO: 36083 - DNA, 1617 bp, Artificial Sequence
  derived and/or modified sequence
atggagggggggagacgggctagagtggtcatcgagagcaagcgaaatttttttttgggagcctttccaaccccgtttcccgccgagcacgtggagctcggccgactgggtgactctgaaacagccatggtacctgggaagggtggggctgactacatactgctgccatttaagaagatggatttcagccgaaatctgtacgacatcggggaacagcttgatagcgaagatctggcctccctcaaatttctgtccctggattacatccctcagagaaaacaggaacctatcaaagacgcgctgatgttgttccagcgacttcaagaaaagcggatgttagaggagtcgaacctttccttcttgaaggagttgctcttccgcatcaatcgactggatctactcatcacctacctgaatacgagaaaggaggagatggagagagagttgcagacaccaggccgggcccagatctccgcatacagggtgatgctgtaccagatttctgaagaggtgagcaggtctgaacttcgaagctttaaattcctcctgcaggaggagatttcgaagtgtaaactggacgacgacatgaacttattggacatcttcatcgaaatggagaagagagtgatcctgggtgagggtaaactggatattttaaagagggtttgcgctcaaatcaataagagcctgctgaagatcattaatgactatgaagagttttctaaggagcgttcctcatcactcgagggctcacccgacgaattctcaaatggcgaagagctgtgcggtgttatgacaatcagcgactctcctcgggagcaggatagtgagtcccagactctggacaaagtttatcagatgaaaagcaagccgcggggctattgtctgattataaataatcacaactttgctaaggctcgtgaaaaggtgccaaaactgcactccattcgggaccgcaacggtacacacctggatgccggggctctgaccactacgttcgaagaactgcacttcgagattaagccacatgacgattgcacagtggagcaaatctacgagatcctgaaaatctatcaactgatggatcactctaacatggattgtttcatctgctgtattctgtctcacggcgataaaggtataatctacggcacagacggccaggaagccccaatttatgagctcaccagtcaatttacggggctaaagtgtccctcactggccggaaaaccaaaagtgtttttcatccaggcttgccagggcgacaactaccagaaaggtattcccgtcgaaaccgacagcgaagaacaaccgtatctggaaatggatctatcaagtccccagacccgatatatccccgacgaggccgactttttactcggcatggctactgtcaacaattgcgtatcctaccgcaatccggcggaaggcacctggtatatccagagtctgtgtcagtcgctacgagagcgctgcccaaggggtgatgacatcttgacaatcctaactgaggtaaattacgaagtctccaacaaggatgataaaaagaatatggggaagcagatgccgcagcccacgtttacactgcgaaaaaagttagtgttcccatctgattag

SEQ ID NO: 36084 - DNA, 1617 bp, Artificial Sequence
  derived and/or modified sequence
atggagggcggcagaagagcccgggtggtgattgagagcaagaggaacttcttcctgggcgccttccccacccccttccctgctgagcacgtggagctgggccgcctgggggacagcgagacagccatggtgcctggaaaaggaggagctgactacatcctgctgcccttcaagaagatggacttcagcaggaacctgtatgacattggagagcagctggacagcgaggacctggccagcctgaagttcctgagcctggactacatcccccagaggaagcaggagcccatcaaggatgccctgatgctgttccagaggctgcaggagaagaggatgctggaggagagcaacctgtccttcctgaaggagctgctcttccgcatcaaccggctggacctgctgatcacctacctgaacaccaggaaggaggagatggagcgggagctgcagaccccaggccgggcccagatcagcgcctacagagtgatgctgtaccagatcagcgaggaggtgagccgctctgagctgcggagcttcaagttcctgctgcaggaggagatcagcaagtgcaagctggatgatgacatgaacctgctggacatcttcatcgagatggagaagagggtcatcctgggggagggcaagctggacatcctgaagagggtgtgtgcccagatcaacaagagcctgctgaagatcatcaatgactatgaggagttcagcaaggagaggagcagcagcctggagggcagcccagatgagttcagcaatggagaggagctgtgtggggtgatgaccatcagtgacagcccccgggagcaggacagcgagagccagaccctggacaaggtgtaccagatgaagagcaagccccggggctactgcctgatcatcaacaaccacaactttgccaaggcccgggagaaggtgcccaagctgcacagcatccgggacagaaatggcacccacctggatgctggggccctgaccaccacctttgaggagctgcactttgagatcaagccccatgatgactgcaccgtggagcagatctatgagatcctgaagatctaccagctgatggaccacagcaacatggactgcttcatctgctgcatcctgagccacggggacaagggcatcatctatggaacagatggccaggaggcccccatctatgagctgaccagccagttcaccggcctgaagtgccccagcctggccggcaagcccaaggtgttcttcatccaggcctgccagggcgacaactaccagaagggcatccctgtggagacagacagcgaggagcagccctacctggagatggacctgagcagcccccagacccgctacatcccagatgaggccgacttcctgctgggcatggccaccgtgaacaactgtgtgtcctacagaaatcctgctgagggcacctggtacatccagagcctgtgccagagcctgcgggagcgctgccccagaggagatgacatcctgaccatcctgacagaggtgaactatgaggtgagcaacaaggatgacaagaagaacatgggcaagcagatgccccagcccaccttcaccctgaggaagaagctggtgttccccagcgactag

SEQ ID NO: 36085 - DNA, 1617 bp, Artificial Sequence
  derived and/or modified sequence
atggagggcggccggcgggcccgggtggtgatcgagagcaagcggaatttctttctcggtgcctttcccaccccctttccagccgagcacgtcgagctgggaagattaggtgattcggagacagctatggttcccgggaagggaggagctgactatattttgctgccattcaagaaaatggactttagccgtaatctctacgacatcggggaacagctcgattctgaggatctcgcttccctgaagtttctgtccttagattatatcccgcagagaaaacaagagccaattaaggatgccctgatgctgtttcagcgcctccaagagaagagaatgctggaggaatccaatctgtccttcctgaaggagttattgttcaggatcaacaggctagatctgttgataacttatcttaatacaaggaaggaagaaatggaaagagagctgcagaccccgggccgtgcccagattagtgcctatagagtgatgctgtatcagatctccgaagaagtatcgcgctccgaactcaggagctttaagttcctgctgcaggaggaaatctccaaatgcaagttagacgacgatatgaacctgttggacatcttcatcgaaatggagaagcgcgtgatactcggagagggaaaactcgatatcctgaaaagagtgtgcgcacagatcaacaaatctcttcttaagattataaacgactacgaagaattctctaaggagagaagctccagcctggaagggtcgcctgatgaattctctaacggggaagagctttgcggggtcatgacaatttctgactcaccgagggaacaggattccgagtcacagacactggacaaggtgtaccagatgaagtctaagccccggggctattgcttgatcatcaataaccataatttcgcaaaagcacgagaaaaggtacccaagttgcacagcatccgcgaccggaatggaacacacttagacgctggcgctctgaccaccaccttcgaggaacttcactttgagatcaagcctcatgacgactgtacagtcgaacagatttacgaaattctaaagatttaccagttgatggatcactccaacatggattgtttcatatgctgtatcctctcccatggggacaaagggatcatctacgggactgatgggcaggaagcacccatatatgagctgacgtctcagttcacaggcttgaagtgtccaagtcttgccggaaaacctaaggtatttttcattcaggcctgccagggcgacaactaccagaagggcatccccgtggagactgattctgaagagcaaccgtacctggaaatggatctgtccagcccgcagacccggtatatcccagacgaagccgacttcctcctgggcatggcgacggtgaacaattgtgtttcatacagaaaccctgccgagggaacctggtacattcaatcactgtgtcaaagcctgagagagagatgccctaggggcgacgacattctcacaattctgaccgaggttaactatgaggtctccaataaagacgataagaaaaatatgggaaagcagatgccacaaccaaccttcaccctgaggaagaagctagtattcccaagcgactag

SEQ ID NO: 36086 - DNA, 1617 bp, Artificial Sequence
  derived and/or modified sequence
atggagggtggcagacgagccagagtagtcatcgagtcgaagcgaaacttcttcctgggcgcttttcccactccatttcctgctgagcacgtcgagctggggaggttaggggattctgaaaccgccatggtgcccggtaaaggcggagctgattatatcctcctccccttcaaaaaaatggacttcagccggaatctttatgatatcggggaacaactagattcagaggatctcgcaagtctgaaatttctgagtttagactacatccctcagagaaagcaggagcccataaaggatgccctaatgctctttcagcggcttcaagagaagcggatgcttgaagaaagtaacctgtctttcctgaaggagctcctttttcgcatcaataggctggaccttctgatcacataccttaatacccgcaaggaggagatggagagagagctgcagacgcctggacgcgcacagatcagtgcctacagggtgatgttatatcagatttcagaggaggtcagtcggtccgaattgagatccttcaaatttctgctgcaggaagaaatatccaagtgcaaactggatgatgatatgaacctgctggatatctttatcgaaatggaaaaaagagtaattctgggtgagggcaaactcgatatcctgaagagggtgtgcgctcagatcaacaagtctcttcttaagattatcaacgactatgaagagttcagtaaggaaaggagcagctcgctcgaaggcagtcctgacgaattcagcaatggcgaggaactgtgcggggtaatgaccataagtgattcacctagagagcaggactcagagtcccagactctggataaagtgtaccaaatgaagagtaaaccgcgaggctactgtctgattatcaacaaccacaatttcgccaaagcccgtgaaaaggtaccgaagctacacagtattcgagatagaaatggtacccatttagatgccggtgctctgaccaccactttcgaagaactgcattttgagattaaaccccatgacgattgcactgtggagcagatttacgagattctgaagatctaccagctaatggaccactcaaacatggactgcttcatctgctgtattttgtcccatggggacaaaggcattatttacggtaccgatggacaggaggcaccaatctacgagctgacctcacagttcacagggcttaagtgtcccagtctggcgggaaagccaaaagttttctttattcaggcgtgccagggagataattatcagaagggcatcccagtcgagaccgacagtgaagaacaaccttacctcgagatggacctcagcagcccccagactaggtatattccagacgaggctgattttctactgggcatggccacagtgaacaactgtgtgtcttataggaaccctgcagaggggacttggtacattcaatcgctgtgccagtccctgagagagcgatgcccacgaggcgacgatatcctcaccatcctgactgaagtcaattacgaggtgagcaataaggatgataagaagaatatgggtaagcagatgcctcagcctacctttactcttcggaagaaactggtgttcccctcagattag

SEQ ID NO: 36087 - DNA, 2930 bp, Artificial Sequence
  derived and/or modified sequence
agtcatctctgttctgctttaggagtaaagtttaccctgcagttccttctgtggtgaagttttctctttctctcggagaccagattctgcctttctgctggagggaagtgttttcacaggttctcctccttttatcttttgtgttttttttcaagccctgctgaatttgctagtcaactcaacaggaagtgaggccatggagggaggcagaagagccagggtggttattgaaagtaaaagaaacttcttcctgggagcctttcccacccccttccctgctgagcacgtggagttaggcaggttaggggactcggagactgcgatggtgccaggaaagggtggagcggattatattctcctgccttttaaaaagatggacttcagcagaaatctttatgatattggggaacaactggacagtgaagatctggcctccctcaagttcctgagcctggactacattccgcaaaggaagcaagaacccatcaaggatgccttgatgttattccagagactccaggaaaagagaatgttggaggaaagcaatctgtccttcctgaaggagctgctcttccgaattaatagactggatttgctgattacctacctaaacactagaaaggaggagatggaaagggaacttcagacaccaggcagggctcaaatttctgcctacagggtcatgctctatcagatttcagaagaagtgagcagatcagaattgaggtcttttaagtttcttttgcaagaggaaatctccaaatgcaaactggatgatgacatgaacctgctggatattttcatagagatggagaagagggtcatcctgggagaaggaaagttggacatcctgaaaagagtctgtgcccaaatcaacaagagcctgctgaagataatcaacgactatgaagaattcagcaaagagagaagcagcagccttgaaggaagtcctgatgaattttcaaatggggaggagttgtgtggggtaatgacaatctcggactctccaagagaacaggatagtgaatcacagactttggacaaagtttaccaaatgaaaagcaaacctcggggatactgtctgatcatcaacaatcacaattttgcaaaagcacgggagaaagtgcccaaacttcacagcattagggacaggaatggaacacacttggatgcaggggctttgaccacgacctttgaagagcttcattttgagatcaagccccacgatgactgcacagtagagcaaatctatgagattttgaaaatctaccaactcatggaccacagtaacatggactgcttcatctgctgtatcctctcccatggagacaagggcatcatctatggcactgatggacaggaggcccccatctatgagctgacatctcagttcactggtttgaagtgcccttcccttgctggaaaacccaaagtgttttttattcaggcttgtcagggggataactaccagaaaggtatacctgttgagactgattcagaggagcaaccctatttagaaatggatttatcatcacctcaaacgagatatatcccggatgaggctgactttctgctggggatggccactgtgaataactgtgtttcctaccgaaaccctgcagagggaacctggtacatccagtcactttgccagagcctgagagagcgatgtcctcgaggcgatgatattctcaccatcctgactgaagtgaactatgaagtaagcaacaaggatgacaagaaaaacatggggaaacagatgcctcagcctactttcacactaagaaaaaaacttgtcttcccttctgattgatggtgctattttgtttgttttgttttgttttgtttttttgagacagaatctcgctctgtcgcccaggctggagtgcagtggcgtgatctcggctcaccgcaagctccgcctcccgggttcaggccattctcctgcctcagcctcccgagtagctgggactacaggggcccgccaccacacctggctaattttttaaaaatatttttagtagagacagggtttcactgtgttagccagggtggtcttgatctcctgacctcgtgatccacccacctcggcctcccaaagtgctgggattacaggcgtgagccaccgcgcctggccgatggtactatttagatataacactatgtttatttactaattttctagattttctactttattaattgttttgcacttttttataagagctaaagttaaataggatattaacaacaataacactgtctcctttctcttatgcttaaggctttgggaatgtttttagctggtggcaataaataccagacacgtacaaaatccagctatgaatatagagggcttatgattcagattgttatctatcaactataagcccactgttaatattctattaactttaattctctttcaaagctaaattccacactaccacattaaaaaaattagaaagtagccacgtatggtggctcatgtctataatcccagcactttgggaggttgaggtgggaggattgcttgaacccaagaggtcaaggctgcagtgagccatgttcacaccgctgcactcaagcttgggtgacagaacaagaccccgtctcaaaaaaaattttttttttaataaaacaaaatttgtttgaaatcttttaaaaattcaaatgatttttacaagttttaaataagctctccccaaacttgctttatgccttcttattgcttttatgatatatatatgcttggctaactatatttgctttttgctaacaatgctctggggtctttttatgcatttgcatttgctctttcatctctgcttggattattttaaatcattaggaattaagttatctttaaaatttaagtatcttttttcaaaaacattttttaatagaataaaatataatttgatcttatt

SEQ ID NO: 36088 - DNA, 2727 bp, Artificial Sequence
  derived and/or modified sequence
gtgctctgagtttttggtttctgtttcaccttgtgtctgagctggtctgaaggctggttgttcagactgagcttcctgcctgcctgtaccccgccaacagcttcagaagaaggagcagcccctgggtgcgtccactttctgggcacgtgaggttgggccttggccgcctgagcccttgagttggtcacttgaaccttgggaatattgagattatattctcctgccttttaaaaagatggacttcagcagaaatctttatgatattggggaacaactggacagtgaagatctggcctccctcaagttcctgagcctggactacattccgcaaaggaagcaagaacccatcaaggatgccttgatgttattccagagactccaggaaaagagaatgttggaggaaagcaatctgtccttcctgaaggagctgctcttccgaattaatagactggatttgctgattacctacctaaacactagaaaggaggagatggaaagggaacttcagacaccaggcagggctcaaatttctgcctacagggtcatgctctatcagatttcagaagaagtgagcagatcagaattgaggtcttttaagtttcttttgcaagaggaaatctccaaatgcaaactggatgatgacatgaacctgctggatattttcatagagatggagaagagggtcatcctgggagaaggaaagttggacatcctgaaaagagtctgtgcccaaatcaacaagagcctgctgaagataatcaacgactatgaagaattcagcaaagagagaagcagcagccttgaaggaagtcctgatgaattttcaaatgactttggacaaagtttaccaaatgaaaagcaaacctcggggatactgtctgatcatcaacaatcacaattttgcaaaagcacgggagaaagtgcccaaacttcacagcattagggacaggaatggaacacacttggatgcaggggctttgaccacgacctttgaagagcttcattttgagatcaagccccacgatgactgcacagtagagcaaatctatgagattttgaaaatctaccaactcatggaccacagtaacatggactgcttcatctgctgtatcctctcccatggagacaagggcatcatctatggcactgatggacaggaggcccccatctatgagctgacatctcagttcactggtttgaagtgcccttcccttgctggaaaacccaaagtgttttttattcaggcttgtcagggggataactaccagaaaggtatacctgttgagactgattcagaggagcaaccctatttagaaatggatttatcatcacctcaaacgagatatatcccggatgaggctgactttctgctggggatggccactgtgaataactgtgtttcctaccgaaaccctgcagagggaacctggtacatccagtcactttgccagagcctgagagagcgatgtcctcgaggcgatgatattctcaccatcctgactgaagtgaactatgaagtaagcaacaaggatgacaagaaaaacatggggaaacagatgcctcagcctactttcacactaagaaaaaaacttgtcttcccttctgattgatggtgctattttgtttgttttgttttgttttgtttttttgagacagaatctcgctctgtcgcccaggctggagtgcagtggcgtgatctcggctcaccgcaagctccgcctcccgggttcaggccattctcctgcctcagcctcccgagtagctgggactacaggggcccgccaccacacctggctaattttttaaaaatatttttagtagagacagggtttcactgtgttagccagggtggtcttgatctcctgacctcgtgatccacccacctcggcctcccaaagtgctgggattacaggcgtgagccaccgcgcctggccgatggtactatttagatataacactatgtttatttactaattttctagattttctactttattaattgttttgcacttttttataagagctaaagttaaataggatattaacaacaataacactgtctcctttctcttatgcttaaggctttgggaatgtttttagctggtggcaataaataccagacacgtacaaaatccagctatgaatatagagggcttatgattcagattgttatctatcaactataagcccactgttaatattctattaactttaattctctttcaaagctaaattccacactaccacattaaaaaaattagaaagtagccacgtatggtggctcatgtctataatcccagcactttgggaggttgaggtgggaggattgcttgaacccaagaggtcaaggctgcagtgagccatgttcacaccgctgcactcaagcttgggtgacagaacaagaccccgtctcaaaaaaaattttttttttaataaaacaaaatttgtttgaaatcttttaaaaattcaaatgatttttacaagttttaaataagctctccccaaacttgctttatgccttcttattgcttttatgatatatatatgcttggctaactatatttgctttttgctaacaatgctctggggtctttttatgcatttgcatttgctctttcatctctgcttggattattttaaatcattaggaattaagttatctttaaaatttaagtatcttttttcaaaaacattttttaatagaataaaatataatttgatcttatt

SEQ ID NO: 36089 - DNA, 1629 bp, Artificial Sequence
  derived and/or modified sequence
ctgtttcaccttgtgtctgagctggtctgaaggctggttgttcagactgagcttcctgcctgcctgtaccccgccaacagcttcagaagaaggagcagcccctgggtgcgtccactttctgggcacgtgaggttgggccttggccgcctgagcccttgagttggtcacttgaaccttgggaatattgagatggacttcagcagaaatctttatgatattggggaacaactggacagtgaagatctggcctccctcaagttcctgagcctggactacattccgcaaaggaagcaagaacccatcaaggatgccttgatgttattccagagactccaggaaaagagaatgttggaggaaagcaatctgtccttcctgaaggagctgctcttccgaattaatagactggatttgctgattacctacctaaacactagaaaggaggagatggaaagggaacttcagacaccaggcagggctcaaatttctgcctacagggtcatgctctatcagatttcagaagaagtgagcagatcagaattgaggtcttttaagtttcttttgcaagaggaaatctccaaatgcaaactggatgatgacatgaacctgctggatattttcatagagatggagaagagggtcatcctgggagaaggaaagttggacatcctgaaaagagtctgtgcccaaatcaacaagagcctgctgaagataatcaacgactatgaagaattcagcaaagagagaagcagcagccttgaaggaagtcctgatgaattttcaaatggggaggagttgtgtggggtaatgacaatctcggactctccaagagaacaggatagtgaatcacagactttggacaaagtttaccaaatgaaaagcaaacctcggggatactgtctgatcatcaacaatcacaattttgcaaaagcacgggagaaagtgcccaaacttcacagcattagggacaggaatggaacacacttggatgcaggggctttgaccacgacctttgaagagcttcattttgagatcaagccccacgatgactgcacagtagagcaaatctatgagattttgaaaatctaccaactcatggaccacagtaacatggactgcttcatctgctgtatcctctcccatggagacaagggcatcatctatggcactgatggacaggaggcccccatctatgagctgacatctcagttcactggtttgaagtgcccttcccttgctggaaaacccaaagtgttttttattcaggcttgtcagggggataactaccagaaaggtatacctgttgagactgattcagaggagcaaccctatttagaaatggatttatcatcacctcaaacgagatatatcccggatgaggctgactttctgctggggatggccactgtgaataactgtgtttcctaccgaaaccctgcagagggaacctggtacatccagtcactttgccagagcctgagagagcgatgtcctcgaggcgatgatattctcaccatcctgactgaagtgaactatgaagtaagcaacaaggatgacaagaaaaacatggggaaacagatgcctcagcctactttcacactaagaaaaaaacttgtcttcccttctgattga

SEQ ID NO: 36090 - DNA, 1617 bp, Artificial Sequence
  derived and/or modified sequence
atggagggcggcagaagagccagagtggtgatcgagagcaagagaaacttcttcctgggcgccttccccacccccttccccgccgagcacgtggagctgggcagactgggcgacagcgagaccgccatggtgcccggcaagggcggcgccgactacatcctgctgcccttcaagaagatggacttcagcagaaacctgtacgacatcggcgagcagctggacagcgaggacctggccagcctgaagttcctgagcctggactacatcccccagagaaagcaggagcccatcaaggacgccctgatgctgttccagagactgcaggagaagagaatgctggaggagagcaacctgagcttcctgaaggagctgctgttcagaatcaacagactggacctgctgatcacctacctgaacaccagaaaggaggagatggagagagagctgcagacccccggcagagcccagatcagcgcctacagagtgatgctgtaccagatcagcgaggaggtgagcagaagcgagctgagaagcttcaagttcctgctgcaggaggagatcagcaagtgcaagctggacgacgacatgaacctgctggacatcttcatcgagatggagaagagagtgatcctgggcgagggcaagctggacatcctgaagagagtgtgcgcccagatcaacaagagcctgctgaagatcatcaacgactacgaggagttcagcaaggagagaagcagcagcctggagggcagccccgacgagttcagcaacggcgaggagctgtgcggcgtgatgaccatcagcgacagccccagagagcaggacagcgagagccagaccctggacaaggtgtaccagatgaagagcaagcccagaggctactgcctgatcatcaacaaccacaacttcgccaaggccagagagaaggtgcccaagctgcacagcatcagagacagaaacggcacccacctggacgccggcgccctgaccaccaccttcgaggagctgcacttcgagatcaagccccacgacgactgcaccgtggagcagatctacgagatcctgaagatctaccagctgatggaccacagcaacatggactgcttcatctgctgcatcctgagccacggcgacaagggcatcatctacggcaccgacggccaggaggcccccatctacgagctgaccagccagttcaccggcctgaagtgccccagcctggccggcaagcccaaggtgttcttcatccaggcctgccagggcgacaactaccagaagggcatccccgtggagaccgacagcgaggagcagccctacctggagatggacctgagcagcccccagaccagatacatccccgacgaggccgacttcctgctgggcatggccaccgtgaacaactgcgtgagctacagaaaccccgccgagggcacctggtacatccagagcctgtgccagagcctgagagagagatgccccagaggcgacgacatcctgaccatcctgaccgaggtgaactacgaggtgagcaacaaggacgacaagaagaacatgggcaagcagatgccccagcccaccttcaccctgagaaagaagctggtgttccccagcgactag

SEQ ID NO: 36091 - protein, 297 aa, Artificial Sequence
  derived and/or modified sequence
MSEPPVYCNLVDLRRCPRSPPPGPACPLLQRLDAWEQHLDPNSGRCFYINSLTGCKSWKPPRRSRSETNPGSMEGTQTLKRNNDVLQPQAKGFRSDTGTPEPLDPQGSLSLSQRTSQLDPPALQAPRPLPQLLDDPHEVEKSGLLNMTKIAQGGRKLRKNWGPSWVVLTGNSLVFYREPPPTAPSSGWGPAGSRPESSVDLRGAALAHGRHLSSRRNVLHIRTIPGHEFLLQSDHETELRAWHRALRTVIERLDRENPLELRLSGSGPAELSAGEDEEEESELVSKPLLRLSSRRSS

SEQ ID NO: 36092 - protein, 61 aa, Artificial Sequence
  derived and/or modified sequence
MSEPPVYCNLVDLRRCPRSPPPGPACPLLQRLDAWEQHLDPNSGRCFYINSLTGCKSWKPP

SEQ ID NO: 36093 - protein, 131 aa, Artificial Sequence
  derived and/or modified sequence
MSEPPVYCNLVDLRRCPRSPPPGPACPLLQRLDAWEQHLDPNSGRCFYINSLTGCKSWKPPRRSRSETNPGSMEGTQTLKRNNDVLQPQAKGFRSDTGTPEPLDPQGSLSLSQRTSQLDPPALQAPRPLPQ

SEQ ID NO: 36094 - DNA, 900 bp, Artificial Sequence
  derived and/or modified sequence
atgacaaaaatagcccagggagggcgcaagctgcgaaagaactggggcccaagttgggtcgttctcacagggaatagtttagtcttttacagggagcctccgcctacagctccctcgagtggttggggacctgccggctctagaccagagtcaagcgttgacctgaggggcgccgccttagctcatgggcggcacttatcatcaagacgaaacgtgctacacatccggaccatcccaggacacgaatttctactgcagagcgatcacgagacagaacttcgggcctggcatcgggccctgagaactgtgatcgagcggcttgacagagagaatccattagagctccggctgagcggaagcggacccgcagaactgtccgccggagaggacgaggaagaagagagtgaactggtgtccaaaccactcctgcgcctgtcatcaagacgctcttcaatcaggggtccagaggggacagagcagaatcgagtgagaaacaagctcaaacgcctgatcgccaaaaggccaccacttcagtcactgcaggaacggggcttgctccgcgatcaggtgtttgggtgccagcttgagtcgttgtgtcagagggaaggtgatacagtcccctccttcctgagattatgcatcgcagctgtggacaaaaggggtttggatgtcgatggaatttacagggtatcagggaacttggctgtggtgcagaagctcaggtttctggtggacagggagcgagctgtgacctcagatggtcgttatgtttttcctgaacaacctggtcaggcattatccgagtccgaacagtgcctcagtcagattcaggaactgattggatccatgcctaagcccaaccacgatacactccgatacctcctggagcacctatgttag

SEQ ID NO: 36095 - DNA, 1644 bp, Artificial Sequence
  derived and/or modified sequence
atgtctgaacctccggtttattgcaacttggttgacctcagacggtgcccacggtccccacctcccggcccagcttgcccacttctgcaacggctggatgcttgggagcagcatctcgacccaaattcggggcgttgtttctatatcaacagtctcaccggctgtaaatcatggaaacctccaaggagatcaagatcagaaaccaatccaggctccatggaggggacccaaactctcaaacgtaacaacgatgtgctacagccgcaggctaagggcttccggagtgacactgggacacccgagcccctcgatcctcagggttctctctcgctgtcccagcgaacctctcaactggatccgccggcccttcaggctccgagaccactccctcagctactggacgaccctcatgaagttgaaaaaagtgggctactgaatatgaccaaaatagcacagggaggccgaaagctgaggaaaaactggggaccttcttgggtggtgctgactggcaattccctagtattctatagagagcctccaccaacagcacccagttccggttgggggcctgcaggcagtcggccagagagttccgtcgatctgcgcggggcggcgttggcccacggtaggcacctttcctctcgtcgtaacgtgctccacataagaaccattccgggccacgagttcctgttgcagtccgatcatgagacagaactcagagcctggcaccgagccttaaggacagtgattgagcgattagacagggagaaccccctggaattgaggctctccggctctgggccagcggagctgagcgccggcgaagacgaggaggaggagagcgaacttgtgtcgaagccactgctgaggcttagtagtcgaaggtcatcgatacggggaccagaaggtactgaacagaatcgagtgaggaacaagctcaaacggctgatagcaaagaggcccccactccagtcccttcaggagcgcgggctgcttcgagatcaggtgtttgggtgtcagctcgagagcctgtgtcagcgggagggcgatacagttcctagtttcctgagactctgtattgctgcggtggataagaggggcctggacgtggacgggatctatcgagtgtctggtaatttagctgttgtgcagaagttgcgtttcctcgtagacagggaacgtgcggttacctctgatggccggtacgtgttccctgaacagcccggccaggagggtaggctggatctggactctacagaatgggatgacattcatgtagtcactggggcactgaaattattcctaagggagctgccccagcccctcgtgccccccttactcctaccacacttccgggctgccctggctctttctgaatccgagcagtgtttgagccagattcaggagctgatcggcagcatgcccaagccgaaccatgacactctgaggtaccttttggaacacctctgtcgcgtgattgctcacagtgataagaaccggatgaccccacacaacctgggtatcgtcttcggcccaacccttttcagaccggaacaagagacgtccgatcccgccgcacacgctctatatcctggccagctggtgcagctaatgctcacaaatttcacaagtctctttccatag

SEQ ID NO: 36096 - DNA, 894 bp, Artificial Sequence
  derived and/or modified sequence
atgtcagagcctccggtctattgcaatctcgtggatttgcgcagatgtccacggtcaccacctcccggccccgcctgcccactcctccagcgtctcgacgcctgggagcagcatctcgacccaaattcaggtaggtgtttttatattaactccttaacgggttgtaagtcctggaagcctcccagaaggtcacgaagcgagaccaaccctggcagcatggaaggcacccagactctcaagcgaaacaatgatgtgctgcaacctcaagcaaagggttttcgtagcgacactgggacccccgagcccctggatcctcaagggtcactgtcactcagtcagagaacttcccagctcgacccgcccgctctgcaggcccctcgcccacttccacagctgctcgatgacccccatgaggtggagaaaagcggtcttctcaatatgacgaagatcgcccagggcggcagaaaactccggaaaaactggggaccttcttgggtcgttctgacggggaacagcctggtattttatcgggagcccccccccaccgctccgagctccgggtggggccctgctggatcccgccccgaatccagtgtagatttgcgtggtgctgccttggcgcatggacggcacctgagctcacgtcggaatgtgctccacattcgtactatccccgggcatgaattcctcctgcagtctgatcatgaaacagaactcagagcctggcatagagctttgagaacagtgatcgaacggcttgaccgtgagaaccctctcgagctgagattgtcaggttctggaccagcagagctgtccgccggagaagatgaggaggaagagagcgagcttgtgtctaaacccttgctacgcctctcttcccgacgctccagttag

SEQ ID NO: 36097 - DNA, 900 bp, Artificial Sequence
  derived and/or modified sequence
atgaccaagatcgcccagggcggcaggaagctgaggaagaactggggccccagctgggtggtgctgactggaaacagcctggtgttctaccgggagcccccacccacagcccccagcagcggctggggccctgctggcagcaggcctgagagctctgtggacctgcggggggccgccctggcccacggccgccacctgagcagcagaagaaatgtgctgcacatccgcaccatccctggccacgagttcctgctgcagagcgaccatgaaacagagctgcgggcctggcaccgggccctgaggacagtcatcgagcggctggaccgggagaaccccctggagctgcggctgagcggcagcggccctgctgagctgtctgctggagaagatgaggaggaggagagcgagctggtgtccaagcccctgctgcggctgagcagccgccgcagcagcatccggggccctgagggcacagagcagaacagagtgaggaacaagctgaagaggctgattgccaagaggcctcccctgcagagcctgcaggagcggggcctgctgcgggaccaggtgtttggctgccagctggagagcctgtgccagcgggagggggacacagtgcccagcttcctgcggctgtgcatcgctgctgtggacaagaggggcctggatgtggatggcatctacagagtgtctggcaacctggccgtggtgcagaagctgcgcttcctggtggaccgggagagagctgtgaccagtgatggccgctacgtgtttcctgagcagcccggccaggccctgtctgagagcgagcagtgcctgagccagatccaggagctgattggctccatgcccaagcccaaccacgacaccctgcgctacctgctggagcacctgtgctag

SEQ ID NO: 36098 - DNA, 1644 bp, Artificial Sequence
  derived and/or modified sequence
atgtctgagccccctgtgtactgcaacctggtggacctgcggcgctgccccaggagccccccacctggccctgcctgccccctgctgcagaggctggatgcctgggagcagcacctggaccccaacagcggccgctgcttctacatcaacagcctgaccggctgcaagtcctggaagccaccccggcgcagccgctctgagaccaaccctggctccatggagggcacccagaccctgaagagaaataatgatgtgctgcagccccaggccaagggcttcagaagtgacaccggcaccccagagcccctggacccccagggcagcctgagcctgagccagaggaccagccagctggaccccccagccctgcaggccccccggcccctgccccagctgctggatgacccccatgaggtggagaagagcggcctgctgaacatgaccaagatcgcccagggcggcaggaagctgaggaagaactggggccccagctgggtggtgctgactggaaacagcctggtgttctaccgggagcccccacccacagcccccagcagcggctggggccctgctggcagcaggcctgagagctctgtggacctgcggggggccgccctggcccacggccgccacctgagcagcagaagaaatgtgctgcacatccgcaccatccctggccacgagttcctgctgcagagcgaccatgaaacagagctgcgggcctggcaccgggccctgaggacagtcatcgagcggctggaccgggagaaccccctggagctgcggctgagcggcagcggccctgctgagctgtctgctggagaagatgaggaggaggagagcgagctggtgtccaagcccctgctgcggctgagcagccgccgcagcagcatccggggccctgagggcacagagcagaacagagtgaggaacaagctgaagaggctgattgccaagaggcctcccctgcagagcctgcaggagcggggcctgctgcgggaccaggtgtttggctgccagctggagagcctgtgccagcgggagggggacacagtgcccagcttcctgcggctgtgcatcgctgctgtggacaagaggggcctggatgtggatggcatctacagagtgtctggcaacctggccgtggtgcagaagctgcgcttcctggtggaccgggagagagctgtgaccagtgatggccgctacgtgtttcctgagcagcccggccaggagggccgcctggacctggacagcacagagtgggatgacatccacgtggtgactggagccctgaagctgttcctgcgggagctgccccagcccctggtgccccccctgctgctgccccacttccgggccgccctggccctgtctgagagcgagcagtgcctgagccagatccaggagctgattggctccatgcccaagcccaaccacgacaccctgcgctacctgctggagcacctgtgccgggtgattgcccacagcgacaagaacaggatgaccccccacaacctgggcatcgtgtttggccccaccctcttccggcctgagcaggagaccagtgaccctgctgcccacgccctgtacccaggccagctggtgcagctgatgctgaccaacttcaccagcctcttcccctag

SEQ ID NO: 36099 - DNA, 894 bp, Artificial Sequence
  derived and/or modified sequence
atgtctgagccccctgtgtactgcaacctggtggacctgcggcgctgccccaggagccccccacctggccctgcctgccccctgctgcagaggctggatgcctgggagcagcacctggaccccaacagcggccgctgcttctacatcaacagcctgaccggctgcaagtcctggaagccaccccggcgcagccgctctgagaccaaccctggctccatggagggcacccagaccctgaagagaaataatgatgtgctgcagccccaggccaagggcttcagaagtgacaccggcaccccagagcccctggacccccagggcagcctgagcctgagccagaggaccagccagctggaccccccagccctgcaggccccccggcccctgccccagctgctggatgacccccatgaggtggagaagagcggcctgctgaacatgaccaagatcgcccagggcggcaggaagctgaggaagaactggggccccagctgggtggtgctgactggaaacagcctggtgttctaccgggagcccccacccacagcccccagcagcggctggggccctgctggcagcaggcctgagagctctgtggacctgcggggggccgccctggcccacggccgccacctgagcagcagaagaaatgtgctgcacatccgcaccatccctggccacgagttcctgctgcagagcgaccatgaaacagagctgcgggcctggcaccgggccctgaggacagtcatcgagcggctggaccgggagaaccccctggagctgcggctgagcggcagcggccctgctgagctgtctgctggagaagatgaggaggaggagagcgagctggtgtccaagcccctgctgcggctgagcagccgccgcagcagctag

SEQ ID NO: 36100 - DNA, 900 bp, Artificial Sequence
  derived and/or modified sequence
atgaccaagatcgcccagggcggccggaagctgcggaagaactggggtccgtcctgggtcgtcttaacgggaaactccctcgtcttttatcgagaaccacctccgactgcacccagctccggttgggggcctgctgggtcccgacccgagtcgtccgtcgatctacggggggctgccttggcgcacggtcggcacttgtccagcagacgcaatgttctgcatatccggacaatccctggtcacgagtttctgctgcagtctgatcacgaaacagagttacgggcctggcatcgggccctccggacggtgatcgagcggctggatcgcgaaaaccccctcgaacttagactgagcgggtccggacctgccgagctgtcagccggagaagacgaggaagaggagagtgaattggtgtctaagcctctccttcggctgagctctcgccgcagcagtattcgaggacctgaaggaacagagcaaaaccgtgtgcgcaataaactcaagagactgattgctaaacggcccccactgcagagccttcaggaacggggcttacttcgcgaccaggtgttcggctgccagctggaatcactgtgccaaagagaaggggacactgtcccttctttcctgcgcctctgtattgcagcagtggacaagcgcggcctggatgtcgatgggatatatcgggtgtccgggaatctggccgtcgtgcaaaagttaagattcttggtggaccgtgagcgcgctgtcactagtgacggtcgatacgtctttccggagcagcccgggcaggcccttagtgaaagtgagcagtgcctcagccagattcaggagttaatcggcagtatgcctaagcccaaccacgatacgctgagatacctcctggaacacctatgctag

SEQ ID NO: 36101 - DNA, 1644 bp, Artificial Sequence
  derived and/or modified sequence
atgagcgagccccccgtgtactgcaacctggtggacctgcggcggtgcccccgctccccacctccggggccagcttgcccgttactgcagaggctggacgcttgggaacagcacctcgaccctaacagtggcaggtgcttttatattaactcacttactggatgtaaatcatggaagccgcctcggcgcagccgcagtgaaacaaatcctggatccatggaggggactcagaccctgaagcgaaacaacgacgtgctgcagccgcaggccaagggcttccgctcagacacgggaacccctgagcctctcgatccccagggctcactttccctgtcccaacgaacaagccaactggatcccccagcgttgcaggccccaaggcctcttccacagctgctcgacgatccacacgaggtagagaagtccggcctgcttaacatgaccaagattgctcagggtgggagaaaactcagaaagaactggggaccgagctgggttgtgctgaccggcaacagcctggtattctatagagaaccgcctccaacggctccatctagcggatggggcccggccggctctcggcccgagagctcagtcgatctgagaggcgcggcactagcacatgggaggcacctctcctctagaaggaacgttctccacatccgcaccatccctggccacgaattcctgcttcagtctgatcacgaaacagagcttcgcgcctggcacagggcgttaaggaccgtaatcgaaaggctggacagggagaatcccctcgagctaaggttgtcagggtctggccctgcggagcttagtgccggcgaggacgaggaagaggaaagcgagctcgtgtccaaacctttactgcggctctcttctcggaggagctctattcgaggccccgagggtaccgagcaaaaccgagtccggaacaaactcaaaagacttatcgcaaaaagacctcctttgcaatcattgcaggaacgcggattgctcagagatcaagtcttcggctgtcagctcgaatctctgtgccagcgagagggagataccgtgccaagctttctcaggctgtgtatagccgccgtggataagcggggactcgatgtcgacggaatttacagagttagtggcaatctggccgtcgtacagaagttaagattcctagtggatcgggaacgggcagtgacctccgacggacgctatgttttcccggagcaacctggtcaggaaggaagactggatttggattcaactgagtgggacgatatacacgtagtcaccggggctctaaaactgttccttcgggagctaccacaaccccttgtgccccctctactgctgccccactttcgtgccgcccttgccttgagcgagagtgagcagtgtctgagtcaaatccaggaactgattggaagcatgcctaagcctaaccacgatactctgcgctacctgcttgagcatctttgcagagttatagcacacagcgataaaaataggatgacaccccacaatctgggaatcgttttcggacccaccttatttcgacctgagcaggaaacgagcgaccctgccgctcatgcactctatcctggccaactggttcaactgatgcttacaaacttcacatctttgttcccatag

SEQ ID NO: 36102 - DNA, 894 bp, Artificial Sequence
  derived and/or modified sequence
atgagcgagccccccgtgtactgcaacctggtggacctgcggcggtgtccccgttccccaccccccggccctgcatgcccgctccttcagaggctggacgcgtgggagcagcatctagatccaaattctggccgctgcttctatataaacagtctcactggttgtaagagttggaagcctccacgcaggtcccgctctgagaccaaccccggtagcatggagggcacacagacacttaagcggaataacgatgtcttgcagcctcaggccaaggggttcagatctgatacaggaactcccgagccactagacccccagggcagcctgagcctgtcacagagaacgtcccaattggatcctcccgcactccaagctcccaggccccttccccagcttctcgatgatccacacgaggtcgagaaatcgggactgctgaatatgactaagatcgctcagggtggtcgcaaactccggaaaaattggggcccctcatgggttgttctcactggcaattctctcgtgttttaccgggagccgccacccactgcaccttccagcggatgggggcctgccggatcgcgaccggagtcctctgtcgacctcaggggtgctgccctggcgcatggcaggcatctcagtagcaggagaaatgtcctgcatatccggaccatacccggccacgaatttctgcttcagtcagaccatgagaccgagcttcgggcttggcatcgggccctgagaacagtgattgaaagactggaccgagagaatccactggagctgcggctatctgggtcaggcccagcagaactgtcagcgggggaagacgaagaagaggagagtgaactcgtcagtaaacctctcctgcgtctgtccagtagaaggtctagttag

SEQ ID NO: 36103 - DNA, 900 bp, Artificial Sequence
  derived and/or modified sequence
atgactaagatcgcacagggcggaagaaagctgcggaagaattggggcccatcctgggtcgtgcttaccggtaattcattagtgttttatagggaacctcctcctacagcgccatctagcggctggggacccgcagggtctagaccggaatcttctgtcgatctgcgtggcgctgccctcgcccatggccgacatctttcttcacgcaggaacgtcttgcacatccgtacgattcctggacacgaattcttgcttcagagcgaccacgagacagagttgagggcatggcaccgcgctctgcggacggtgatcgagagactagatcgggagaaccccttggagctgcgactttcaggttccggacctgccgaactttccgccggtgaagacgaggaggaggagtcagaattagtgtccaagcctttgctgagattatccagtcggcgatcttcgatcagagggcctgaaggaactgagcagaatagagttcgaaacaagctgaagcggctgattgcgaaacgcccaccacttcagagcctacaagaaagagggctcctcagggatcaggtctttggatgtcaactcgaatccctgtgccagagggaaggcgacacagttccctcattcctgcgcctatgcattgcagccgtagacaagcgaggactggacgtggatggaatctacagagtgtctggcaacttggcagtggtgcagaaacttcgcttcctagtggaccgtgaacgtgccgtaactagtgatggcaggtatgttttcccagagcagccaggacaggctctcagtgagagcgagcaatgcctaagtcagatccaggaactgattggcagcatgcccaagccaaatcacgacacactgcggtatctgctggaacacctctgctag

SEQ ID NO: 36104 - DNA, 1644 bp, Artificial Sequence
  derived and/or modified sequence
atgagtgagccaccagtatattgcaatttggtggaccttcgcaggtgtccaaggagcccccctcccggacccgcatgtcctctgctgcagagactggacgcatgggaacagcacttggaccccaattcagggaggtgtttctacatcaactcgctgacaggctgtaaatcttggaaacccccacggaggagccgaagcgagactaatcccggttcaatggaaggtacgcagacattgaagcggaacaacgatgtattgcagccacaggcaaagggtttccggtctgacacagggacccccgagcctctagacccacaaggtagcctgagtctgtcacagcgaacaagccagctggatcccccagccctgcaggctccacgccctctgccccagctgctcgacgatccgcacgaagtggaaaagtccggtctgctgaacatgactaagatcgcccagggagggcgaaagctgaggaaaaactggggacctagttgggtagtcctaaccggaaattccttggtcttctaccgagagccacctcccactgcaccaagctcaggatggggtccagccggttcacgtccggagtccagtgtcgatctgcggggtgctgctctggcacacggaagacacctgagcagcagaagaaatgtgctgcacattcgaacgataccaggacacgagttcctgctccagagcgatcacgaaacagagttacgagcctggcacagggcccttaggactgtgatagagcgcctagatagagagaaccccttagagttgcggctgtccggaagtggacccgctgagctctcagccggtgaagacgaagaggaagagtccgagctggtcagcaagcctctcctacgactcagctcaagacgttcttcaatccgtggtcctgaaggtactgaacagaatagagtgcggaataagcttaaaaggctcattgcaaagcgcccaccactccaaagtcttcaagagagaggactgcttcgcgatcaggtttttgggtgccagctggaaagcctatgtcaacgcgagggagacactgtccctagcttcctgcgcctctgtattgccgcagtggataaacgagggttggacgtcgacggtatctatagagtgtctggcaatctggccgtcgtgcaaaaactcagatttcttgtggatcgagaacgggctgtgacatccgacggacgctacgtttttccggagcagcctgggcaggagggacggctggacttggactccaccgagtgggacgacatccacgttgtgacgggcgcactgaagctattcctacgggaattgccgcagcctctggttccacctctacttctgccccatttccgggctgccctggctctgagcgagtcagagcagtgcttaagtcagattcaggaattgatcgggagcatgccaaagccaaatcatgacacattaaggtatttgctagagcacctatgtcgggtgattgcgcattctgataaaaatcggatgacgcctcacaacttgggtatcgtcttcggccctactctgttccgccctgagcaggaaacgtccgatcctgccgcacacgcactgtacccaggacagttagtacagcttatgcttacaaattttacctcactcttcccctag

SEQ ID NO: 36105 - DNA, 894 bp, Artificial Sequence
  derived and/or modified sequence
atgtcagaaccaccggtatactgtaacctggtggaccttagaagatgcccacgttcccctcctcccggaccagcatgtcccctgctccagcggctagacgcatgggagcaacatctcgatcccaattccggaaggtgtttttacatcaactctctcactggttgtaagtcctggaaacctccccgaaggagcaggtccgaaactaacccaggaagcatggaaggaacacagacattgaagaggaacaacgatgtacttcaaccccaggctaaaggattccggtctgacaccggcactcccgagccacttgatccgcagggcagcctttcattgtcccagagaacttcacaattggatccacctgcgctccaggctccccgacccctgcctcagctcttggatgatccgcatgaagtggagaaatcagggctgctgaacatgaccaaaatcgcccaagggggtcgaaaactccggaagaattggggcccaagttgggtcgtactgactgggaactcactggtcttttacagggaaccaccccctaccgctcctagcagcggttggggacctgcgggatctaggcccgaatctagtgtggacttgcggggtgccgcattggctcatggccgtcatctcagttcccggcgaaacgtgctccacataagaacgatccctggccatgagttcctcctgcaatccgatcatgagacagaattacgggcttggcatagggctttgcgcaccgtaatcgaaaggctggatcgtgaaaaccccttggagctgcgcctctctggtagcgggccagccgagctgtcggccggtgaggacgaagaggaggaaagcgaactggtgagcaagccactgctgagattgagctctaggcgctcgtcatag

SEQ ID NO: 36106 - DNA, 900 bp, Artificial Sequence
  derived and/or modified sequence
atgaccaagatcgcccagggcggcagaaagctgagaaagaactggggccccagctgggtggtgctgaccggcaacagcctggtgttctacagagagcccccccccaccgcccccagcagcggctggggccccgccggcagcagacccgagagcagcgtggacctgagaggcgccgccctggcccacggcagacacctgagcagcagaagaaacgtgctgcacatcagaaccatccccggccacgagttcctgctgcagagcgaccacgagaccgagctgagagcctggcacagagccctgagaaccgtgatcgagagactggacagagagaaccccctggagctgagactgagcggcagcggccccgccgagctgagcgccggcgaggacgaggaggaggagagcgagctggtgagcaagcccctgctgagactgagcagcagaagaagcagcatcagaggccccgagggcaccgagcagaacagagtgagaaacaagctgaagagactgatcgccaagagaccccccctgcagagcctgcaggagagaggcctgctgagagaccaggtgttcggctgccagctggagagcctgtgccagagagagggcgacaccgtgcccagcttcctgagactgtgcatcgccgccgtggacaagagaggcctggacgtggacggcatctacagagtgagcggcaacctggccgtggtgcagaagctgagattcctggtggacagagagagagccgtgaccagcgacggcagatacgtgttccccgagcagcccggccaggccctgagcgagagcgagcagtgcctgagccagatccaggagctgatcggcagcatgcccaagcccaaccacgacaccctgagatacctgctggagcacctgtgctag

SEQ ID NO: 36107 - DNA, 1644 bp, Artificial Sequence
  derived and/or modified sequence
atgagcgagccccccgtgtactgcaacctggtggacctgagaagatgccccagaagccccccccccggccccgcctgccccctgctgcagagactggacgcctgggagcagcacctggaccccaacagcggcagatgcttctacatcaacagcctgaccggctgcaagagctggaagccccccagaagaagcagaagcgagaccaaccccggcagcatggagggcacccagaccctgaagagaaacaacgacgtgctgcagccccaggccaagggcttcagaagcgacaccggcacccccgagcccctggacccccagggcagcctgagcctgagccagagaaccagccagctggacccccccgccctgcaggcccccagacccctgccccagctgctggacgacccccacgaggtggagaagagcggcctgctgaacatgaccaagatcgcccagggcggcagaaagctgagaaagaactggggccccagctgggtggtgctgaccggcaacagcctggtgttctacagagagcccccccccaccgcccccagcagcggctggggccccgccggcagcagacccgagagcagcgtggacctgagaggcgccgccctggcccacggcagacacctgagcagcagaagaaacgtgctgcacatcagaaccatccccggccacgagttcctgctgcagagcgaccacgagaccgagctgagagcctggcacagagccctgagaaccgtgatcgagagactggacagagagaaccccctggagctgagactgagcggcagcggccccgccgagctgagcgccggcgaggacgaggaggaggagagcgagctggtgagcaagcccctgctgagactgagcagcagaagaagcagcatcagaggccccgagggcaccgagcagaacagagtgagaaacaagctgaagagactgatcgccaagagaccccccctgcagagcctgcaggagagaggcctgctgagagaccaggtgttcggctgccagctggagagcctgtgccagagagagggcgacaccgtgcccagcttcctgagactgtgcatcgccgccgtggacaagagaggcctggacgtggacggcatctacagagtgagcggcaacctggccgtggtgcagaagctgagattcctggtggacagagagagagccgtgaccagcgacggcagatacgtgttccccgagcagcccggccaggagggcagactggacctggacagcaccgagtgggacgacatccacgtggtgaccggcgccctgaagctgttcctgagagagctgccccagcccctggtgccccccctgctgctgccccacttcagagccgccctggccctgagcgagagcgagcagtgcctgagccagatccaggagctgatcggcagcatgcccaagcccaaccacgacaccctgagatacctgctggagcacctgtgcagagtgatcgcccacagcgacaagaacagaatgaccccccacaacctgggcatcgtgttcggccccaccctgttcagacccgagcaggagaccagcgaccccgccgcccacgccctgtaccccggccagctggtgcagctgatgctgaccaacttcaccagcctgttcccctag

SEQ ID NO: 36108 - DNA, 894 bp, Artificial Sequence
  derived and/or modified sequence
atgagcgagccccccgtgtactgcaacctggtggacctgagaagatgccccagaagccccccccccggccccgcctgccccctgctgcagagactggacgcctgggagcagcacctggaccccaacagcggcagatgcttctacatcaacagcctgaccggctgcaagagctggaagccccccagaagaagcagaagcgagaccaaccccggcagcatggagggcacccagaccctgaagagaaacaacgacgtgctgcagccccaggccaagggcttcagaagcgacaccggcacccccgagcccctggacccccagggcagcctgagcctgagccagagaaccagccagctggacccccccgccctgcaggcccccagacccctgccccagctgctggacgacccccacgaggtggagaagagcggcctgctgaacatgaccaagatcgcccagggcggcagaaagctgagaaagaactggggccccagctgggtggtgctgaccggcaacagcctggtgttctacagagagcccccccccaccgcccccagcagcggctggggccccgccggcagcagacccgagagcagcgtggacctgagaggcgccgccctggcccacggcagacacctgagcagcagaagaaacgtgctgcacatcagaaccatccccggccacgagttcctgctgcagagcgaccacgagaccgagctgagagcctggcacagagccctgagaaccgtgatcgagagactggacagagagaaccccctggagctgagactgagcggcagcggccccgccgagctgagcgccggcgaggacgaggaggaggagagcgagctggtgagcaagcccctgctgagactgagcagcagaagaagcagctag

SEQ ID NO: 36109 - DNA, 1923 bp, Artificial Sequence
  derived and/or modified sequence
atgctcagtagcaggtggtggccatccagctggggcattctcggtctcggacccagatcccctcccagaggttcgcaactgtgcgccctctatgccttcacctacaccggagcagatggacagcaagtgagcctggctgagggggatcgttttctcctgctgcgcaagaccaactcagactggtggttggcacggaggctcgaggctcctagtacctcccggcccatttttgtgcctgccgcatacatgatcgaggagtctataccctcacaatcacctaccacagtaattcctgggcagttgctttggactcccggcccaaagcttttccatggcagtttggaagagcttagccaagccctcccctcacgggctcaagcttcatcagagcagccccctcccctccctcggaaaatgtgcaggtccgtatctacagataacctgagtcctagcctgctgaaaccattccaagaggggcctagcggccgttcactttctcaggaggacttgcctagcgaagccagcgccagcacagccgggccccaacctctgatgagcgaacctcctgtctattgtaatctcgtcgatttgcgacggtgcccgaggtcacccccacctgggcccgcgtgcccactgctgcagcggctggacgcttgggaacaacacttggatcccaattccggccggtgtttttacataaactcattgactggatgtaaaagttggaagcccccaagacggagtagaagtgagactaatccggggtccatggaaggcacacagacactgaagagaaataatgacgtactgcagccccaggcgaaaggattccggtccgacacagggactcctgagcctttggacccacaaggttccctctctctgagccagagaacctcccagttggaccctcccgcgctgcaggccccccgccccttgccacagctgctggacgatcctcacgaagtggagaagagtgggctgcttaacatgacaaaaatagcccagggtggccggaagcttagaaagaactgggggccatcatgggtggtccttactggcaattcattagtgttctaccgcgagcctccccccacagctccctcatcagggtggggtccagccgggtctagacccgagtcaagcgtggacttgaggggcgctgccctggcacatggcagacacttaagctctcgtcggaatgtattgcacattcggacgattcccgggcacgagtttctgctgcaaagcgaccatgaaacagagctgcgtgcgtggcaccgggcactcaggaccgtcatcgaacgcttagatagagagaatccacttgaactccggttgtccggctccggccccgccgaactctctgccggcgaggacgaggaggaggaaagcgaactggtgagtaagcctctgctgcgcctctcctccaggagatccagcattcgcggccccgagggcaccgagcagaatcgagttaggaataaactcaagcgccttatcgccaagcgtccacccctgcagtctttacaggagcggggcctgcttcgggatcaggtattcggatgtcagctggaatctctgtgtcaacgggagggtgatactgtcccatctttcctgagactgtgcatcgccgctgtggacaagagagggctcgatgtggatgggatttatcgtgtgagcggcaatctagcagtagtgcagaagctgcgcttcttggtagatcgggagcgcgccgtcacgtcagatgggcgctacgtctttccagaacagccaggccaggaaggacgcctcgatctcgattccaccgaatgggatgatatacatgtcgtaaccggagcgcttaagctgtttctgcgagaactcccacaaccactcgttcctcccctgctgcttccccatttccgggctgctctggggtag

SEQ ID NO: 36110 - DNA, 1923 bp, Artificial Sequence
  derived and/or modified sequence
atgctgagcagccgctggtggcccagctcctggggcatcctgggcctgggccccaggagccccccccggggcagccagctgtgtgccctgtatgccttcacctacaccggggctgatggccagcaggtgtccctggccgagggggaccgcttcctgctgctgaggaagaccaacagcgactggtggctggcccggcggctggaggcccccagcaccagccggcccatctttgtgcctgctgcctacatgattgaggagagcatccccagccagagccccaccaccgtcatccctggccagctgctgtggaccccaggccccaagctgttccacggcagcctggaggagctgagccaggccctgcccagccgggcccaggccagcagcgagcagcccccacccctgcccaggaagatgtgccgctctgtgtccacagacaacctgagccccagcctgctgaagcccttccaggagggccccagcggccgcagcctgagccaggaggacctgcccagcgaggccagcgccagcacagctggcccccagcccctgatgtctgagccccctgtgtactgcaacctggtggacctgcggcgctgccccaggagccccccacctggccctgcctgccccctgctgcagaggctggatgcctgggagcagcacctggaccccaacagcggccgctgcttctacatcaacagcctgaccggctgcaagtcctggaagccaccccggcgcagccgctctgagaccaaccctggctccatggagggcacccagaccctgaagagaaataatgatgtgctgcagccccaggccaagggcttcagaagtgacaccggcaccccagagcccctggacccccagggcagcctgagcctgagccagaggaccagccagctggaccccccagccctgcaggccccccggcccctgccccagctgctggatgacccccatgaggtggagaagagcggcctgctgaacatgaccaagatcgcccagggcggcaggaagctgaggaagaactggggccccagctgggtggtgctgactggaaacagcctggtgttctaccgggagcccccacccacagcccccagcagcggctggggccctgctggcagcaggcctgagagctctgtggacctgcggggggccgccctggcccacggccgccacctgagcagcagaagaaatgtgctgcacatccgcaccatccctggccacgagttcctgctgcagagcgaccatgaaacagagctgcgggcctggcaccgggccctgaggacagtcatcgagcggctggaccgggagaaccccctggagctgcggctgagcggcagcggccctgctgagctgtctgctggagaagatgaggaggaggagagcgagctggtgtccaagcccctgctgcggctgagcagccgccgcagcagcatccggggccctgagggcacagagcagaacagagtgaggaacaagctgaagaggctgattgccaagaggcctcccctgcagagcctgcaggagcggggcctgctgcgggaccaggtgtttggctgccagctggagagcctgtgccagcgggagggggacacagtgcccagcttcctgcggctgtgcatcgctgctgtggacaagaggggcctggatgtggatggcatctacagagtgtctggcaacctggccgtggtgcagaagctgcgcttcctggtggaccgggagagagctgtgaccagtgatggccgctacgtgtttcctgagcagcccggccaggagggccgcctggacctggacagcacagagtgggatgacatccacgtggtgactggagccctgaagctgttcctgcgggagctgccccagcccctggtgccccccctgctgctgccccacttccgggccgccctgggctag

SEQ ID NO: 36111 - DNA, 1923 bp, Artificial Sequence
  derived and/or modified sequence
atgctgagcagccggtggtggcccagcagctggggcatcctgggccttggccccaggtcacctccaaggggtagccagctttgtgcgctttacgcctttacctacacgggagctgacggtcagcaggtatcccttgccgaaggagatcgctttctgctcctaagaaagaccaacagtgattggtggctggctagacgcctggaggctccatcgacttcacgacccatctttgtgcccgccgcctacatgattgaggaatctatccctagtcagtctcccactacagtgataccgggtcagctattatggacccctggccctaagcttttccacggctcattagaggagctgagtcaggccctgccatctagggcccaagctagtagtgaacagcccccccccttacctaggaaaatgtgtcgctcagttagcacagataacctgagtccctcactactgaaacctttccaggagggcccctctggtcgctctttgagtcaggaggacctccccagcgaagcaagtgcaagcacagcaggtcctcaacctttgatgtccgagcctccagtgtattgtaatctcgtcgatctgaggcgctgccctaggtctcctccccctgggccagcttgtccactcctacaaagactggatgcgtgggagcaacacttagatccgaatagtgggagatgtttctacataaatagccttacaggatgtaagagctggaagccacctcggagatctcgctcggagaccaacccgggatctatggagggaacacaaaccctgaaacggaataatgatgtccttcagccacaggctaaaggcttcagaagcgacactggcacccctgaaccgctcgacccccaaggtagtctgagcttgtcccagcgaacctctcagctggatccccctgcactccaggcaccaagaccactccctcagctgctagacgaccctcatgaagtggagaagtcgggtttactgaacatgacaaagattgcccagggaggtaggaaactgagaaagaactgggggccatcgtgggtggtcctgacggggaattcattggtcttctacagagaaccaccccccacagccccctcaagcgggtggggccctgcaggctccaggcccgagagctcggtagacctccggggcgcagccctggctcacggacggcatctgtcaagccgccgaaatgtattgcatattcggacaattcctggccatgagtttctgttgcaatccgaccatgaaacggaactccgcgcttggcaccgtgccctgagaaccgtcatagaaaggctcgatagagagaatcctctggaactgcgactgagcggcagtgggccagctgagctttccgccggagaagacgaggaggaggagtccgaactggtctctaagcctctcctccgactaagtagtaggagatcaagtatcaggggcccggagggcacggaacaaaacagggtgaggaacaaactgaagcgactgatcgccaagaggccacctctccagagcctccaggagcggggtttgctgagggatcaagttttcggctgccagctggagtccttgtgccagcgcgagggagataccgtgccctcgttccttagactgtgcatcgctgccgtggacaagcggggactagacgtggacgggatataccgggtgagtggaaacttggctgtggtgcagaagctcagatttttagtggaccgggaacgggcagtgacaagtgatggacgatacgtatttcccgagcagccaggccaggagggaagactcgacctcgattccactgaatgggatgacatccatgtagttacaggtgcccttaaactcttcctgcgtgaactcccccagcccctggtcccacctctgctcttgccacacttcagggcggcactgggatag

SEQ ID NO: 36112 - DNA, 1923 bp, Artificial Sequence
  derived and/or modified sequence
atgctttcttcacgctggtggccttcctcctggggaatcctgggcttgggaccaaggtcaccgcctagggggtctcaactgtgtgcactgtacgcctttacatacacgggtgccgacggacaacaggtgtccctagcagagggtgataggttcctgctgctgagaaaaacgaattcggattggtggctcgcaagaagactggaggccccttccacctcacggcctatttttgttcctgctgcttatatgatcgaggaaagtattccaagccagtcccctactactgtcatccccggtcagctgttatggactcctgggccaaaactgttccacggcagcctggaagagctgtcccaggctctgccaagtcgagcgcaggcctcctcagagcaacctccccctctgccccgaaagatgtgtcggtccgtgagcacagataatctttctcccagtctgcttaaacccttccaggagggccctagtggtcggtccctctctcaagaagatctgcccagcgaggctagtgcttcgaccgctggccctcagcccttgatgagcgagccacctgtgtactgcaacctcgtggatttgaggcgctgtcccagatcgccaccacctgggcctgcttgcccccttttacaacggttggatgcctgggaacaacacctggatcctaatagcgggaggtgcttttacattaattctctgactggctgtaaaagctggaagccgccacgacggtcacgatcagaaacaaaccctggtagcatggaaggtacacagactcttaaaaggaacaatgacgtcctgcagccccaagcaaaggggttcaggtccgatacaggtacaccagagccgctggatcctcagggcagcctcagtctctcgcaaaggacctcgcaattggatccacctgcactccaggcgcctaggcctctcccccaactccttgatgatccccatgaggtggagaagagcggactgctgaatatgacaaagattgcccaagggggaaggaagctgcgcaaaaactgggggccatcatgggtggttttaaccggcaacagcctggtcttctatagagaaccgccacccacagccccatcatctggttggggaccggcaggatccagacctgaatctagcgtggacttgaggggggcagctctggcccatggaaggcacctgtcttctcgtcggaatgtgctccacataaggaccatccccggacacgagttccttcttcagtcagaccacgagacagaattgagagcctggcacagagccttgcgcacggtcattgagcgcctggaccgagagaaccctttagagttgcggttgagtggcagtgggccagctgaattatctgctggcgaggatgaagaggaggaatccgagcttgtgagcaagcccctgcttcgcctcagctcacggcgaagcagcataaggggcccagagggaaccgagcagaatcgggtccggaacaagctcaaacggctgattgctaagcggccacctctgcagagtctccaagaacggggattgctccgggaccaggtgttcggctgccagttagaaagcctgtgtcagcgggagggcgacacagtacccagcttcctgcgcctgtgcattgcagccgtagataagagaggactcgacgtcgatggcatttaccgcgtgagcgggaatctggcagtggtgcagaaactgcgattccttgtcgacagggaacgtgccgtgacaagtgacggaagatacgtttttcctgagcaacccggacaggaggggaggctcgacctggacagcacggagtgggatgatatccacgtggtcacaggcgctttaaagctgttcttgagagagctcccccagcccttggtgccacctctgctgctgcctcacttccgagcggctctcggctag

SEQ ID NO: 36113 - DNA, 2569 bp, Artificial Sequence
  derived and/or modified sequence
acatacttcctcaccagacaccaccaggagttctcagcccccaaaacctgtcaccgatcctcaccaggctgtttgctctaccctctcccccaactcaagggctcccgtcctcacctccctgcaacactgctcctagaaccatgtctgtctacctggagacagccaggcctattcccttctgggtctccagtgtccctttttctcacaggtgacagtgctggctacaatgctatccagccggtggtggccaagttcctgggggatcctagggctgggcccccgaagccctcctcggggatcccagctctgtgccctctatgcctttacttatactggggcagatggccagcaggtgtctctggctgaaggggataggttcctactgcttcgaaagaccaactccgactggtggttggcaagacgcctagaagctccctccacctctcgacccatcttcgtcccagcagcctatatgatagaggaatccatcccttcccagagtccaactaccgtcatccccggccaattgctctggactcctgggccgaagttgtttcatggttccctggaggagttgtctcaggccctcccaagcagggctcaggctagctcggagcagcctcctccacttccccgcaaaatgtgtaggagcgtcagcactgacaatctgagccccagccttctgaagcctttccaggaaggaccaagcggaagatccctctcccaggaagacttgccgtcagaagccagtgccagcacagcaggcccccagcccctcatgtcagagccccctgtgtactgtaacctggtggaccttcgccgctgtcctcggtccccacccccaggccctgcatgccccctgctgcagaggctggatgcctgggagcagcacctggaccccaactctggacgctgcttctacataaattcactgactggctgcaagtcctggaagcccccgcgccgcagtcgcagcgagacgaaccctggctccatggaggggacacagaccctgaagaggaacaatgatgtcctgcaacctcaggcaaagggcttcagatctgacacagggaccccagaaccgcttgacccacagggttcactcagcctcagccaacgcacctcgcagcttgaccctccagccttgcaggcccctcgacctctgccgcagctcctggacgacccccatgaggtggaaaagtcgggtctgctcaacatgaccaagattgcccaaggggggcgcaagctcaggaagaactggggcccgtcttgggtggtgttaacgggtaacagcctggtgttctaccgagagccaccgccgacagcgccctcctcaggctggggaccagcgggtagccggcccgaaagtagcgtggacctgcgcggggcggccctggcgcacggccgccacctgtccagccgccgcaacgtcctgcacatccgcacgatccctggccacgagttcctgctgcagtcggaccacgagacagagctgcgagcctggcaccgcgcgctgcggactgtcatcgagcggctggatcgggagaaccccctggagctgcgtctgtcgggctctggacccgcggagctgagcgccggggaggacgaagaagaggagtcggagctggtgtccaagccgctgctgcgcctcagcagccgccggagctccattcgggggcccgaaggcaccgagcagaaccgcgtgcgcaacaaactaaagcggctcatcgcgaagagaccgcccttacaaagcctgcaggagcggggtctgctccgagaccaggtgttcggctgccagttggaatcactctgccagcgggaaggagacacggtgcccagctttttgcggctctgcattgctgctgtggataaaagaggtctagatgtggatggcatttatcgggtgagcgggaacttggcagtggtccagaagcttcgctttctggtggacagagagcgtgcggtcacctccgatgggaggtatgtgttcccagaacagccaggacaagaaggtcggttagatttggacagtactgagtgggatgacattcatgtggtcaccggagccctgaagctttttctccgggagctgccccagcctctggtgccaccactgctgctgccccatttccgtgctgcccttgggtgatagcacactcagataagaatcgcatgacaccccacaacctgggaattgtgtttggaccaaccctgtttcggccagagcaggagacatctgacccagcagcccatgctctctacccagggcagctggtccagctgatgctcaccaacttcaccagcctcttcccctgatgcagggaaggaagaagagaaaacatatttccggtcatctctggtggtgagaggctggtgttctgttttgaggatatccctttaaatctcccaaatgactgtctctatcttcatgagtgtgacttgaggtgttgggatgggtgagggagcttctctaaagaggaaagtgagtggattaacccctgcttctcttcttgttccctgttatcattcctccccaacataataatacataaagtggcatggtattttt

SEQ ID NO: 36114 - DNA, 967 bp, Artificial Sequence
  derived and/or modified sequence
ggctcctcttcccttctgtagacccttctctgtcttcttttaccttgcaggatgtgagggcaggcccccagcccctcatgtcagagccccctgtgtactgtaacctggtggaccttcgccgctgtcctcggtccccacccccaggccctgcatgccccctgctgcagaggctggatgcctgggagcagcacctggaccccaactctggacgctgcttctacataaattcactgactggctgcaagtcctggaagcccccgcgccgcagtcgcagcgagacgaaccctggctccatggaggggacacagaccctgaagaggaacaatgatgtcctgcaacctcaggcaaagggcttcagatctgacacagggaccccagaaccgcttgacccacagggttcactcagcctcagccaacgcacctcgcagcttgaccctccagccttgcaggcccctcgacctctgccgcagctcctggacgacccccatgaggtggaaaagtcgggtctgctcaacatgaccaagattgcccaaggggggcgcaagctcaggaagaactggggcccgtcttgggtggtgttaacgggtaacagcctggtgttctaccgagagccaccgccgacagcgccctcctcaggctggggaccagcgggtagccggcccgaaagtagcgtggacctgcgcggggcggccctggcgcacggccgccacctgtccagccgccgcaacgtcctgcacatccgcacgatccctggccacgagttcctgctgcagtcggaccacgagacagagctgcgagcctggcaccgcgcgctgcggactgtcatcgagcggctggatcgggagaaccccctggagctgcgtctgtcgggctctggacccgcggagctgagcgccggggaggacgaagaagaggagtcggagctggtgtccaagccgctgctgcgcctcagcagccgccggagctc

SEQ ID NO: 36115 - DNA, 1923 bp, Artificial Sequence
  derived and/or modified sequence
atgctgagcagcagatggtggcccagcagctggggcatcctgggcctgggccccagaagcccccccagaggcagccagctgtgcgccctgtacgccttcacctacaccggcgccgacggccagcaggtgagcctggccgagggcgacagattcctgctgctgagaaagaccaacagcgactggtggctggccagaagactggaggcccccagcaccagcagacccatcttcgtgcccgccgcctacatgatcgaggagagcatccccagccagagccccaccaccgtgatccccggccagctgctgtggacccccggccccaagctgttccacggcagcctggaggagctgagccaggccctgcccagcagagcccaggccagcagcgagcagcccccccccctgcccagaaagatgtgcagaagcgtgagcaccgacaacctgagccccagcctgctgaagcccttccaggagggccccagcggcagaagcctgagccaggaggacctgcccagcgaggccagcgccagcaccgccggcccccagcccctgatgagcgagccccccgtgtactgcaacctggtggacctgagaagatgccccagaagccccccccccggccccgcctgccccctgctgcagagactggacgcctgggagcagcacctggaccccaacagcggcagatgcttctacatcaacagcctgaccggctgcaagagctggaagccccccagaagaagcagaagcgagaccaaccccggcagcatggagggcacccagaccctgaagagaaacaacgacgtgctgcagccccaggccaagggcttcagaagcgacaccggcacccccgagcccctggacccccagggcagcctgagcctgagccagagaaccagccagctggacccccccgccctgcaggcccccagacccctgccccagctgctggacgacccccacgaggtggagaagagcggcctgctgaacatgaccaagatcgcccagggcggcagaaagctgagaaagaactggggccccagctgggtggtgctgaccggcaacagcctggtgttctacagagagcccccccccaccgcccccagcagcggctggggccccgccggcagcagacccgagagcagcgtggacctgagaggcgccgccctggcccacggcagacacctgagcagcagaagaaacgtgctgcacatcagaaccatccccggccacgagttcctgctgcagagcgaccacgagaccgagctgagagcctggcacagagccctgagaaccgtgatcgagagactggacagagagaaccccctggagctgagactgagcggcagcggccccgccgagctgagcgccggcgaggacgaggaggaggagagcgagctggtgagcaagcccctgctgagactgagcagcagaagaagcagcatcagaggccccgagggcaccgagcagaacagagtgagaaacaagctgaagagactgatcgccaagagaccccccctgcagagcctgcaggagagaggcctgctgagagaccaggtgttcggctgccagctggagagcctgtgccagagagagggcgacaccgtgcccagcttcctgagactgtgcatcgccgccgtggacaagagaggcctggacgtggacggcatctacagagtgagcggcaacctggccgtggtgcagaagctgagattcctggtggacagagagagagccgtgaccagcgacggcagatacgtgttccccgagcagcccggccaggagggcagactggacctggacagcaccgagtgggacgacatccacgtggtgaccggcgccctgaagctgttcctgagagagctgccccagcccctggtgccccccctgctgctgccccacttcagagccgccctgggctag

SEQ ID NO: 36116 - protein, 257 aa, Artificial Sequence
  derived and/or modified sequence
MVAEKETLSLNKCPDKMPKRTKLLAQQPLPVHQPHSLVSEGFTVKAMMKNSVVRGPPAAGAFKERPTKPTAFRKFYERGDFPIALEHDSKGNKIAWKVEIEKLDYHHYLPLFFDGLCEMTFPYEFFARQGIHDMLEHGGNKILPVLPQLIIPIKNALNLRNRQVICVTLKVLQHLVVSAEMVGKALVPYYRQILPVLNIFKNMNVNSGDGIDYSQQKRENIGDLIQETLEAFERYGGENAFINIKYVVPTYESCLLN

SEQ ID NO: 36117 - DNA, 774 bp, Artificial Sequence
  derived and/or modified sequence
atggtggcggagaaggagacactgtccctgaacaagtgccccgacaagatgcccaaaagaacaaaactgctcgcacagcaacccctcccagtgcaccagccccattcactggtgtcggagggtttcaccgtgaaagccatgatgaagaatagcgttgtgcgcggacctccagctgctggggctttcaaagagaggccaaccaagcccaccgctttcagaaaattctacgagcgaggggattttcctattgctctggagcacgactcaaaaggtaataaaatagcctggaaggtcgaaatagaaaagctggactaccaccactaccttcctctgtttttcgatggtttgtgcgaaatgacttttccctacgagttttttgctcgacaggggattcatgacatgctggaacatgggggaaataaaatcctccccgtgttaccccagctcattattcccatcaagaacgccctaaacctccgaaacaggcaagtaatctgtgtaaccctgaaggttctgcagcacctcgtggtgtccgcagagatggtcggaaaggccctggtgccatactataggcaaatccttcctgttcttaatatcttcaaaaacatgaatgtgaactctggcgacggcatcgactactcacagcaaaagcgggagaacattggcgacttgatccaggagacactcgaggccttcgagaggtacgggggcgagaacgcgtttatcaatataaaatatgtggtgcctacttatgagtcttgtctgctgaattag

SEQ ID NO: 36118 - DNA, 774 bp, Artificial Sequence
  derived and/or modified sequence
atggtagcggagaaggagactctcagtctgaataagtgcccggacaaaatgcctaagcgcactaagctgctggctcaacaacccttaccagtacaccagcctcacagcctggtgtctgagggcttcacagttaaggccatgatgaaaaacagtgtggtgaggggtcccccggccgccggagcttttaaggaaagaccaactaagccaaccgccttcagaaagttctatgagaggggcgactttccaattgcgctggagcacgatagtaaaggcaacaagatagcgtggaaagttgagatagagaagctcgactatcaccattaccttcctctgttcttcgatggactctgtgagatgaccttcccatatgaattttttgctaggcagggtatacacgatatgctggaacacggtggaaataagattctgcccgttttgccacagttaattattcccatcaagaacgctttgaatcttcgcaaccgtcaggtcatctgtgtcactctcaaggtcttgcagcacctggtagtgtctgccgagatggtcggcaaggccctggtgccctattatagacaaatcctccctgttttgaacattttcaagaacatgaacgttaactccggggacggaattgattactcccagcaaaagcgagagaacatcggagacctaatccaagagaccctggaggcatttgaacggtatggaggtgagaacgcctttattaatatcaaatacgtggtgccgacatacgagtcatgcttgcttaattag

SEQ ID NO: 36119 - DNA, 774 bp, Artificial Sequence
  derived and/or modified sequence
atggtggccgagaaggagaccctgagcctgaacaagtgcccagacaagatgcccaagaggaccaagctgctggcccagcagcccctgcctgtgcaccagccccacagcctggtgtctgagggcttcaccgtgaaggccatgatgaagaacagcgtggtgcggggccccccagctgctggggccttcaaggagcggcccaccaagcccacagccttcaggaagttctatgaaagaggagacttccccatcgccctggagcatgacagcaagggcaacaagatcgcctggaaggtggagattgagaagctggactaccaccactacctgcccctcttctttgatggcctgtgtgagatgaccttcccctatgagttctttgcccggcagggcatccatgacatgctggagcacggcggcaacaagatcctgcctgtgctgccccagctgatcatccccatcaagaatgccctgaacctgaggaaccggcaggtgatctgtgtgaccctgaaggtgctgcagcacctggtggtgtctgctgagatggtgggcaaggccctggtgccctactaccggcagatcctgcctgtgctgaacatcttcaagaacatgaatgtgaacagcggagatggcatcgactacagccagcagaagagagaaaatattggagacctgatccaggagaccctggaggcctttgaaagatatggaggagaaaatgccttcatcaacatcaagtatgtggtgcccacctatgagagctgcctgctgaactag

SEQ ID NO: 36120 - DNA, 774 bp, Artificial Sequence
  derived and/or modified sequence
atggtggccgagaaggagaccctgagcctgaacaagtgccccgacaagatgcccaagcggacgaaattgctggcccagcagccgctcccggttcaccagccgcattcacttgtatccgagggtttcacggtgaaagccatgatgaagaactcagtggtgcggggcccacccgccgccggcgccttcaaggaacgaccaactaagcccacggcttttcggaagttctacgaaaggggcgactttccgatcgccctggagcacgactctaaggggaataaaatcgcttggaaggtggagattgaaaagctggactaccatcattacctgccactatttttcgatggactgtgtgagatgacattcccttacgagtttttcgccaggcagggtatacacgatatgctggagcatggcggtaataagatcctcccggtccttccacagctcattatccccatcaagaacgccctcaatcttagaaatcgccaggtaatttgtgtgaccctgaaggtgctacagcatttggtcgtttccgcggaaatggtgggtaaggcgctcgtgccctattaccggcagattcttcccgtcctgaacatattcaagaatatgaacgtgaactcaggtgacggcatcgactacagccagcaaaagagagagaacattggggacctcatccaggaaacgctggaggcttttgaacgctacgggggagaaaatgccttcataaatatcaaatatgttgtccccacttacgaatcctgtctgctcaattag

SEQ ID NO: 36121 - DNA, 774 bp, Artificial Sequence
  derived and/or modified sequence
atggtggccgagaaggagaccctgagcctgaacaagtgccccgacaaaatgccaaagcgtacaaagctgctggcccagcagcctctgcccgtgcatcagccacatagcctggtttcagaggggtttactgtcaaggctatgatgaagaattcagtggttcgagggccaccggctgccggagctttcaaggagcggcccacaaaacccacagcctttcgcaagttctatgaaagaggtgactttcctattgccctcgagcacgacagcaaaggcaataaaatcgcttggaaggttgagatcgaaaaactggactaccaccattacctcccccttttttttgatgggctgtgcgagatgacgttcccctatgagttcttcgctaggcaaggaattcatgatatgctggaacacggcggaaacaagattctcccagtgctgccacagctcataattcctatcaaaaatgcccttaatctgcgaaacagacaggtgatctgcgtaaccctcaaggttctgcaacatttagtagtttcagctgaaatggtcggcaaagctcttgtgccttattatcgacagatactgcctgtgttaaatatatttaaaaacatgaacgtcaattctggcgacggcatcgattactctcagcagaagcgggagaatataggcgaccttatccaagaaactcttgaggcatttgagagatacggtggagagaacgccttcattaacatcaagtacgtggtacccacatacgaatcctgtttactaaattag

SEQ ID NO: 36122 - DNA, 1373 bp, Artificial Sequence
  derived and/or modified sequence
gtgttgaccagtcgcttagcaaccgggaggcttacctttggaagcttgttgcagctctagccaaggtcctgccctcttcccgccccgcccctagggtccagctcccttcacctaggagctgccaaacatctggatcaacctgggcactacgaggggttgaatttctaccattatcgcgccttttgatatttttttccagacctcctgctcacatccgtaaagcccactgattcttttactacactttttatgagaacaagacattttctaggaagatggtggcagaaaaagagaccctgagcttaaacaaatgcccagacaagatgccgaagaggaccaagctgctggcacaacagccgctcccggtgcaccagcctcactctctggtttctgagggtttcacagtcaaagccatgatgaaaaactcagtcgtgagaggccctccagctgcaggggcatttaaagaaagaccaaccaagcccacagcatttcgaaaattctatgagcgaggtgacttcccaattgcccttgagcatgattcgaaaggaaacaaaatcgcctggaaggtagaaattgagaagctggattaccatcattatctgcctctgttttttgatgggctttgtgaaatgacatttccctatgagttttttgctcggcaaggaatccacgacatgctggaacacggtgggaacaagatcctacctgtccttccacagctcattatcccgataaaaaatgccttgaacctccgaaaccgacaggtcatctgtgtcactctcaaggtcctccagcatctggttgtgtcagctgagatggtgggcaaggccttggtgccttattaccgtcaaatcctccctgtcctgaacatctttaagaatatgaatgtgaactccggagacggcattgactacagccagcagaagagggagaacattggggacttgatccaggagacactggaggccttcgagcgctacggaggagaaaatgcctttatcaacattaagtacgtggtcccaacctacgagtcttgcttgctaaactaacagtggcagcagctgggacttgaaacctcccgttggtgttgggatcatctgtctctgttgcttttagcatctcattccttgtgacttccacagctttcttttctacagctgctaaaatagtggcttatgggccattggactgttagccctattgagagcaaggctttccaatacataaatagtgtctgtttcttagattacaatagtgtactgtgcttatttgttctaagagaagaattgcttctttatacagctccgacagaagcaggagtccgagttaaaccttcagttgtatagacaataaactataattttcatatgcaa

SEQ ID NO: 36123 - DNA, 1503 bp, Artificial Sequence
  derived and/or modified sequence
agatctatctggaggagtttctgtggagccagccaccctcaccaggtgccttccattagagtttaatgctttgctgcggtttcctgaaagagccccacagagagtgggtctcgatgggtcctgaaccgcaccacaaccggccagtgagacctcctgctcacatccgtaaagcccactgattcttttactacactttttatgagaacaagacattttctaggaagatggtggcagaaaaagagaccctgagcttaaacaaatgcccagacaagatgccgaagaggaccaagctgctggcacaacagccgctcccggtgcaccagcctcactctctggtttctgagggtttcacagtcaaagccatgatgaaaaactcagtcgtgagaggccctccagctgcaggggcatttaaagaaagaccaaccaagcccacagcatttcgaaaattctatgagcgaggtgacttcccaattgcccttgagcatgattcgaaaggaaacaaaatcgcctggaaggtagaaattgagaagctggattaccatcattatctgcctctgttttttgatgggctttgtgaaatgacatttccctatgagttttttgctcggcaaggaatccacgacatgctggaacacggtgggaacaagatcctacctgtccttccacagctcattatcccgataaaaaatgccttgaacctccgaaaccgacaggtcatctgtgtcactctcaaggtcctccagcatctggttgtgtcagctgagatggtgggcaaggccttggtgccttattaccgtcaaatcctccctgtcctgaacatctttaagaatatgaatgtgaactccggagacggcattgactacagccagcagaagagggagaacattggggacttgatccaggagacactggaggccttcgagcgctacggaggagaaaatgcctttatcaacattaagtacgtggtcccaacctacgagtcttgcttgctaaactaacagtggcagcagctgggacttgaaacctcccgttggtgttgggatcatctgtctctgttgcttttagcatctcattccttgtgacttccacagctttcttttctacagctgctaaaatagtggcttatgggccattggactgttagccctattgagagcaaggctttccaatacataaatagtgtctgtttcttagattacaatagtgtactgtgcttatttgttctaagagaagaattgcttctttatacagctccgacagaagcaggagtccgagttaaaccttcagttgtatagacaataaactataattttcatatgcaattcagcaattgctgttctgtgtgtgcctgccctgggggtgatgtcagaggttgtaagggaagagtttatgctgactgcttactaggtgtttgtcatggaagagaagcatgggttcagcagtgcctctctagcagctgtgcggaataatgtgctttgacattcaataaaactgttgaatcta

SEQ ID NO: 36124 - DNA, 774 bp, Artificial Sequence
  derived and/or modified sequence
atggttgccgagaaagagaccctcagtttaaacaagtgtcccgataagatgcctaaacggactaaactgctggcacaacagccccttcctgtacaccagcctcactccctggtttccgaaggtttcactgtaaaggccatgatgaaaaactcggtggtgcgaggccctcctgctgccggagcattcaaggagcgcccaacgaaaccaactgcctttagaaagttttatgagagaggtgattttcccatcgccttggaacacgactccaagggcaacaagatcgcttggaaggtggagatcgagaagttggactatcatcactatctgcccctgtttttcgacggactgtgtgaaatgacattcccgtatgagttcttcgctcgccagggcattcacgacatgttggagcacggtggaaacaagattctgcctgttttgccccaactgatcattcccatcaaaaacgctcttaacttgcggaaccgtcaagtgatttgcgtgacattgaaggtccttcaacacctcgtagtaagcgctgagatggtaggcaaggctctggtgccctattataggcagattctacccgtattaaacatttttaagaatatgaacgtgaactccggtgacggtatcgactactcccagcagaagagagaaaatataggtgatctgattcaggagacactggaagcctttgaacgttacggcggagagaatgcatttattaacatcaagtatgtcgttccgacatacgagtcttgcctgctgaactag

SEQ ID NO: 36125 - DNA, 774 bp, Artificial Sequence
  derived and/or modified sequence
atggtcgccgagaaggagaccttaagtctgaacaaatgccctgacaagatgcccaaacgcaccaagctactggctcagcaaccactgcctgttcaccagcctcacagcttagtgtctgaagggttcaccgtgaaggctatgatgaagaatagtgtggtgcgtggtcctccagcggcaggtgccttcaaggaaagaccaaccaagcctacagcattccggaaattctacgagcggggtgatttccccattgccttagagcacgacagcaagggcaacaaaattgcctggaaagtggaaatagagaaactggattaccatcattacctacccttgttcttcgacggcctctgtgagatgacttttccttatgaatttttcgccagacagggcattcacgatatgctggagcacggcggtaacaagattctgccggtgctgcctcagctgataattcccattaagaacgccttgaacttgagaaatcggcaagttatttgtgtgacattaaaggttcttcagcatttagtcgtgtccgctgagatggtgggcaaagccttggtaccttattatcgccagatcttgccagtgctgaatattttcaagaacatgaacgtcaatagcggcgacggcatagactactcgcagcaaaagcgggaaaacataggtgaccttattcaagagacactggaagcttttgaacggtatggcggagagaacgctttcatcaacatcaagtatgtagtgcccacctacgaatcatgcttgctcaactag

SEQ ID NO: 36126 - DNA, 774 bp, Artificial Sequence
  derived and/or modified sequence
atggtggccgagaaggagaccctgagcctgaacaagtgccccgacaagatgcccaagagaaccaagctgctggcccagcagcccctgcccgtgcaccagccccacagcctggtgagcgagggcttcaccgtgaaggccatgatgaagaacagcgtggtgagaggcccccccgccgccggcgccttcaaggagagacccaccaagcccaccgccttcagaaagttctacgagagaggcgacttccccatcgccctggagcacgacagcaagggcaacaagatcgcctggaaggtggagatcgagaagctggactaccaccactacctgcccctgttcttcgacggcctgtgcgagatgaccttcccctacgagttcttcgccagacagggcatccacgacatgctggagcacggcggcaacaagatcctgcccgtgctgccccagctgatcatccccatcaagaacgccctgaacctgagaaacagacaggtgatctgcgtgaccctgaaggtgctgcagcacctggtggtgagcgccgagatggtgggcaaggccctggtgccctactacagacagatcctgcccgtgctgaacatcttcaagaacatgaacgtgaacagcggcgacggcatcgactacagccagcagaagagagagaacatcggcgacctgatccaggagaccctggaggccttcgagagatacggcggcgagaacgccttcatcaacatcaagtacgtggtgcccacctacgagagctgcctgctgaactag

SEQ ID NO: 36127 - protein, 396 aa, Artificial Sequence
  derived and/or modified sequence
MSWSFLTRLLEEIHNHSTFVGKIWLTVLIVFRIVLTAVGGESIYYDEQSKFVCNTEQPGCENVCYDAFAPLSHVRFWVFQIILVATPSVMYLGYAIHKIAKMEHGEADKKAARSKPYAMRWKQHRALEETEEDNEEDPMMYPEMELESDKENKEQSQPKPKHDGRRRIREDGLMKIYVLQLLARTVFEVGFLIGQYFLYGFQVHPFYVCSRLPCPHKIDCFISRPTEKTIFLLIMYGVTGLCLLLNIWEMLHLGFGTIRDSLNSKRRELEDPGAYNYPFTWNTPSAPPGYNIAVKPDQIQYTELSNAKIAYKQNKANTAQEQQYGSHEENLPADLEALQREIRMAQERLDLAVQAYSHQNNPHGPREKKAKVGSKAGSNKSTASSKSGDGKTSVWI

SEQ ID NO: 36128 - DNA, 1191 bp, Artificial Sequence
  derived and/or modified sequence
atgagttggagctttcttacaaggttgctggaagaaatccataaccactctacgtttgttggaaaaatctggctcacagttttgatcgtctttaggatcgttctgactgctgtggggggagagtctatttactatgacgagcaaagcaagttcgtctgcaacaccgagcagcctggatgtgagaatgtctgttacgacgcctttgcacctctgtcgcatgtccgattctgggtatttcagattatccttgtggctacgcccagcgttatgtacttgggttacgccatccacaaaatcgccaagatggaacacggcgaggccgataagaaggccgcccggagtaagccttatgctatgcgatggaagcaacacagggctctggaggaaacagaggaagacaatgaggaggacccgatgatgtacccagagatggaactggagtccgataaagagaataaggaacagagccagcctaagccaaaacacgatggacgcaggcgtattagggaggacggccttatgaagatctacgtgctccagcttcttgcacgcactgttttcgaggtaggttttttaattggacagtactttctgtacgggttccaggtgcatcccttctacgtctgctcaaggctgccttgtcctcacaagatcgactgtttcatctccagaccgaccgagaaaaccatatttctcctgatcatgtacggagttaccggcctttgtttattactgaacatctgggaaatgctgcatctggggttcgggactatccgcgactctctgaatagcaaacgtcgggagctggaggatcctggcgcgtacaattaccccttcacctggaatacaccttcagccccaccaggctacaatattgccgttaaacctgaccaaattcagtacacagaactgagtaatgctaagatcgcttacaagcagaataaggccaatacagcccaagagcaacaatacgggagtcatgaggagaacctcccagcggatctggaggcgctgcagcgagagattagaatggcccaggagcgcctggacctagctgtccaggcctatagccaccagaacaaccctcacgggccaagggagaagaaggcaaaggtggggagtaaggccggttccaacaagagcacagcctcctctaaatcgggcgacggaaaaacatccgtgtggatctag

SEQ ID NO: 36129 - DNA, 1191 bp, Artificial Sequence
  derived and/or modified sequence
atgtcatggtcctttctcacccgcctgctggaagagatacataaccattccacgttcgtcggaaagatttggctgaccgtgctcatcgtgttcagaatcgtcctgaccgccgtaggaggggaatctatctactacgatgagcagagcaaattcgtgtgcaatacagaacagcctggttgcgaaaacgtgtgctacgatgcatttgctcctctgtcccacgttagattttgggtgtttcaaatcattctcgtggcaaccccctcagtcatgtatttgggatacgccattcacaagatcgcgaagatggagcatggagaggcagacaaaaaagccgcccgatcaaagccttatgctatgcggtggaagcagcaccgtgcgcttgaagaaactgaggaggacaacgaggaggaccccatgatgtatcctgaaatggagctcgagtcggacaaggagaataaagagcagagccaaccgaaacccaaacacgacggtagaagacggattcgggaagacggtctgatgaagatatacgtgctgcagctcctggcccgaacagtattcgaggtgggatttctgatcggccaatacttcctatatggatttcaggtacatcctttctatgtatgtagtcggttgccatgtccacacaaaattgactgttttattagtaggccaactgagaaaacaatcttcctgctgattatgtacggagtaacaggcctctgcctgcttctgaacatttgggagatgctgcatttgggcttcggcaccatacgagattccctaaacagtaagaggcgggagctggaggacccgggagcttacaactatccattcacttggaataccccatctgcccctccggggtacaatattgccgtgaagcctgaccagatccaatacaccgagttgagcaatgccaaaatcgcctataagcagaacaaggccaacaccgcccaggaacaacagtatggctcacacgaagagaacctgccggccgaccttgaagctctccaacgggagattagaatggcccaagaaagactggatctggccgtccaggcttattctcatcaaaacaatccacacgggcctcgtgagaagaaggctaaggtcggctctaaggctggatccaacaagtctacagctagctccaaatctggcgacggcaaaactagcgtgtggatttag

SEQ ID NO: 36130 - DNA, 7644 bp, Artificial Sequence
  derived and/or modified sequence
ggcagcggcgggagcggcttctgcctcggctggagactgaggcgaaggcggcagcggcggaggaggtggaggagaggcgagggtgaaggcgatggcgacgcggggcacatgaggccgcgaccggcgggacgggccgaggcccggcggaggaggcggctccgggggaacccgccgccggagggaatctggaaaaattgcaatcaaaacatcatttctctaagaaaattttgggtaaccgaagttctggacaacagggcataccaattcaatcaccatgagttggagcttcctgactcgcctgctagaggagattcacaaccattccacatttgtggggaagatctggctcactgttctgattgtcttccggatcgtccttacagctgtaggaggagaatccatctattacgatgagcaaagcaaatttgtgtgcaacacagaacagccgggctgtgagaatgtctgttatgatgcgtttgcacctctctcccatgtacgcttctgggtgttccagatcatcctggtggcaactccctctgtgatgtacctgggctatgctatccacaagattgccaaaatggagcacggtgaagcagacaagaaggcagctcggagcaagccctatgcaatgcgctggaaacaacaccgggctctggaagaaacggaggaggacaacgaagaggatcctatgatgtatccagagatggagttagaaagtgataaggaaaataaagagcagagccaacccaaacctaagcatgatggccgacgacggattcgggaagatgggctcatgaaaatctatgtgctgcagttgctggcaaggaccgtgtttgaggtgggttttctgatagggcagtattttctgtatggcttccaagtccacccgttttatgtgtgcagcagacttccttgtcctcataagatagactgctttatttctagacccactgaaaagaccatcttccttctgataatgtatggtgttacaggcctttgcctcttgcttaacatttgggagatgcttcatttagggtttgggaccattcgagactcactaaacagtaaaaggagggaacttgaggatccgggtgcttataattatcctttcacttggaatacaccatctgctccccctggctataacattgctgtcaaaccagatcaaatccagtacaccgaactgtccaatgctaagatcgcctacaagcaaaacaaggccaacacagcccaggaacagcagtatggcagccatgaggagaacctcccagctgacctggaggctctgcagcgggagatcaggatggctcaggaacgcttggatctggcagttcaggcctacagtcaccaaaacaaccctcatggtccccgggagaagaaggccaaagtggggtccaaagctgggtccaacaaaagcactgccagtagcaaatcaggggatgggaagacctccgtctggatttaatcctggcgggcttaaaacctgtgcttttcatagtttatggtaagcagcagctcactgaataatgacttccattgagtaaacatttggctctggttatcttcagggatgctgttggctcatgatccaagctcaggggactctggaggcggggctgggctgagggagagaaagggaaacacagtgttcccaggcacatgttcttagcaataatacagttgcagaactttacatttgtgtcttccagatctggagaagaacagacatatttaaatcattcttgttgaacagtttttgtatgtacagtattatggtacttttttttttttagtatgagaactttttttgtatttgtacattgaactgctgtagttatacttttatattaaaggggaaaaagtccttataaataatgcctattaggctagtgctattactttgttcagcaaattctaccctggctttagagtttttaatagatgctacacctaataaaagtgcctctcatattgcaggaacgatttcagatgtgtaaggagactgaagaggagataccagtttttagtcttggaaagcaagttcacagtagaaggaggttgagatctttcttttatgtgagaaatctttgaatctcattcatgcgatcagagttgtagccaatttttgaaaaccttattttcaaaggaaataaatgattcactgtaggattcctttaaatatcaagcatcaccagtatatgctttgatggtatatgtatataacttaaagttctttcaaaagcctgatacagaaacgtgtccccagtttggtagcaatgtggaaaacctggctagagatgatatggagctgtccctcagaaagcaaagccatgcctggaatccctaataggctgcttagttgtgaacctgtttgatttgccttaagcctctatccagaaacctgcccgcttccgtctggttaagaagccagtggtggatattttctttgttaacattagaaatgcaaacattcccttgtcaaccaagaatactcaaagctacttgtattggaaatggcagaaggcctaaatccaaatttcttattttttataatttaccatagaagttttgtgattaaattcttacttctgccagtggaggtttatgcctgaaaggtcatggggtcctgtctgtaaatagacctaaagagaagtgcagtatttattctttgtaggcataatgtgtttgtcactgacaagcattcatgttcatcccactagtcttttattgcagtcttttattgtcattttcagccttatgttggagagctttgctttctcatcatgttcacattgtcttaagttttgtgagcttctgagaaagagcttggtaaaggtttaaaggggactttgttccaccagggagcattttatttgggcgtctcacccttttctaatgaaagctgttgtaagccacctctgacttggaaattctgaaagtatgaatattttttatatcttaattgtaaaatgccagttctccattatttagatgaatagtagaacactgcaccctttgtgcagtgtttttgtttctctactgcattcctacccccaccaaaaaaaagaaacttaaggaaatttttttttgagacagggtctccctctttcacccaggctggagtgcagcagcatgatctcagctcactgcagcctctgcctcccaggctcaagcaatcattccacctcagcctcttgattagctgggactacaggcatgtgccaccatactcggctaattctgttttaaaaattttttttgtagagatgaggtctcactatgttacccaggctggtctcgaacttttgggttcaagtgatcctcccgcctcagcctctcaaagtgttagtattataggtgtgagccaccatgcccagcctagaaaatttaaccttatcttttagccattcatttacttttatttgcttttttaaaaaaaaatctttaaattttagcctagagaagcacctcaggaactctaaacatcttaggcaaaaattaaactcaggtgagactgaaggagaaatttcagaaatacacatgtacctcatgggtaattaatagacatgcacagtttccttcaaatcaaatgtttaataaggaaattcatataattccaagaaaacaggcaaaatttggaatacataagcctagctaagataaagaactaccagttaattcttaacatcactggagcttccagcaggttttttaattgaaggacaaaaagtgtccatacatttgtgttatctcttcagagcctgagggagaagagagtggctttgcccagtggaaaggctggggatttgagaatgatacagggggaaggagtcaagcagaaatgccaggaagaaccaggcaaagacatttggcgccagaagcatccacttaatttctgtgaagagtgcccctggtgtttcatcttggcctgttttgatgagaatgttatcttttgtgtctggataacgcgtcagcttcttaaagtacatataaagatattctgtcacctccccacatgcacacacttttaaaatctatttttattctcttgctaaagttgtaattatgtcaagaattttccagctctaactgccttcttagtacatgtctttctgcctttgaagcatatgagtttgccaaagtcattctcccctaatgacatattgtggacttacattaagaaaatgggccaggcgcggtggctcacacctgtaatcccagcactttaggaggcccaggcgggtggattacctgaggtcaggagttcaagaccagactggtcaacatggtgaaactccatctctactaaaaatacagaaattagccaggagtgctgggtggacgcctgcaatcccagctacttgggaggttgaggcaggagaattgcttgaacccaggaggcagaggttgcagtgagctgagatcataccattgcactccagcctgcaagacagagtgaaactcttgtctcaaaaaaaaaaaaagaaaaaaagaaagtgagcctgttgatgtctagctaacccattggtggagtctgcattgaatctgtaagaatattgttctggatcatgcaggtgggatttgtataaaaagcctgtccaacatttagttctcactcgcatcagaatcatactgttttgaattgccatataagacatgctccatcatgacacttgcttctcctccaaatacaagttgagtgcttagtccttcacctgctagaatcaggatacaatcaacatgattatgttccttaacacacttggatttatgcagatgtggtgtgtcctttgctcttttttttcttaagacagagtcttgctcttgtcgctcaggctggagtgcagtggtgtgatttcggctcactgcaacctccgcctcctgggttcaagcgattctcctgcctcagcctcccgagtagctgggattacaggcaccaccaccataccaggctgattttttttgtatttttaatatagacagggcttcatcatgttggccaggctggcaggctggtctcgaactcctcacctcgtgatccgcccacctcagcttcccaaagtgctgtgattacaggcgtgagccaccgcgcctggcctgctcttaaaacccgttattcagaagatttgtaaaagaaataggctttttttttttttttggttaattcaaacgaggggaaaattagatagcattttcccctaaagaaatgttaatgttcattttgtggctttgttttcaagtttcaggagccatgtacatctcagaagtgttacgaagtgattagaaaaggcctctggtaaaagaccttcaaggaccaaccattattattggtcacttgtttgaacttggcgcttaaaaaaaaagttggactgtgatgctttggtgctctttatcacagacatcagtgatggtctgaaacactctctagcagtttatacgaagaatggacttacatgttatcagttacactcatgatttactcgttcagcttctacaagtccatactttatgctgtctcatttaagagacagtccacttctgaaaataaaatcgatagttgatgatacatttttggctagccagctttctgtaaaaggcaagtatgttagacatgcacagtttccttcaaatcaaatgtttaataaggtacttcaagaaacgcctttttaaaaatcaaaggttttggccaggcatggtggctcacgcctgtaatcccagcactttgggaggccaaggtgggcgaatcacaaggtcaggagtttgagaccagcctggccaacatggtgaaaccccgtctctactaaaaataccaaaaattagccgggcgtggtggtgggtacctgtaatcccagctactcaggaggctgagatgagaatcacttgatcccaggaggtagaggttgcagtgagccgagattgcgccattgcacttcagcctgggcaacgagtgaaactctcaaaaaaaaattcatagtaataataaagtccctgcatgcagtttggaaataaaatttaaactcatttatgtgtaataaatatgtaataattcacagtcaccatcaaatgttggaatcattgaattgcatacttgtactcattccggccacatcatgaagtgtttaaagatttgtatttgctgttgtccctatgtagttctattgatgtttggttttgttttttggggtttgttttgagcccaggctagagtgcaatggcacaatctcaactcactacagcctggacctccttggctcaagcagtcctcccacttcagcctcccaagtagctggtctgcaagtgctcaccaccacacctggctaatttttgtattttttgtagagacagagctctcactatgttgcctagactggtctcaaactcctgggcccaagcaatcctcccatcacagcctccgaaggtgctgggattacaggcataagccactgtgcccagcctgtttttaataatgatattaagtgggtttggttcatgtgttattaatcagtgttaataatcgtacttttttttttttttaaaagaaaccatggtattctaaaatcaggagtccaaataaaagaaagttctcggctgtgcatggtggctaacacctgtaatcccagcactttgggaggctgaggtgggtggatcactagaggtcaggagtttgaaacaagcctggccaacatggtaaaaccccctctctactaaaaatacaaaaattagccgggcatggtggtgcacacctgtaatcccagctactcgggatgttgaggcatgagatttccttgaacctggaaggcagaggttgctgtgagccgagatcgcgccactgcactccagcctgggtgacagagtaagactgtcgccaaaaaagaggaaaaaagttatccagtgcagtttctacagagataaaagaagtaatagttctggctgggtgtggtggcttatgcctgtaatcccaacactttgggaggccaaggcaggtggatcacatgaggtcaggagttcgagaccagcctggccaacatggcaaaactgtctctactaaaaatataaaaattaggtatggtggcacgtgcctgtacttacagctacttgggaggctgaggcatgagatgacaatctcttgaacccaggaggcggaggttgcagtgagctgagattgcaccactgcactccagcttgggtgatggagtgagactcaaataaaaaaggtactagttctgcatttcagagttggcttgttgaaccaggctatatgcttccaagatttaaatgtttttctgtattatactctcaattgtgttttaaaaaaatctcttacagaaatctctacctcaggcactaagtgttatgacatgggtagcatattgatattgaaaacttagctaggacttccagccttttaagataatttaaatgtaaaattaaatggttaaccagcaatctaatgtcatgtggtgtgcagtttggatattgcatgaacagctaaggaatcacctgttctagtgccaaagatcactcattgctaattttgttctgtacagcttatgtaatattttcatggtggagacggactctgtgtgctcagggccttgtctctaggaagattttgtcaattccaaatacagttttgaagattca

SEQ ID NO: 36131 - DNA, 7640 bp, Artificial Sequence
  derived and/or modified sequence
actgctaagagccccgactctagctagatccacgcagggcccgccagatcctcgaggaattgtagagcagaacctgggaggagacattagcatcccgtgctacaatggaccaaggcctcggcggagcgcgcagaagacaactctgggcccgctaaaccaacccaggatacccagagggaatctggaaaaattgcaatcaaaacatcatttctctaagaaaattttgggtaaccgaagttctggacaacagggcataccaattcaatcaccatgagttggagcttcctgactcgcctgctagaggagattcacaaccattccacatttgtggggaagatctggctcactgttctgattgtcttccggatcgtccttacagctgtaggaggagaatccatctattacgatgagcaaagcaaatttgtgtgcaacacagaacagccgggctgtgagaatgtctgttatgatgcgtttgcacctctctcccatgtacgcttctgggtgttccagatcatcctggtggcaactccctctgtgatgtacctgggctatgctatccacaagattgccaaaatggagcacggtgaagcagacaagaaggcagctcggagcaagccctatgcaatgcgctggaaacaacaccgggctctggaagaaacggaggaggacaacgaagaggatcctatgatgtatccagagatggagttagaaagtgataaggaaaataaagagcagagccaacccaaacctaagcatgatggccgacgacggattcgggaagatgggctcatgaaaatctatgtgctgcagttgctggcaaggaccgtgtttgaggtgggttttctgatagggcagtattttctgtatggcttccaagtccacccgttttatgtgtgcagcagacttccttgtcctcataagatagactgctttatttctagacccactgaaaagaccatcttccttctgataatgtatggtgttacaggcctttgcctcttgcttaacatttgggagatgcttcatttagggtttgggaccattcgagactcactaaacagtaaaaggagggaacttgaggatccgggtgcttataattatcctttcacttggaatacaccatctgctccccctggctataacattgctgtcaaaccagatcaaatccagtacaccgaactgtccaatgctaagatcgcctacaagcaaaacaaggccaacacagcccaggaacagcagtatggcagccatgaggagaacctcccagctgacctggaggctctgcagcgggagatcaggatggctcaggaacgcttggatctggcagttcaggcctacagtcaccaaaacaaccctcatggtccccgggagaagaaggccaaagtggggtccaaagctgggtccaacaaaagcactgccagtagcaaatcaggggatgggaagacctccgtctggatttaatcctggcgggcttaaaacctgtgcttttcatagtttatggtaagcagcagctcactgaataatgacttccattgagtaaacatttggctctggttatcttcagggatgctgttggctcatgatccaagctcaggggactctggaggcggggctgggctgagggagagaaagggaaacacagtgttcccaggcacatgttcttagcaataatacagttgcagaactttacatttgtgtcttccagatctggagaagaacagacatatttaaatcattcttgttgaacagtttttgtatgtacagtattatggtacttttttttttttagtatgagaactttttttgtatttgtacattgaactgctgtagttatacttttatattaaaggggaaaaagtccttataaataatgcctattaggctagtgctattactttgttcagcaaattctaccctggctttagagtttttaatagatgctacacctaataaaagtgcctctcatattgcaggaacgatttcagatgtgtaaggagactgaagaggagataccagtttttagtcttggaaagcaagttcacagtagaaggaggttgagatctttcttttatgtgagaaatctttgaatctcattcatgcgatcagagttgtagccaatttttgaaaaccttattttcaaaggaaataaatgattcactgtaggattcctttaaatatcaagcatcaccagtatatgctttgatggtatatgtatataacttaaagttctttcaaaagcctgatacagaaacgtgtccccagtttggtagcaatgtggaaaacctggctagagatgatatggagctgtccctcagaaagcaaagccatgcctggaatccctaataggctgcttagttgtgaacctgtttgatttgccttaagcctctatccagaaacctgcccgcttccgtctggttaagaagccagtggtggatattttctttgttaacattagaaatgcaaacattcccttgtcaaccaagaatactcaaagctacttgtattggaaatggcagaaggcctaaatccaaatttcttattttttataatttaccatagaagttttgtgattaaattcttacttctgccagtggaggtttatgcctgaaaggtcatggggtcctgtctgtaaatagacctaaagagaagtgcagtatttattctttgtaggcataatgtgtttgtcactgacaagcattcatgttcatcccactagtcttttattgcagtcttttattgtcattttcagccttatgttggagagctttgctttctcatcatgttcacattgtcttaagttttgtgagcttctgagaaagagcttggtaaaggtttaaaggggactttgttccaccagggagcattttatttgggcgtctcacccttttctaatgaaagctgttgtaagccacctctgacttggaaattctgaaagtatgaatattttttatatcttaattgtaaaatgccagttctccattatttagatgaatagtagaacactgcaccctttgtgcagtgtttttgtttctctactgcattcctacccccaccaaaaaaaagaaacttaaggaaatttttttttgagacagggtctccctctttcacccaggctggagtgcagcagcatgatctcagctcactgcagcctctgcctcccaggctcaagcaatcattccacctcagcctcttgattagctgggactacaggcatgtgccaccatactcggctaattctgttttaaaaattttttttgtagagatgaggtctcactatgttacccaggctggtctcgaacttttgggttcaagtgatcctcccgcctcagcctctcaaagtgttagtattataggtgtgagccaccatgcccagcctagaaaatttaaccttatcttttagccattcatttacttttatttgcttttttaaaaaaaaatctttaaattttagcctagagaagcacctcaggaactctaaacatcttaggcaaaaattaaactcaggtgagactgaaggagaaatttcagaaatacacatgtacctcatgggtaattaatagacatgcacagtttccttcaaatcaaatgtttaataaggaaattcatataattccaagaaaacaggcaaaatttggaatacataagcctagctaagataaagaactaccagttaattcttaacatcactggagcttccagcaggttttttaattgaaggacaaaaagtgtccatacatttgtgttatctcttcagagcctgagggagaagagagtggctttgcccagtggaaaggctggggatttgagaatgatacagggggaaggagtcaagcagaaatgccaggaagaaccaggcaaagacatttggcgccagaagcatccacttaatttctgtgaagagtgcccctggtgtttcatcttggcctgttttgatgagaatgttatcttttgtgtctggataacgcgtcagcttcttaaagtacatataaagatattctgtcacctccccacatgcacacacttttaaaatctatttttattctcttgctaaagttgtaattatgtcaagaattttccagctctaactgccttcttagtacatgtctttctgcctttgaagcatatgagtttgccaaagtcattctcccctaatgacatattgtggacttacattaagaaaatgggccaggcgcggtggctcacacctgtaatcccagcactttaggaggcccaggcgggtggattacctgaggtcaggagttcaagaccagactggtcaacatggtgaaactccatctctactaaaaatacagaaattagccaggagtgctgggtggacgcctgcaatcccagctacttgggaggttgaggcaggagaattgcttgaacccaggaggcagaggttgcagtgagctgagatcataccattgcactccagcctgcaagacagagtgaaactcttgtctcaaaaaaaaaaaaagaaaaaaagaaagtgagcctgttgatgtctagctaacccattggtggagtctgcattgaatctgtaagaatattgttctggatcatgcaggtgggatttgtataaaaagcctgtccaacatttagttctcactcgcatcagaatcatactgttttgaattgccatataagacatgctccatcatgacacttgcttctcctccaaatacaagttgagtgcttagtccttcacctgctagaatcaggatacaatcaacatgattatgttccttaacacacttggatttatgcagatgtggtgtgtcctttgctcttttttttcttaagacagagtcttgctcttgtcgctcaggctggagtgcagtggtgtgatttcggctcactgcaacctccgcctcctgggttcaagcgattctcctgcctcagcctcccgagtagctgggattacaggcaccaccaccataccaggctgattttttttgtatttttaatatagacagggcttcatcatgttggccaggctggcaggctggtctcgaactcctcacctcgtgatccgcccacctcagcttcccaaagtgctgtgattacaggcgtgagccaccgcgcctggcctgctcttaaaacccgttattcagaagatttgtaaaagaaataggctttttttttttttttggttaattcaaacgaggggaaaattagatagcattttcccctaaagaaatgttaatgttcattttgtggctttgttttcaagtttcaggagccatgtacatctcagaagtgttacgaagtgattagaaaaggcctctggtaaaagaccttcaaggaccaaccattattattggtcacttgtttgaacttggcgcttaaaaaaaaagttggactgtgatgctttggtgctctttatcacagacatcagtgatggtctgaaacactctctagcagtttatacgaagaatggacttacatgttatcagttacactcatgatttactcgttcagcttctacaagtccatactttatgctgtctcatttaagagacagtccacttctgaaaataaaatcgatagttgatgatacatttttggctagccagctttctgtaaaaggcaagtatgttagacatgcacagtttccttcaaatcaaatgtttaataaggtacttcaagaaacgcctttttaaaaatcaaaggttttggccaggcatggtggctcacgcctgtaatcccagcactttgggaggccaaggtgggcgaatcacaaggtcaggagtttgagaccagcctggccaacatggtgaaaccccgtctctactaaaaataccaaaaattagccgggcgtggtggtgggtacctgtaatcccagctactcaggaggctgagatgagaatcacttgatcccaggaggtagaggttgcagtgagccgagattgcgccattgcacttcagcctgggcaacgagtgaaactctcaaaaaaaaattcatagtaataataaagtccctgcatgcagtttggaaataaaatttaaactcatttatgtgtaataaatatgtaataattcacagtcaccatcaaatgttggaatcattgaattgcatacttgtactcattccggccacatcatgaagtgtttaaagatttgtatttgctgttgtccctatgtagttctattgatgtttggttttgttttttggggtttgttttgagcccaggctagagtgcaatggcacaatctcaactcactacagcctggacctccttggctcaagcagtcctcccacttcagcctcccaagtagctggtctgcaagtgctcaccaccacacctggctaatttttgtattttttgtagagacagagctctcactatgttgcctagactggtctcaaactcctgggcccaagcaatcctcccatcacagcctccgaaggtgctgggattacaggcataagccactgtgcccagcctgtttttaataatgatattaagtgggtttggttcatgtgttattaatcagtgttaataatcgtacttttttttttttttaaaagaaaccatggtattctaaaatcaggagtccaaataaaagaaagttctcggctgtgcatggtggctaacacctgtaatcccagcactttgggaggctgaggtgggtggatcactagaggtcaggagtttgaaacaagcctggccaacatggtaaaaccccctctctactaaaaatacaaaaattagccgggcatggtggtgcacacctgtaatcccagctactcgggatgttgaggcatgagatttccttgaacctggaaggcagaggttgctgtgagccgagatcgcgccactgcactccagcctgggtgacagagtaagactgtcgccaaaaaagaggaaaaaagttatccagtgcagtttctacagagataaaagaagtaatagttctggctgggtgtggtggcttatgcctgtaatcccaacactttgggaggccaaggcaggtggatcacatgaggtcaggagttcgagaccagcctggccaacatggcaaaactgtctctactaaaaatataaaaattaggtatggtggcacgtgcctgtacttacagctacttgggaggctgaggcatgagatgacaatctcttgaacccaggaggcggaggttgcagtgagctgagattgcaccactgcactccagcttgggtgatggagtgagactcaaataaaaaaggtactagttctgcatttcagagttggcttgttgaaccaggctatatgcttccaagatttaaatgtttttctgtattatactctcaattgtgttttaaaaaaatctcttacagaaatctctacctcaggcactaagtgttatgacatgggtagcatattgatattgaaaacttagctaggacttccagccttttaagataatttaaatgtaaaattaaatggttaaccagcaatctaatgtcatgtggtgtgcagtttggatattgcatgaacagctaaggaatcacctgttctagtgccaaagatcactcattgctaattttgttctgtacagcttatgtaatattttcatggtggagacggactctgtgtgctcagggccttgtctctaggaagattttgtcaattccaaatacagttttgaagattca

SEQ ID NO: 36132 - DNA, 1191 bp, Artificial Sequence
  derived and/or modified sequence
atgtcctggagcttcctgacccggctgctggaggagatccacaaccacagcacctttgtgggcaagatctggctgactgtgctgattgtgttcagaattgtgctgacagctgtgggcggggagagcatctactatgatgagcagagcaagtttgtgtgcaacacagagcagcccggctgtgaaaatgtgtgctatgatgcctttgcccccctgagccacgtgcgcttctgggtgttccagatcatcctggtggccacccccagcgtgatgtacctgggctacgccatccacaagatcgccaagatggagcacggggaggccgacaagaaggccgcccggagcaagccctatgccatgcgctggaagcagcaccgggccctggaggagacagaggaggacaatgaggaggaccccatgatgtacccagagatggagctggagagtgacaaggagaacaaggagcagagccagcccaagcccaagcatgatggaagaagacgcatccgggaggatggcctgatgaagatctacgtgctgcagctgctggccaggacagtgtttgaggtgggcttcctgattggccagtacttcctgtatggcttccaggtgcaccccttctacgtgtgcagccggctgccctgcccccacaagattgactgcttcatcagccggcccacagagaagaccatcttcctgctgatcatgtatggagtgacaggcctgtgcctgctgctgaacatctgggagatgctgcacctgggcttcggcaccatccgggacagcctgaacagcaagaggcgggagctggaggaccccggggcctacaactaccccttcacctggaacaccccatctgcccctcctggctacaacattgctgtgaagccagaccagatccagtacacagagctgagcaatgccaagatcgcctacaagcagaacaaggccaacacagcccaggagcagcagtatggcagccatgaggagaacctgcctgctgacctggaggccctgcagcgggagatccgcatggcccaggagcggctggacctggccgtgcaggcctacagccaccagaacaacccccacggcccccgggagaagaaggccaaggtgggcagcaaggccggcagcaacaagagcacagccagcagcaagtctggagatggcaagacctctgtgtggatctag

SEQ ID NO: 36133 - DNA, 1191 bp, Artificial Sequence
  derived and/or modified sequence
atgagctggagcttcctgacccggctgctggaggagatccacaaccactccacctttgtagggaagatttggctgaccgttttgatagtctttcggatcgtgctgactgccgtgggtggagagtccatatattatgacgagcagagtaaatttgtgtgcaataccgaacagccgggttgtgaaaacgtctgctatgatgctttcgccccccttagccatgtccggttttgggtgtttcagatcatcctcgtagccactccatcagtgatgtatcttggttatgctattcacaagattgcaaagatggagcatggggaggcagacaagaaagcagctaggagtaagccttacgcaatgcggtggaaacagcaccgggccctcgaggaaaccgaggaggataacgaggaggatccaatgatgtatcccgaaatggagcttgagagcgacaaggagaataaggagcagtctcaacctaagccaaagcatgacggacgcaggaggatccgcgaggacgggcttatgaaaatctacgtactgcagcttctcgctagaaccgtgtttgaggttggttttcttataggacaatactttttgtacggttttcaggtgcacccattctacgtctgtagtcgcctgccctgccctcataaaatcgactgcttcatctcacgaccaactgagaagaccatctttttgttgatcatgtacggagtgaccggcctctgcctgctgctcaatatttgggaaatgttgcacctcggtttcggcacaatccgcgacagcctcaattcaaagcgaagagagctcgaggatccaggcgcatacaattatcccttcacatggaatacccctagcgccccaccaggctacaacatcgcggtgaagcctgaccagatacaatacacggagctgtccaacgcaaaaatcgcctacaagcagaataaagctaacaccgcccaagagcagcagtacggatctcacgaggagaacctcccagctgaccttgaggccttacaaagggaaatccggatggcccaggagcgcttggacttagcagtgcaggcgtactcccaccagaacaatccccacggcccaagagagaagaaggccaaggtgggctccaaggccggctctaacaaaagtacggccagttctaaaagcggcgacgggaaaacgtctgtttggatctag

SEQ ID NO: 36134 - DNA, 1191 bp, Artificial Sequence
  derived and/or modified sequence
atgagctggagcttcctgacccggctgctggaggagatccacaaccactccacatttgtggggaagatttggctaaccgtgttgatcgtgttccgcatagtgctgacagcagtgggaggtgaatccatttactatgacgagcaatcgaagttcgtgtgcaataccgagcagcctgggtgtgaaaatgtctgctatgacgcattcgccccattgagtcacgtgagattttgggtattccagataattctcgttgctacgcccagtgtcatgtatctggggtatgcaatccacaagatcgccaagatggaacacggagaagccgataagaaagccgctcgcagcaagccgtatgctatgcggtggaagcagcaccgggcactggaggaaactgaagaagacaacgaagaggatccgatgatgtaccccgaaatggagcttgagagcgacaaggagaacaaggagcagtctcagcctaagcctaaacacgacggtcggaggagaatcagagaggatggccttatgaaaatctacgtgttgcagctgttagcacgaactgttttcgaggttggctttttaatcgggcaatatttcttgtacgggttccaagtccacccgttctatgtttgcagcagactgccatgtccccacaaaattgactgtttcattagcagacctaccgaaaaaaccatcttcctattgataatgtatggtgtgaccggattatgtttgttactcaatatttgggagatgctgcacctcgggttcggcaccattagagactcactcaacagtaaacgccgcgaacttgaggatcccggcgcctacaattacccctttacatggaatacaccaagcgctcctcccgggtacaatatcgcggttaagcctgaccagattcaatacaccgaactttctaatgccaagatcgcctataagcaaaacaaggccaacacagctcaggagcagcagtacggatcccatgaggaaaacctacctgcagatctcgaagccctgcagcgggagatccgcatggctcaggagcggctggatctcgctgtgcaggcttacagccaccagaataatcctcacggcccaagagaaaaaaaggctaaggtcgggagtaaggccggatctaataagagcactgcctcgagtaagtctggcgatggcaaaacatccgtgtggatctag

SEQ ID NO: 36135 - DNA, 1191 bp, Artificial Sequence
  derived and/or modified sequence
atgtcttggtcttttctgacacggctccttgaggagattcacaatcacagtacattcgtaggcaagatatggttaacagtattaatcgtgttccgaattgtgctgactgcagtgggaggcgagtctatttattacgatgaacagagcaagtttgtctgcaacaccgagcagcccggatgcgagaacgtgtgctatgacgccttcgccccattgagtcacgtgcgtttctgggtattccagatcattctggtggccactcctagcgtgatgtatctgggctacgcaatacataaaatagctaagatggagcatggagaggcagataagaaggctgctcgcagcaaaccctacgccatgaggtggaagcagcaccgcgctctggaggagacagaagaggacaatgaagaagaccctatgatgtaccccgaaatggagttggagtcagacaaagagaataaggaacagtcccagcccaaaccaaaacacgacggacgaaggcggattagggaagacgggcttatgaagatctatgtgttgcagctcctagccagaacagtgtttgaagttggatttctcattggccagtatttcctatacggcttccaggtgcatcccttttatgtctgtagcagactgccatgcccccacaaaatcgattgcttcatctcacgaccaaccgagaagaccatatttctccttataatgtatggtgtcacgggcttatgtctgctgctaaacatttgggaaatgctgcacctgggattcggcaccatccgagactcattaaacagtaaacggagggagctggaggatccgggagcctataactatccgttcacgtggaacacccccagcgcacccccagggtataacatcgctgtaaagcccgatcagattcagtacactgagctaagcaacgcaaaaattgcgtacaaacagaataaagcaaacaccgcccaggaacagcaatacgggtctcatgaggagaatctgcctgctgaccttgaggctctccaacgagagattcgaatggcacaggaaagactcgatctcgctgtccaggcatactctcatcaaaacaatccacatggacccagggaaaaaaaagctaaagtcggttcaaaagcgggttctaacaagtctactgccagttccaagagtggcgacggtaaaactagcgtctggatctag

SEQ ID NO: 36136 - DNA, 1191 bp, Artificial Sequence
  derived and/or modified sequence
atgagttggagcttccttacccggctgctggaggaaatccacaaccattctaccttcgtcggtaagatttggctgacagtactcatcgtgtttcgaatcgttctaacagcagtgggcggtgagagcatatattatgacgagcaaagcaagtttgtgtgcaatacagagcagccaggctgcgagaatgtctgctatgacgcttttgcacccttgtcccacgtacggttctgggtgtttcagatcatactggtggcaacaccctccgtgatgtacctgggctatgcaattcacaagatagccaaaatggagcatggtgaggcggataagaaggctgccagaagcaagccttacgctatgaggtggaagcagcatcgggcattggaagagactgaagaggacaacgaggaggatcctatgatgtaccccgagatggagttagaaagtgacaaggagaacaaggagcaaagtcaacctaagcccaaacacgatggacgcaggcgaatccgggaagacggactcatgaaaatctatgtgctgcagctgctggcccgtacggtgtttgaggtcggcttcctgattggacagtacttcttgtatggtttccaggtgcacccattctatgtgtgctctcgcctgccctgccctcacaagatagactgctttatcagtagacccactgagaaaacaatcttcctcctgatcatgtatggagtgacaggcttgtgtctgctgctcaacatatgggaaatgctgcacctgggcttcggaacgatccgtgattctctgaactccaagaggcgcgagctcgaagatcctggtgcgtataactatccatttacctggaacactccaagtgcaccgcctggatataacatcgctgtcaaacctgaccaaatccagtatactgaactttcaaatgctaaaatcgcatataagcagaacaaggctaacactgcccaggagcaacagtacggatcccatgaggaaaacctcccagcagacctggaggctctgcagagggagatccggatggcccaggagcgcctcgatctggcggtccaggcctacagccaccaaaataacccccatggtccacgggagaaaaaagctaaggtggggtctaaagctggaagtaacaagtcaacagcatcatctaaatctggcgatggtaagactagtgtctggatttag

SEQ ID NO: 36137 - DNA, 1191 bp, Artificial Sequence
  derived and/or modified sequence
atgagctggagcttcctgaccagactgctggaggagatccacaaccacagcaccttcgtgggcaagatctggctgaccgtgctgatcgtgttcagaatcgtgctgaccgccgtgggcggcgagagcatctactacgacgagcagagcaagttcgtgtgcaacaccgagcagcccggctgcgagaacgtgtgctacgacgccttcgcccccctgagccacgtgagattctgggtgttccagatcatcctggtggccacccccagcgtgatgtacctgggctacgccatccacaagatcgccaagatggagcacggcgaggccgacaagaaggccgccagaagcaagccctacgccatgagatggaagcagcacagagccctggaggagaccgaggaggacaacgaggaggaccccatgatgtaccccgagatggagctggagagcgacaaggagaacaaggagcagagccagcccaagcccaagcacgacggcagaagaagaatcagagaggacggcctgatgaagatctacgtgctgcagctgctggccagaaccgtgttcgaggtgggcttcctgatcggccagtacttcctgtacggcttccaggtgcaccccttctacgtgtgcagcagactgccctgcccccacaagatcgactgcttcatcagcagacccaccgagaagaccatcttcctgctgatcatgtacggcgtgaccggcctgtgcctgctgctgaacatctgggagatgctgcacctgggcttcggcaccatcagagacagcctgaacagcaagagaagagagctggaggaccccggcgcctacaactaccccttcacctggaacacccccagcgccccccccggctacaacatcgccgtgaagcccgaccagatccagtacaccgagctgagcaacgccaagatcgcctacaagcagaacaaggccaacaccgcccaggagcagcagtacggcagccacgaggagaacctgcccgccgacctggaggccctgcagagagagatcagaatggcccaggagagactggacctggccgtgcaggcctacagccaccagaacaacccccacggccccagagagaagaaggccaaggtgggcagcaaggccggcagcaacaagagcaccgccagcagcaagagcggcgacggcaagaccagcgtgtggatctag

SEQ ID NO: 36138 - protein, 885 aa, Artificial Sequence
  derived and/or modified sequence
MAGGGGDLSTRRLNECISPVANEMNHLPAHSHDLQRMFTEDQGVDDRLLYDIVFKHFKRNKVEISNAIKKTFPFLEGLRDRDLITNKMFEDSQDSCRNLVPVQRVVYNVLSELEKTFNLPVLEALFSDVNMQEYPDLIHIYKGFENVIHDKLPLQESEEEEREERSGLQLSLEQGTGENSFRSLTWPPSGSPSHAGTTPPENGLSEHPCETEQINAKRKDTTSDKDDSLGSQQTNEQCAQKAEPTESCEQIAVQVNNGDAGREMPCPLPCDEESPEAELHNHGIQINSCSVRLVDIKKEKPFSNSKVECQAQARTHHNQASDIIVISSEDSEGSTDVDEPLEVFISAPRSEPVINNDNPLESNDEKEGQEATCSRPQIVPEPMDFRKLSTFRESFKKRVIGQDHDFSESSEEEAPAEASSGALRSKHGEKAPMTSRSTSTWRIPSRKRRFSSSDFSDLSNGEELQETCSSSLRRGSGSQPQEPENKKCSCVMCFPKGVPRSQEARTESSQASDMMDTMDVENNSTLEKHSGKRRKKRRHRSKVNGLQRGRKKDRPRKHLTLNNKVQKKRWQQRGRKANTRPLKRRRKRGPRIPKDENINFKQSELPVTCGEVKGTLYKERFKQGTSKKCIQSEDKKWFTPREFEIEGDRGASKNWKLSIRCGGYTLKVLMENKFLPEPPSTRKKRILESHNNTLVDPCPENSNICEVCNKWGRLFCCDTCPRSFHEHCHIPSVEANKNPWSCIFCRIKTIQERCPESQSGHQESEVLMRQMLPEEQLKCEFLLLKVYCDSKSCFFASEPYYNREGSQGPQKPMWLNKVKTSLNEQMYTRVEGFVQDMRLIFHNHKEFYREDKFTRLGIQVQDIFEKNFRNIFAIQETSKNIIMFI

SEQ ID NO: 36139 - protein, 355 aa, Artificial Sequence
  derived and/or modified sequence
MDVENNSTLEKHSGKRRKKRRHRSKVNGLQRGRKKDRPRKHLTLNNKVQKKRWQQRGRKANTRPLKRRRKRGPRIPKDENINFKQSELPVTCGEVKGTLYKERFKQGTSKKCIQSEDKKWFTPREFEIEGDRGASKNWKLSIRCGGYTLKVLMERILESHNNTLVDPCPENSNICEVCNKWGRLFCCDTCPRSFHEHCHIPSVEANKNPWSCIFCRIKTIQERCPESQSGHQESEVLMRQMLPEEQLKCEFLLLKVYCDSKSCFFASEPYYNREGSQGPQKPMWLNKVKTSLNEQMYTRVEGFVQDMRLIFHNHKEFYREDKFTRLGIQVQDIFEKNFRNIFAIQETSKNIIMFI

SEQ ID NO: 36140 - DNA, 405 bp, Artificial Sequence
  derived and/or modified sequence
atgattcctgtccggggtctgtggtactgttacctgcaagtgaagaaagtgcgtctgcgagaagctgaacggctgggtcctaagagccaatgtccagccgagtgcggagcagcctcttggattagctgggtcctacaacaccagcaactgctagctagcgaatgggctaccaaggatggcagaggaacatggggctcaaagcctagttgcacggttccagccttgtctgccacaagtcagctgctgcaacttggtcgcctgaacagcgatttacaatttgtccgacaacgcgctaaaaagtccgtatcttccccttctctgctgcagttctggtgctgtctgtcgagactctcattccacgctctgaatcagaagattaattccactaatattaatatcacctag

SEQ ID NO: 36141 - DNA, 2658 bp, Artificial Sequence
  derived and/or modified sequence
atggccggcggcggcggcgacctgagcaccagaagactgaacgagtgcatcagccccgtggccaacgagatgaaccacctgcccgcccacagccacgacctgcagagaatgttcaccgaggaccagggcgtggacgacagactgctgtacgacatcgtgttcaagcacttcaagagaaacaaggtggagatcagcaacgccatcaagaagaccttccccttcctggagggcctgagagacagagacctgatcaccaacaagatgttcgaggacagccaggacagctgcagaaacctggtgcccgtgcagagagtggtgtacaacgtgctgagcgagctggagaagaccttcaacctgcccgtgctggaggccctgttcagcgacgtgaacatgcaggagtaccccgacctgatccacatctacaagggcttcgagaacgtgatccacgacaagctgcccctgcaggagagcgaggaggaggagagagaggagagaagcggcctgcagctgagcctggagcagggcaccggcgagaacagcttcagaagcctgacctggccccccagcggcagccccagccacgccggcaccaccccccccgagaacggcctgagcgagcacccctgcgagaccgagcagatcaacgccaagagaaaggacaccaccagcgacaaggacgacagcctgggcagccagcagaccaacgagcagtgcgcccagaaggccgagcccaccgagagctgcgagcagatcgccgtgcaggtgaacaacggcgacgccggcagagagatgccctgccccctgccctgcgacgaggagagccccgaggccgagctgcacaaccacggcatccagatcaacagctgcagcgtgagactggtggacatcaagaaggagaagcccttcagcaacagcaaggtggagtgccaggcccaggccagaacccaccacaaccaggccagcgacatcatcgtgatcagcagcgaggacagcgagggcagcaccgacgtggacgagcccctggaggtgttcatcagcgcccccagaagcgagcccgtgatcaacaacgacaaccccctggagagcaacgacgagaaggagggccaggaggccacctgcagcagaccccagatcgtgcccgagcccatggacttcagaaagctgagcaccttcagagagagcttcaagaagagagtgatcggccaggaccacgacttcagcgagagcagcgaggaggaggcccccgccgaggccagcagcggcgccctgagaagcaagcacggcgagaaggcccccatgaccagcagaagcaccagcacctggagaatccccagcagaaagagaagattcagcagcagcgacttcagcgacctgagcaacggcgaggagctgcaggagacctgcagcagcagcctgagaagaggcagcggcagccagccccaggagcccgagaacaagaagtgcagctgcgtgatgtgcttccccaagggcgtgcccagaagccaggaggccagaaccgagagcagccaggccagcgacatgatggacaccatggacgtggagaacaacagcaccctggagaagcacagcggcaagagaagaaagaagagaagacacagaagcaaggtgaacggcctgcagagaggcagaaagaaggacagacccagaaagcacctgaccctgaacaacaaggtgcagaagaagagatggcagcagagaggcagaaaggccaacaccagacccctgaagagaagaagaaagagaggccccagaatccccaaggacgagaacatcaacttcaagcagagcgagctgcccgtgacctgcggcgaggtgaagggcaccctgtacaaggagagattcaagcagggcaccagcaagaagtgcatccagagcgaggacaagaagtggttcacccccagagagttcgagatcgagggcgacagaggcgccagcaagaactggaagctgagcatcagatgcggcggctacaccctgaaggtgctgatggagaacaagttcctgcccgagccccccagcaccagaaagaagagaatcctggagagccacaacaacaccctggtggacccctgccccgagaacagcaacatctgcgaggtgtgcaacaagtggggcagactgttctgctgcgacacctgccccagaagcttccacgagcactgccacatccccagcgtggaggccaacaagaacccctggagctgcatcttctgcagaatcaagaccatccaggagagatgccccgagagccagagcggccaccaggagagcgaggtgctgatgagacagatgctgcccgaggagcagctgaagtgcgagttcctgctgctgaaggtgtactgcgacagcaagagctgcttcttcgccagcgagccctactacaacagagagggcagccagggcccccagaagcccatgtggctgaacaaggtgaagaccagcctgaacgagcagatgtacaccagagtggagggcttcgtgcaggacatgagactgatcttccacaaccacaaggagttctacagagaggacaagttcaccagactgggcatccaggtgcaggacatcttcgagaagaacttcagaaacatcttcgccatccaggagaccagcaagaacatcatcatgttcatctag

SEQ ID NO: 36142 - DNA, 1068 bp, Artificial Sequence
  derived and/or modified sequence
atggacgtggagaacaacagcaccctggagaagcacagcggcaagagaagaaagaagagaagacacagaagcaaggtgaacggcctgcagagaggcagaaagaaggacagacccagaaagcacctgaccctgaacaacaaggtgcagaagaagagatggcagcagagaggcagaaaggccaacaccagacccctgaagagaagaagaaagagaggccccagaatccccaaggacgagaacatcaacttcaagcagagcgagctgcccgtgacctgcggcgaggtgaagggcaccctgtacaaggagagattcaagcagggcaccagcaagaagtgcatccagagcgaggacaagaagtggttcacccccagagagttcgagatcgagggcgacagaggcgccagcaagaactggaagctgagcatcagatgcggcggctacaccctgaaggtgctgatggagagaatcctggagagccacaacaacaccctggtggacccctgccccgagaacagcaacatctgcgaggtgtgcaacaagtggggcagactgttctgctgcgacacctgccccagaagcttccacgagcactgccacatccccagcgtggaggccaacaagaacccctggagctgcatcttctgcagaatcaagaccatccaggagagatgccccgagagccagagcggccaccaggagagcgaggtgctgatgagacagatgctgcccgaggagcagctgaagtgcgagttcctgctgctgaaggtgtactgcgacagcaagagctgcttcttcgccagcgagccctactacaacagagagggcagccagggcccccagaagcccatgtggctgaacaaggtgaagaccagcctgaacgagcagatgtacaccagagtggagggcttcgtgcaggacatgagactgatcttccacaaccacaaggagttctacagagaggacaagttcaccagactgggcatccaggtgcaggacatcttcgagaagaacttcagaaacatcttcgccatccaggagaccagcaagaacatcatcatgttcatctag

SEQ ID NO: 36143 - DNA, 2658 bp, Artificial Sequence
  derived and/or modified sequence
atggcaggcggcggtggtgacctcagcaccagaaggctgaacgaatgtattagtcctgtggcaaatgaaatgaatcatctcccagctcattcccatgatttgcagcgcatgtttaccgaggaccagggtgtggatgaccgactactctatgacatcgtcttcaagcacttcaagcggaataaggtcgagatttccaatgccattaagaaaacgttcccatttctcgagggattacgcgaccgtgatctgatcacaaacaaaatgtttgaggacagccaagactcctgccggaatcttgtccccgtccagagagtggtatacaatgtgctcagcgaactagaaaagacattcaatttacccgtactggaagccctgttcagtgacgttaacatgcaggagtacccagacctcattcacatctataaggggtttgaaaatgtgatacacgataagctccctctgcaggaaagtgaggaagaagaacgagaggagcggtccggcctgcagctgtctctggaacagggaaccggcgaaaacagcttcaggtcactcacttggccgcccagcggtagcccaagtcatgccggaactaccccgccagagaatggcctgtccgagcacccttgcgagactgaacaaatcaatgctaaaagaaaggacaccacgagcgataaagatgactcgctaggatcacagcagacgaatgaacagtgtgcacagaaggccgagccaacggagagttgtgagcagatcgcggtgcaggtgaacaacggcgacgctggcagagagatgccatgtcccctgccttgtgacgaggaaagccccgaagccgagctgcataaccacggtattcaaattaattcttgttccgtgcggctggtggatataaaaaaagagaagcccttttcaaattccaaggtcgagtgtcaggctcaagccagaactcaccataatcaagcctctgacatcatcgttatctcctcagaagattctgagggtagcaccgatgtcgacgagccactggaagtgttcatttccgctcctaggtcggagccagtgattaataatgataaccctctcgaatccaacgacgagaaggagggacaggaggcaacatgtagtcgaccacaaatagtaccagagcccatggacttcaggaaattgtccacatttcgggagtcttttaaaaaaagggtcattggacaggatcatgacttctctgagtcaagcgaggaggaagctcctgccgaagcctccagtggcgccctcaggtcaaaacacggtgaaaaagccccaatgacctccaggtcaacaagtacctggagaattccttcaagaaagaggagatttagcagctccgatttcagtgatttgtcaaatggggaggaactgcaggagacttgttcatcctctctgaggcgagggtccggctcccagcctcaggaaccagaaaataagaaatgcagctgcgtgatgtgctttccaaagggggttccgcggtctcaggaggcacgcacggaaagtagccaggcctccgacatgatggataccatggatgtggagaataactcaacattggagaaacacagcggtaaaagaagaaagaagcggagacatcggagcaaggtcaacggcttgcagcgcggtagaaagaaggatagaccccgtaagcatctgactctgaacaacaaagtgcagaaaaagcgttggcagcaacgtggcagaaaagccaataccagacccctcaagaggcgtcgcaaacgagggccacgtattcctaaagatgaaaacatcaactttaaacagtccgagttgcccgtgacgtgtggtgaagttaagggaacactctataaagaacggtttaagcaagggacgtcaaaaaaatgcatccagagtgaggataagaagtggttcactcccagggagtttgagattgaaggcgatcgcggagcatccaaaaattggaaacttagtatcagatgtggtggatatactctcaaggtgctgatggagaacaagttcctgcccgagccccccagcacgaggaagaagagaattctcgagtcacataataacacacttgtagacccctgtcctgagaactcaaacatatgtgaagtgtgtaacaaatgggggcggctgttttgctgtgacacctgtcctaggtccttccacgagcattgtcacattccatctgtcgaggcgaacaagaatccctggagctgcatcttttgccgtataaagaccatccaggaaaggtgtcccgagtcccagtccggtcatcaggaatcagaagtgctgatgcgtcagatgctcccggaagagcaactaaaatgtgagttcttgctccttaaagtgtattgtgacagtaaaagctgttttttcgccagcgagccctattataaccgagaaggtagccagggtccacaaaaacccatgtggctcaataaggttaagactagcttaaatgaacagatgtatactagagtggaggggttcgttcaggacatgcgactgattttccataaccacaaagagttctatagagaagataaatttacgcgcctgggtatccaggtgcaggacatctttgaaaagaacttccggaatattttcgctattcaagaaaccagtaaaaacatcattatgtttatctag

SEQ ID NO: 36144 - DNA, 1068 bp, Artificial Sequence
  derived and/or modified sequence
atggacgtggaaaacaactccacactggaaaaacactccggcaaaaggaggaaaaagagacgccaccggtctaaggtcaacggcctgcagagagggcgtaagaaagatcggccccggaaacacctaacgctcaacaataaagtgcagaagaaacggtggcagcagagaggaaggaaggctaacacccggccactgaagaggagacgaaagcgcggaccaagaatccccaaagacgaaaacattaactttaagcagtccgagctgccagttacatgcggcgaagtcaagggaacactgtataaagagcggtttaagcaggggacatctaaaaaatgcatccagtccgaggataaaaaatggtttactccccgcgaatttgagatagagggcgatagaggcgcatccaaaaactggaaactttcaattcgatgcggcggctatactctcaaagtgttgatggagcgaattctggaaagtcataataacacactggtggacccttgcccagagaactccaatatatgcgaggtgtgtaacaagtgggggcgtctgttctgttgtgacacttgtccgaggagtttccacgaacattgtcatattccttctgtggaggccaacaaaaacccctggagctgcattttctgtcggatcaaaaccatccaagagaggtgtccagagtctcagagtggacaccaggagtccgaggtgctgatgcggcaaatgcttcccgaggaacaactgaaatgtgaatttttactattaaaggtgtattgcgactccaaatcatgttttttcgcaagcgaaccatactataacagagaggggagtcagggccctcagaagccaatgtggctgaacaaagtcaaaacctcacttaatgagcaaatgtatacgagagtggagggcttcgtgcaggacatgagactcatcttccacaaccacaaggagttttacagagaggataagtttacccgccttgggatacaggttcaggacattttcgagaagaattttcggaatatcttcgcaattcaggaaacatctaagaacattattatgttcatctag

SEQ ID NO: 36145 - DNA, 2658 bp, Artificial Sequence
  derived and/or modified sequence
atggccggcggcggcggggacctgagcacccggcggctgaatgaatgcatcagccctgtggccaatgagatgaaccacctgcctgcccacagccatgacctgcagaggatgttcacagaggaccagggcgtggatgaccggctgctgtatgacatcgtgttcaagcacttcaagaggaacaaggtggagatcagcaatgccatcaagaagaccttccccttcctggagggcctgcgggaccgggacctgatcaccaacaagatgtttgaggacagccaggacagctgcaggaacctggtgcctgtgcagagggtggtgtacaacgtgctgtctgagctggagaagaccttcaacctgcctgtgctggaggccctcttcagtgatgtgaacatgcaggagtacccagacctgatccacatctacaagggctttgaaaatgtcatccatgacaagctgcccctgcaggagagcgaggaggaggagcgggaggagaggagcggcctgcagctgagcctggagcagggcaccggggagaacagcttccgcagcctgacctggcccccatctggcagccccagccatgctggcaccaccccaccagaaaatggcctgtctgagcacccctgtgaaacagagcagatcaatgccaagaggaaggacaccaccagtgacaaggatgacagcctgggcagccagcagaccaatgagcagtgtgcccagaaggccgagcccacagagagctgtgagcagattgctgtgcaggtgaacaatggagatgctggccgggagatgccctgccccctgccctgtgatgaggagagccctgaggccgagctgcacaaccacggcatccagatcaacagctgcagcgtgcggctggtggacatcaagaaggagaagcccttcagcaacagcaaggtggagtgccaggcccaggcccggacccaccacaaccaggccagtgacatcatcgtcatcagcagtgaagattctgagggcagcacagatgtggatgagcccctggaggtgttcatcagcgcccccaggtctgagcccgtcatcaacaatgacaaccccctggagagcaatgatgagaaggagggccaggaggccacctgcagccggccccagatcgtgcctgagcccatggacttcaggaagctgagcaccttccgggagagcttcaagaagagggtcatcggccaggaccatgacttcagcgagagcagcgaggaggaggccccagctgaggccagcagcggggccctgcggagcaagcatggagagaaggcccccatgaccagccgcagcaccagcacctggaggatccccagcaggaagaggcgcttcagcagcagtgacttcagtgacctgagcaatggagaggagctgcaggagacctgcagcagcagcctgcggcggggcagcggcagccagccccaggagcctgagaacaagaagtgcagctgtgtgatgtgcttccccaagggcgtgcccaggagccaggaggccaggacagagagcagccaggccagtgacatgatggacaccatggatgtggagaacaacagcaccctggagaagcacagcggcaagaggaggaagaagagaagacacaggagcaaggtgaatggcctgcagaggggcaggaagaaggaccggcccaggaagcacctgaccctgaacaacaaggtgcagaagaagcgctggcagcagaggggcaggaaggccaacacccggcccctgaagagaagaaggaagaggggcccccgcatccccaaggatgagaacatcaacttcaagcagagcgagctgcctgtgacctgtggggaggtgaagggcaccctgtacaaggagcgcttcaagcagggcaccagcaagaagtgcatccagagcgaggacaagaagtggttcaccccccgggagtttgaaattgaaggagacagaggagccagcaagaactggaagctgagcatccgctgtggcggctacaccctgaaggtgctgatggagaacaagttcctgcctgagccccccagcaccaggaagaagaggatcctggagagccacaacaacaccctggtggacccctgcccagagaacagcaacatctgtgaggtgtgcaacaagtggggccgcctcttctgctgtgacacctgccccaggagcttccacgagcactgccacatccccagcgtggaggccaacaagaacccctggagctgcatcttctgccgcatcaagaccatccaggagcgctgcccagagagccagagcggccaccaggagagcgaggtgctgatgaggcagatgctgcctgaggagcagctgaagtgtgagttcctgctgctgaaggtgtactgtgacagcaagagctgcttctttgccagcgagccctactacaaccgggagggcagccagggcccccagaagcccatgtggctgaacaaggtgaagaccagcctgaatgagcagatgtacaccagggtggagggctttgtgcaggacatgaggctcatcttccacaaccacaaggagttctaccgggaggacaagttcacccggctgggcatccaggtgcaggacatctttgagaagaacttcaggaacatctttgccatccaggagaccagcaagaacatcatcatgttcatctag

SEQ ID NO: 36146 - DNA, 1068 bp, Artificial Sequence
  derived and/or modified sequence
atggatgtggagaacaacagcaccctggagaagcacagcggcaagaggaggaagaagaggaggcacaggagcaaggtgaatggcctgcagaggggcaggaagaaggaccggcccaggaagcacctgaccctgaacaacaaggtgcagaagaagcgctggcagcagaggggcaggaaggccaacacccggcccctgaagagaagaaggaagaggggcccccgcatccccaaggatgagaacatcaacttcaagcagagcgagctgcctgtgacctgtggggaggtgaagggcaccctgtacaaggagcgcttcaagcagggcaccagcaagaagtgcatccagagcgaggacaagaagtggttcaccccccgggagtttgaaattgaaggagacagaggagccagcaagaactggaagctgagcatccgctgtggcggctacaccctgaaggtgctgatggagcgcatcctggagagccacaacaacaccctggtggacccctgcccagagaacagcaacatctgtgaggtgtgcaacaagtggggccgcctcttctgctgtgacacctgccccaggagcttccacgagcactgccacatccccagcgtggaggccaacaagaacccctggagctgcatcttctgccgcatcaagaccatccaggagcgctgcccagagagccagagcggccaccaggagagcgaggtgctgatgaggcagatgctgcctgaggagcagctgaagtgtgagttcctgctgctgaaggtgtactgtgacagcaagagctgcttctttgccagcgagccctactacaaccgggagggcagccagggcccccagaagcccatgtggctgaacaaggtgaagaccagcctgaatgagcagatgtacaccagggtggagggctttgtgcaggacatgaggctcatcttccacaaccacaaggagttctaccgggaggacaagttcacccggctgggcatccaggtgcaggacatctttgagaagaacttcaggaacatctttgccatccaggagaccagcaagaacatcatcatgttcatctag

SEQ ID NO: 36147 - DNA, 2658 bp, Artificial Sequence
  derived and/or modified sequence
atggccggcggcggcggcgacctgagcacccggcggctgaacgagtgcataagtcccgtcgctaacgagatgaaccacctcccagcacattctcacgacctgcaaaggatgttcactgaggatcagggcgtggacgatcgtttgctttatgacattgtgttcaaacactttaaaaggaataaagttgaaatctcaaacgcgattaagaagaccttcccctttttagagggcttgcgcgatcgggatctaatcaccaacaagatgtttgaagatagtcaggactcttgccgcaaccttgtgcctgtgcagcgtgttgtgtataatgtgctgtcagagctggagaaaaccttcaatcttcctgtgctagaggctctcttttccgatgtcaatatgcaagagtatccggatctgatacacatttacaagggctttgaaaacgtcatacacgataaactgccgttgcaggagtccgaggaagaggaacgggaagagcggagcggtctccagctgtccttggaacagggaaccggagaaaactcgtttcggtctctgacctggcccccctcaggatccccctctcacgcaggaacgactcctcctgagaatgggctctcagaacacccatgcgaaacagagcagatcaatgccaagagaaaggacaccactagcgacaaagatgatagcctaggatcacagcagactaacgagcaatgcgcacaaaaggcagagccaaccgaatcatgcgaacagattgctgtccaggtgaataatggcgatgctgggcgcgaaatgccatgcccacttccttgtgacgaagagagcccagaagctgaactgcacaaccacggcatccagataaactcttgcagtgtccgactcgtggatatcaagaaggaaaaacccttcagcaacagtaaagtcgagtgccaggcccaggctcggactcatcacaatcaggcctcagacataatcgtgattagctctgaggatagcgaagggtcaactgacgttgatgaacctctcgaggtcttcatcagcgctccacgttccgaaccagtcattaataacgataaccccttggagtctaacgacgaaaaggaggggcaggaggcaacatgtagtcgcccccagatcgttcccgagcctatggatttccgcaagctgtctaccttcagagaatcattcaaaaaaagggtgatcgggcaggaccatgacttttcagagagcagcgaggaagaggccccagccgaggctagctctggagctctgcgcagtaagcacggagaaaaagccccaatgacttcccgatcaactagcacctggcggatcccctctagaaagagacggttttccagttcagacttctctgatctctctaacggagaagagttgcaggagacttgtagtagtagtctgcggcgcggctccggtagccaaccccaggagccggagaacaagaagtgctcctgtgtgatgtgctttcccaaaggggtgcctcgttctcaagaggctcggacagaatcctctcaagcctcagacatgatggacacaatggatgtggaaaacaacagcacactcgagaaacactcaggcaagagaaggaagaagaggcgtcacagaagtaaagtcaacggtctccagagggggcggaaaaaagatcgtccacgaaagcatctcacactgaataacaaggtgcaaaaaaaacgatggcagcagcgcgggcgtaaagcaaatactcgccctttgaagagacgcaggaagcgaggccctcgtattcccaaggacgagaatattaacttcaagcagagcgaattgcctgtcacctgtggtgaggttaaggggactctctacaaggaaagatttaagcagggaacgtctaagaagtgcatacagtccgaagataagaaatggtttaccccaagggaatttgagatcgaaggggaccgcggcgctagtaagaactggaagctgtccatccggtgcggaggctatacgctgaaggtccttatggaaaataaatttctgcctgagccgccctcgactagaaagaaacggattttagagagtcacaacaacacactggtagatccttgccctgagaattccaacatatgcgaagtttgtaacaaatggggacgcctcttctgttgcgatacctgccccagatccttccatgagcattgccatattccgtcagtggaagcaaacaagaatccctggagctgtatattctgccgcattaaaaccatacaagagagatgtcctgagtcccagtctgggcatcaggagagcgaagtcctcatgcgtcagatgctgccagaggaacagctaaagtgcgagtttctcctgttaaaagtgtactgcgattctaagtcctgtttcttcgccagtgagccatactataatagggagggatcccaaggtccccagaaacccatgtggctgaacaaggtgaagacctccctgaatgagcagatgtatacccgtgtcgagggtttcgttcaagacatgaggctcatatttcacaaccacaaagaattctacagggaagacaagtttacccgtttgggcattcaggttcaagacattttcgagaagaacttccgcaatatttttgccatccaagagacctcaaagaacatcatcatgttcatctag

SEQ ID NO: 36148 - DNA, 1068 bp, Artificial Sequence
  derived and/or modified sequence
atggacgtggagaacaacagcaccctggagaagcacagcggcaagagaagaaagaaacgacgacaccggtccaaagtcaacggccttcagcgcggccgtaagaaggaccgtcctaggaagcaccttacactaaataacaaagttcagaaaaagcgctggcagcagcgggggaggaaggcgaatacacgtccactgaagcggcggcgtaagagagggcctaggatacccaaagacgagaacatcaattttaaacagagcgagctccctgtcacctgtggtgaagtcaaaggcaccctatataaggaacggtttaaacagggtacctctaagaagtgcattcagagtgaagataagaaatggtttacaccaagggaatttgagatcgaaggggatcggggggcatctaaaaattggaaactcagtatccggtgtggaggctacactttgaaagtactgatggagcgcattcttgaatctcacaacaatacactcgtggatccgtgcccagaaaactctaacatatgtgaggtgtgcaacaaatgggggaggctcttctgctgcgacacctgcccaagatctttccatgagcactgccacatcccttctgtggaggccaacaaaaacccctggagctgtatcttctgccggatcaaaacaattcaggaacgttgtccagagtcccaatctggccaccaggagagcgaggttcttatgcgacagatgctgcctgaggagcaactcaaatgcgagttcctgctcctaaaagtttactgcgatagcaaatcctgtttcttcgccagcgagccttattataaccgggagggatctcagggcccccagaagccgatgtggctgaataaggtcaagacctcactcaatgaacagatgtacacccgggtggaaggcttcgtacaagacatgagattgatctttcacaaccacaaggagttctaccgggaggacaaatttacacggctgggaattcaggtccaggacatcttcgaaaagaattttcgcaacatcttcgcaatccaggaaacttccaaaaacattatcatgttcatctag

SEQ ID NO: 36149 - DNA, 2658 bp, Artificial Sequence
  derived and/or modified sequence
atggccggaggtggtggagacctgagcactcgcaggctaaatgaatgcatctcacccgtggctaatgaaatgaaccacctgcccgcacactcccacgacctccagaggatgttcaccgaggaccagggtgtcgatgaccgcttgttatatgatattgtcttcaaacatttcaagcgaaacaaggtggaaattagcaatgccattaagaagacattcccctttctcgaaggactgcgcgaccgcgatctcattactaacaagatgttcgaggattcccaggactcatgcaggaatttggtccctgttcagcgagtcgtgtacaacgttctatcagagctcgaaaaaacctttaatctgcccgtcctggaagcattatttagtgacgtaaatatgcaggaataccccgacttgatccatatctataaaggatttgaaaatgtgattcatgataaactgccactgcaagagtccgaggaagaggagcgcgaggaacggtccggtctccagttatcattggaacagggaaccggagagaactctttcaggtctctcacttggcctcccagtggatcaccttcacacgctggaaccactccgcctgagaatggtctgtctgaacacccctgcgagacagagcagattaacgccaagcgcaaggacactacttctgacaaggatgactccctcgggagtcaacagaccaatgaacaatgtgcccagaaagctgaacccaccgaatcctgtgagcagatagccgtacaggtcaacaatggtgacgcgggacgggaaatgccttgcccactaccatgtgacgaggaatcaccagaggcagaactgcataatcacgggattcagattaatagctgcagcgtgcgattggtggatattaagaaagagaaacctttctccaacagcaaagtggagtgccaggcacaggcgaggacccaccacaaccaggcctctgacataatcgttatcagcagtgaagattcggagggttctacagatgtggatgagcccctggaggtttttatatccgctcctcggtctgaacccgtgatcaacaatgataatccccttgaatctaacgacgagaaggaagggcaagaggctacctgttcccggccacagattgtccccgaacctatggacttcaggaagctgtccacattccgagagtcttttaaaaaaagagtgatcggacaggaccatgatttcagcgagtcttccgaagaagaagcaccagctgaagcatctagtggagccttgcgaagtaagcacggtgaaaaggctccgatgacatctaggtcaactagtacatggagaatccccagtcgtaaacggagattctcttcttctgatttcagtgacctgtcgaatggagaagaactgcaggagacatgtagcagttcgcttagaagaggtagcggaagccagccccaggaacccgagaataaaaagtgcagctgtgtgatgtgctttcccaagggcgtgcctagaagccaggaggcccgtacagaaagctctcaggcaagtgacatgatggacacaatggatgtggagaacaactccaccttagagaagcactctggaaagagacgtaaaaagcggaggcacagatcaaaggtcaatggcctgcagcggggacgtaagaaggacagaccaagaaaacatttaacactgaataataaggtgcagaagaagcgctggcaacagagaggcaggaaagctaataccaggcccctgaagcggaggcggaaaaggggccctagaatccccaaagatgaaaacatcaatttcaaacagtcggagctgcctgtgacatgcggagaggttaaaggcaccctttataaggaaagatttaaacagggaacctccaagaagtgcatccagagtgaagataaaaaatggttcacgccgagagagtttgagattgaaggggataggggagcctcaaagaactggaagctgtccatcagatgcggaggctacacgcttaaagtgctcatggagaataagttcctgcccgagcccccttccacgcggaagaagcggattcttgagagtcacaataacaccctggttgatccctgccccgagaatagtaatatttgcgaagtgtgtaacaagtggggcaggctcttctgttgtgacacatgtcctcgtagttttcacgagcactgtcacatccccagtgtggaggctaacaaaaacccttggtcttgcatattctgcagaataaagaccatacaggaaaggtgccccgagtctcagtccggtcatcaggaatctgaggtactaatgcggcaaatgctgccagaggaacaactcaaatgcgagtttctgctgctcaaggtgtattgcgattccaaaagctgcttttttgcttccgagccatactataatagggaggggagccagggcccacagaaacccatgtggctcaataaggtgaagacaagcctcaatgaacaaatgtatactagggtggagggtttcgttcaagatatgcgccttattttccacaaccacaaggagttctaccgcgaagataaattcacccggttgggtatccaggtgcaggatatctttgagaaaaatttccgcaacattttcgccatccaggagacatccaaaaacattattatgtttatttag

SEQ ID NO: 36150 - DNA, 1068 bp, Artificial Sequence
  derived and/or modified sequence
atggatgtggaaaacaacagcaccctggaaaaacattctgggaagcggagaaagaaaagaagacacagatctaaagtgaatggactccagaggggtcggaagaaagatcgccctagaaaacacctgacactcaataacaaagttcaaaagaagcggtggcaacagcggggaagaaaggctaatacaaggcctcttaaacgaaggcgcaagcgcggaccacggattcccaaagacgagaatattaattttaagcagtcagaactgccagtgacctgcggagaggtcaaagggacactgtacaaagagaggtttaaacagggaaccagtaaaaaatgtatccagagtgaggacaaaaagtggtttacacccagagagttcgaaatcgagggcgacagaggagcctccaagaactggaaactcagcatccggtgcggcggatacacattgaaagtgctgatggagcgtattctggaaagccataataataccctggtggacccctgccctgagaacagtaacatctgcgaggtgtgcaataagtggggtcgactgttttgttgcgacacgtgccctagaagctttcacgaacattgtcacattccgagcgtcgaggccaataagaacccttggtcctgcatcttctgcaggattaagaccatacaagagcgatgtccagagtctcagagcggccaccaggaatctgaggtcctgatgagacaaatgctccccgaggaacagctcaagtgtgagtttctgcttttgaaagtctactgcgacagcaaaagctgcttcttcgcttctgaaccatactataaccgcgaggggtcccagggcccacaaaagccaatgtggttaaacaaagtgaagacatcacttaacgagcagatgtacactcgtgtagaaggtttcgttcaggacatgagactgatcttccataatcacaaggagttttaccgcgaagataagtttaccaggcttggcatccaggtgcaagatattttcgagaaaaacttccgaaacatattcgccatccaggaaacctctaagaacatcattatgtttatctag

SEQ ID NO: 36151 - DNA, 2926 bp, Artificial Sequence
  derived and/or modified sequence
ctgaggcccacgcagggcctagggtgggaagatggcaggtgggggcggcgacctgagcaccaggaggctgaatgaatgtatttcaccagtagcaaatgagatgaaccatcttcctgcacacagccacgatttgcaaaggatgttcacggaagaccagggtgtagatgacaggctgctctatgacattgtattcaagcacttcaaaagaaataaggtggagatttcaaatgcaataaaaaagacatttccattcctcgagggcctccgtgatcgtgatctcatcacaaataaaatgtttgaagattctcaagattcttgtagaaacctggtccctgtacagagagtggtgtacaatgttcttagtgaactggagaagacatttaacctgccagttctggaagcactgttcagcgatgtcaacatgcaggaataccccgatttaattcacatttataaaggctttgaaaatgtaatccatgacaaattgcctctccaagaaagtgaagaagaagagagggaggagaggtctggcctccaactaagtcttgaacaaggaactggtgaaaactcttttcgaagcctgacttggccaccttcgggttccccatctcatgctggtacaaccccacctgaaaatggactctcagagcacccctgtgaaacagaacagataaatgcaaagagaaaagatacaaccagtgacaaagatgattcgctaggaagccaacaaacaaatgaacaatgtgctcaaaaggctgagccaacagagtcctgcgaacaaattgctgtccaagtgaataatggggatgctggaagggagatgccctgcccgttgccctgtgatgaagaaagcccagaggcagagctacacaaccatggaatccaaattaattcctgttctgtgcgactggtggatataaaaaaggaaaagccattttctaattcaaaagttgagtgccaagcccaagcaagaactcatcataaccaggcatctgacataatagtcatcagcagtgaggactctgaaggatccactgacgttgatgagcccttagaagtcttcatctcagcaccgagaagtgagcctgtgatcaataatgacaaccctttagaatcaaatgatgaaaaggagggccaagaagccacttgctcacgaccccagattgtaccagagcccatggatttcagaaaattatctacattcagagaaagttttaagaaaagagtgataggacaagaccacgacttttcagaatccagtgaggaggaggcgcccgcagaagcctcgagcggggcactgagaagcaagcatggtgagaaggctcctatgacttctagaagtacatctacttggagaatacccagcaggaagagacgtttcagcagtagtgacttttcagacctgagtaatggagaagagcttcaggaaacctgcagctcatccctaagaagagggtcaggatcacagccacaagaacctgaaaataagaagtgctcctgtgtcatgtgttttccaaaaggtgtgccaagaagccaagaagcaaggactgaaagtagtcaagcatctgacatgatggataccatggatgttgaaaacaattctactttggaaaaacacagtgggaaaagaagaaaaaagagaaggcatagatctaaagtaaatggtctccaaagagggagaaagaaagacagacctagaaaacatttaactctgaataacaaagtccaaaagaaaagatggcaacaaagaggaagaaaagccaacactagacctttgaaaagaagaagaaaaagaggtccaagaattcccaaagatgaaaatattaattttaaacaatctgaacttcctgtgacctgtggtgaggtgaagggcactctatataaggagcgattcaaacaaggaacctcaaagaagtgtatacagagtgaggataaaaagtggttcactcccagggaatttgaaattgaaggagaccgcggagcatccaagaactggaagctaagtatacgctgcggtggatataccctgaaagtcctgatggagaacaaatttctgccagaaccaccaagcacaagaaaaaagagaatactggaatctcacaacaataccttagttgacccttgtccggaaaactcaaatatatgtgaggtgtgcaacaaatggggacggctgttctgctgcgacacttgtccaagatcctttcatgagcactgccacatcccatccgtggaagctaacaagaacccgtggagttgcatcttctgcaggataaagactattcaggaaagatgcccagaaagccaatcaggtcatcaggaatctgaagtcctgatgaggcagatgctgcctgaggagcagttgaaatgtgaattcctcctcttgaaggtctactgtgattcgaaaagctgctttttcgcctcagaaccgtattataacagagaggggtctcagggcccacagaagcccatgtggttaaacaaagtcaagacaagtttgaatgagcagatgtacacccgagtagaagggtttgtgcaggacatgcgtctcatctttcataaccacaaggaattttacagggaagataaattcaccagactgggaattcaagtacaggacatctttgagaagaatttcagaaacatttttgcaattcaggaaacaagcaagaacattataatgtttatttagccattcttatctcctcccttcagatcctctggcagctagctacgcaatgtgcctgtggtcccactaatctgtgactgctcctgtggaaactccacatcacaattctccaaaatttatcattgccattttaaaaccgtcttttcagctttcaataaaattcaacaccccttcatgttaaaaattctcaataagctaggtattgaggaacatatcccaaaataataagagccatttatg

SEQ ID NO: 36152 - DNA, 2650 bp, Artificial Sequence
  derived and/or modified sequence
ctgaggcccacgcagggcctagggtgggaagatggcaggtgggggcggcgacctgagcaccaggaggctgaatgaatgtatttcaccagtagcaaatgagatgaaccatcttcctgcacacagccacgatttgcaaaggatgttcacggaagaccagggtgtagatgacaggctgctctatgacattgtattcaagcacttcaaaagaaataaggtggagatttcaaatgcaataaaaaagacatttccattcctcgagggcctccgtgatcgtgatctcatcacaaataaaatgtttgaagattctcaagattcttgtagaaacctggtccctgtacagagagtggtgtacaatgttcttagtgaactggagaagacatttaacctgccagttctggaagcactgttcagcgatgtcaacatgcaggaataccccgatttaattcacatttataaaggctttgaaaatgtaatccatgacaaattgcctctccaagaaagtgaagaagaagagagggaggagaggtctggcctccaactaagtcttgaacaaggaactggtgaaaactcttttcgaagcctgacttggccaccttcgggttccccatctcatgctggtacaaccccacctgaaaatggactctcagagcacccctgtgaaacagaacagataaatgcaaagagaaaagatacaaccagtgacaaagatgattcgctaggaagccaacaaacaaatgaacaatgtgctcaaaaggctgagccaacagagtcctgcgaacaaattgctgtccaagtgaataatggggatgctggaagggagatgccctgcccgttgccctgtgatgaagaaagcccagaggcagagctacacaaccatggaatccaaattaattcctgttctgtgcgactggtggatataaaaaaggaaaagccattttctaattcaaaagttgagtgccaagcccaagcaagaactcatcataaccaggcatctgacataatagtcatcagcagtgaggactctgaaggatccactgacgttgatgagcccttagaagtcttcatctcagcaccgagaagtgagcctgtgatcaataatgacaaccctttagaatcaaatgatgaaaaggagggccaagaagccacttgctcacgaccccagattgtaccagagcccatggatttcagaaaattatctacattcagagaaagttttaagaaaagagtgataggacaagaccacgacttttcagaatccagtgaggaggaggcgcccgcagaagcctcgagcggggcactgagaagcaagcatggtgagaaggctcctatgacttctagaagtacatctacttggagaatacccagcaggaagagacgtttcagcagtagtgacttttcagacctgagtaatggagaagagcttcaggaaacctgcagctcatccctaagaagagggtcaggatcacagccacaagaacctgaaaataagaagtgctcctgtgtcatgtgttttccaaaaggtgtgccaagaagccaagaagcaaggactgaaagtagtcaagcatctgacatgatggataccatggatgttgaaaacaattctactttggaaaaacacagtgggaaaagaagaaaaaagagaaggcatagatctaaagtaaatggtctccaaagagggagaaagaaagacagacctagaaaacatttaactctgaataacaaagtccaaaagaaaagatggcaacaaagaggaagaaaagccaacactagacctttgaaaagaagaagaaaaagaggtccaagaattcccaaagatgaaaatattaattttaaacaatctgaacttcctgtgacctgtggtgaggtgaagggcactctatataaggagcgattcaaacaaggaacctcaaagaagtgtatacagagtgaggataaaaagtggttcactcccagggaatttgaaattgaaggagaccgcggagcatccaagaactggaagctaagtatacgctgcggtggatataccctgaaagtcctgatggagagaatactggaatctcacaacaataccttagttgacccttgtccggaaaactcaaatatatgtgaggtgtgcaacaaatggggacggctgttctgctgcgacacttgtccaagatcctttcatgagcactgccacatcccatccgtggaagctaacaagaacccgtggagttgcatcttctgcaggataaagactattcaggaaagatgcccagaaagccaatcaggtcatcaggaatctgaagtcctgatgaggcagatgctgcctgaggagcagttgaaatgtgaattcctcctcttgaaggtctactgtgattcgaaaagctgctttttcgcctcagaaccgtattataacagagaggggtctcagggcccacagaagcccatgtggttaaacaaagtcaagacaagtttgaatgagcagatgtacacccgagtagaagggtttgtgcaggacatgcgtctcatctttcataaccacaaggaattttacagggaagataaattcaccagactgggaattcaagtacaggacatctttgagaagaatttcagaaacatttttgcaattcaggaaacaagcaagaacattataatgtttatttag

SEQ ID NO: 36153 - protein, 455 aa, Artificial Sequence
  derived and/or modified sequence
MVEQGDAAPLLRWAEGPAVSLPQAPQPQAGGWGRGGGGGARPAAEPPRRREPEEPAAPEVLLQPGRLELGDVEEDQVVAVFVVTFDPRSGNMVEWCLPQDIDLEGVEFKSMASGSHKIQSDFIYFRKGPFFGLACFANMPVESELERGARMKSVGILSPSYTLLYRYMHFLENQVRHQLEMPGHYSHLAAFYEDKKGVLHAGPGRGSSLPPVYWLPSIHRYMYPEMKITHPAGCMSQFIKFFGEQILILWKFALLRKRILIFSPPPVGVVCYRVYCCCCLANVSLPGIGGTIPESKPFFYVNVADIESLEVEVSYVACTTEKIFEEKRELYDVYVDNQNVKTHHDHLQPLLKINSADREKYRRLNEQRQMLLYSQEVEEDYNPCEEDLFVLFFLEQNNRIFQTLLEVSASQDKTLTAEHARGMGLDPQGDRSFLLDLLEAYGIDVMLVIDNPCCP

SEQ ID NO: 36154 - DNA, 96 bp, Artificial Sequence
  derived and/or modified sequence
atgcggcccggctggagccacctgcccctgtgccccaccctgcaggatgcagttctggggcattttctttctcacttgggtaggagacacctctag

SEQ ID NO: 36155 - DNA, 1368 bp, Artificial Sequence
  derived and/or modified sequence
atggtggagcagggcgacgccgcccccctgctgagatgggccgagggccccgccgtgagcctgccccaggccccccagccccaggccggcggctggggcagaggcggcggcggcggcgccagacccgccgccgagccccccagaagaagagagcccgaggagcccgccgcccccgaggtgctgctgcagcccggcagactggagctgggcgacgtggaggaggaccaggtggtggccgtgttcgtggtgaccttcgaccccagaagcggcaacatggtggagtggtgcctgccccaggacatcgacctggagggcgtggagttcaagagcatggccagcggcagccacaagatccagagcgacttcatctacttcagaaagggccccttcttcggcctggcctgcttcgccaacatgcccgtggagagcgagctggagagaggcgccagaatgaagagcgtgggcatcctgagccccagctacaccctgctgtacagatacatgcacttcctggagaaccaggtgagacaccagctggagatgcccggccactacagccacctggccgccttctacgaggacaagaagggcgtgctgcacgccggccccggcagaggcagcagcctgccccccgtgtactggctgcccagcatccacagatacatgtaccccgagatgaagatcacccaccccgccggctgcatgagccagttcatcaagttcttcggcgagcagatcctgatcctgtggaagttcgccctgctgagaaagagaatcctgatcttcagccccccccccgtgggcgtggtgtgctacagagtgtactgctgctgctgcctggccaacgtgagcctgcccggcatcggcggcaccatccccgagagcaagcccttcttctacgtgaacgtggccgacatcgagagcctggaggtggaggtgagctacgtggcctgcaccaccgagaagatcttcgaggagaagagagagctgtacgacgtgtacgtggacaaccagaacgtgaagacccaccacgaccacctgcagcccctgctgaagatcaacagcgccgacagagagaagtacagaagactgaacgagcagagacagatgctgctgtacagccaggaggtggaggaggactacaacccctgcgaggaggacctgttcgtgctgttcttcctggagcagaacaacagaatcttccagaccctgctggaggtgagcgccagccaggacaagaccctgaccgccgagcacgccagaggcatgggcctggacccccagggcgacagaagcttcctgctggacctgctggaggcctacggcatcgacgtgatgctggtgatcgacaacccctgctgcccctag

SEQ ID NO: 36156 - DNA, 1368 bp, Artificial Sequence
  derived and/or modified sequence
atggttgagcagggcgatgcagcccccttactccggtgggctgagggacctgctgtttccctgccacaagcccctcaacctcaggctgggggatggggtagagggggcgggggcggagcccgccctgctgccgaacccccccggcgcagggagccggaggagccagctgccccagaagtcctcctgcagcctggcaggctcgagttgggagatgtggaagaagaccaggtggttgccgtgttcgtagttactttcgatccaaggtccggcaacatggtggagtggtgcctacctcaggatatagacctggaaggggtggagtttaagtcaatggcctccgggtcgcacaaaatccagtccgactttatctacttcagaaaggggccattttttggactcgcatgtttcgcaaatatgcctgtagaaagtgaactggagagaggggccagaatgaagagtgtcgggattttatctccctcgtatactctgttgtatcgctatatgcacttcctggagaatcaggtgcgacaccaattggaaatgcccgggcactactcccacctagcggcattttacgaggacaagaaaggggtgctgcatgccgggccaggcagaggctcttccctgcctcccgtgtactggttgccttccattcacaggtatatgtatcctgagatgaaaatcacccacccagccgggtgcatgtcacaattcattaaattcttcggggagcagatcctgattttatggaaatttgccctcctcagaaagaggatcttaatttttagtccgcctccagtcggggtcgtgtgctaccgcgtgtactgctgttgctgtctagcgaatgtatcccttccgggaataggtgggacgatccctgagtccaagccattcttctatgtgaacgtggcggatatcgagtctctagaggtcgaagtttcatatgtggcctgcacaacggagaagatatttgaagaaaagcgggagttgtacgatgtgtatgtggacaatcagaatgttaagactcaccatgaccacttgcagccactccttaaaattaattccgccgacagggaaaaatacagacgcttgaatgagcagcgtcagatgctgctctacagtcaggaggtggaagaagactacaatccctgcgaggaggacttattcgtgttgttcttcttggagcagaataatagaattttccagaccctgctggaggtttctgcttcacaggataagactctcactgccgagcatgcacgagggatggggctcgatccacagggcgatagatccttcctgctcgatctccttgaggcttatggcatcgacgttatgctggtaattgataacccctgctgcccgtag

SEQ ID NO: 36157 - DNA, 1368 bp, Artificial Sequence
  derived and/or modified sequence
atggtggagcagggagatgctgcccccctgctgcgctgggccgagggccctgctgtgtccctgccccaggccccccagccccaggccggcggctggggccggggcggcggcggcggggcccggcctgctgctgagccccccaggagaagagagcctgaggagcctgctgcccctgaggtgctgctgcagcccggccgcctggagctgggagatgtggaggaggaccaggtggtggccgtgtttgtggtgacctttgaccccaggagcggcaacatggtggagtggtgcctgccccaggacatcgacctggagggcgtggagttcaagtccatggccagcggcagccacaagatccagagcgacttcatctacttcaggaagggccccttcttcggcctggcctgctttgccaacatgcctgtggagagcgagctggagcggggggccaggatgaagtctgtgggcatcctgagccccagctacaccctgctgtaccgctacatgcacttcctggagaaccaggtgcgccaccagctggagatgcctggccactacagccacctggccgccttctatgaggacaagaagggcgtgctgcatgctggccctggccggggcagcagcctgccccctgtgtactggctgcccagcatccaccgctacatgtacccagagatgaagatcacccaccctgctggctgcatgagccagttcatcaagttcttcggggagcagatcctgatcctgtggaagtttgccctgctgaggaagaggatcctgatcttcagccccccacctgtgggcgtggtgtgctacagagtgtactgctgctgctgcctggccaacgtgtccctgcccggcatcggcggcaccatccctgagagcaagcccttcttctacgtgaatgtggccgacatcgagagcctggaggtggaggtgtcctatgtggcctgcaccacagagaagatctttgaggagaagcgggagctgtatgatgtgtatgtggacaaccagaatgtgaagacccaccacgaccacctgcagcccctgctgaagatcaacagcgctgaccgggagaagtaccgccgcctgaatgagcagaggcagatgctgctgtacagccaggaggtggaggaggactacaacccctgtgaggaggacctgtttgtgctcttcttcctggagcagaacaaccgcatcttccagaccctgctggaggtgtctgccagccaggacaagaccctgacagctgagcacgcccggggcatgggcctggacccccagggcgacaggagcttcctgctggacctgctggaggcctatggaattgatgtgatgctggtgattgacaacccctgctgcccctag

SEQ ID NO: 36158 - DNA, 1368 bp, Artificial Sequence
  derived and/or modified sequence
atggtggagcagggcgacgccgcccccctgctgcggtgggccgaggggcctgccgtaagcctaccgcaggcccctcagccccaggccggcggatggggccgaggaggaggaggcggtgccaggccggccgccgagcctccccggaggagggagccggaggagccagctgctcccgaagtgctgctgcagcccggccggttggaacttggggacgttgaggaagaccaagtggtggctgttttcgtagtcacattcgacccccggtcaggaaacatggtcgagtggtgcctgccacaggacatagacctggaaggggtggagttcaaatctatggcctccggatcccacaaaattcagtcagactttatctactttcggaaagggccgtttttcgggttagcctgttttgctaatatgcctgtcgagtcagaactggaaagaggcgctcggatgaaatctgtgggcatcctcagcccgagttacacactactgtaccgttacatgcacttcctagagaaccaggtgcgccaccagctagagatgcccggacattacagccatctggctgcattttatgaggacaaaaagggagtgctccatgccgggcctggaaggggatcctctctgcccccagtttattggcttccaagcattcacaggtatatgtacccagagatgaagatcacccatcctgctggatgcatgtcccagtttatcaagttcttcggcgaacaaattctaattttatggaaattcgcacttttgagaaagcggatcctcatctttagcccgccaccggttggagtagtctgttatagggtttattgctgttgttgtttagcgaatgtaagcctgccagggatagggggcacgattcccgaatccaagccattcttttacgtgaatgtggccgatatcgaatccttggaagtggaggtatcctatgtcgcgtgcacgacagaaaagatctttgaggagaaaagagaactttatgacgtgtacgtggataaccagaatgtgaagactcatcacgatcacctccagcccctgctgaagattaactctgctgacagggagaaatacaggagactgaatgagcagcggcagatgcttctgtattcacaggaagtcgaggaagactacaacccttgcgaagaagacctcttcgtgcttttcttccttgagcagaacaatagaatcttccagacactgttggaggtgtcagccagccaggacaagacccttacagccgagcacgcaagaggcatgggtctggacccacagggagaccgaagctttctcttggatctgttggaagcctacggtattgacgtaatgctggtgattgacaacccgtgctgtccttag

SEQ ID NO: 36159 - DNA, 1368 bp, Artificial Sequence
  derived and/or modified sequence
atggtcgaacagggagacgccgcacccctgctgcggtgggctgagggcccagccgtaagcctgccccaagcacctcagcctcaggccggagggtggggtagaggagggggtgggggagccagaccagctgcagagccaccccgacgccgtgagccagaggaacccgctgcccctgaagtactcctgcagcctggtaggctggagctgggagatgtggaagaagaccaggttgtggccgtttttgttgtgaccttcgaccccagaagcgggaatatggtcgaatggtgtctgccccaggatatcgatttggagggagtggagtttaaatccatggcgtccgggagtcataagattcagagtgacttcatttacttcaggaagggaccattttttggtttggcgtgtttcgctaatatgcctgtagagtcagagctggagcgcggagcgcgtatgaagtctgtcggaatcctgtccccctcttatacgctgctgtaccggtacatgcacttcttagagaatcaggtgagacaccagctggaaatgccgggacactattcccatctggctgccttctatgaagacaagaaaggcgtgttgcacgcaggaccgggtcgcggaagcagtttgccgccagtgtactggctcccctctattcatcggtatatgtacccggagatgaaaatcactcacccagctggctgtatgtctcagtttattaaattttttggtgagcaaattttaatcctgtggaaatttgccttactgcgaaaacgaatcctaatattctctccacccccagtgggcgtggtgtgctaccgagtatactgctgctgctgcctggctaatgtctcgttgccaggaatcggcggaactattccagagagcaagccttttttttatgtaaacgtggctgacatagagtcactggaggtggaggtgtcttatgtggcctgcacaacagaaaaaatctttgaggaaaaacgggagctgtatgacgtctacgtggataatcagaacgtgaagactcaccacgatcacctccagcctcttcttaagattaactctgcagaccgcgaaaaatatagaaggctcaacgagcagcgtcagatgctcctgtactctcaggaggtggaagaggattacaacccctgcgaggaagacctatttgtgctattttttctggagcagaacaacagaatctttcaaacgctattggaggtctcagcgagccaggacaagacattgaccgccgagcacgcgagaggcatgggacttgacccgcaaggggaccgatcttttctgctggaccttctcgaagcttacggaatcgacgtcatgctggtcattgataatccttgctgcccatag

SEQ ID NO: 36160 - DNA, 7296 bp, Artificial Sequence
  derived and/or modified sequence
atggtggagcagggagacgcggcgccgctgctgcgctgggccgagggccccgccgtctccctgccgcaggccccgcagccgcaggcgggaggctggggccggggcggcggcgggggcgcccggccggccgcggagccgccccggaggcgggagcccgaggagccggccgccccggaggtgctgctgcagcccgggcgcctggagctgggcgacgtggaggaggaccaggtggtggccgtgttcgtggtcaccttcgacccccgctcgggaaacatggtagaatggtgcttacctcaagatattgaccttgaaggtgttgagttcaagtctatggccagtgggtcccataaaatccaatctgatttcatctatttccgaaaggggcccttcttcggcctggcctgctttgccaacatgcccgtggagagcgagctggaacgtggcgcgcggatgaagtctgtgggcatcctctctccctcctacacactgctttaccgctacatgcacttcttggagaaccaggttcggcaccagttggagatgccaggacattactctcatctggctgccttctatgaggacaaaaagggggtgctccatgctggtcccggcagaggcagcagcctgccccctgtctactggctgccttccatccaccgatacatgtaccctgagatgaagatcacacacccagctggctgcatgtctcagtttataaagttctttggagaacagatcctcatcctctggaaatttgccttacttcgaaagcgcattttgatattttctcccccacctgtgggcgtggtgtgctatagagtgtactgctgctgctgcttggccaacgtttcactgcctggcatcgggggcaccattcctgagtccaaacctttcttctacgtgaacgtggctgacatcgagagcctggaggtagaggtgtcctatgtggcctgcaccacagagaagatattcgaggagaagcgggagctgtatgacgtctacgtggataaccagaatgtgaagacacaccacgaccacctgcagccgctgctgaagatcaacagtgctgacagggagaagtaccgccggctcaacgagcagaggcagatgctgttgtactcccaggaagtagaagaagactacaacccttgtgaagaggacctcttcgtgctgtttttcctagaacaaaacaaccggatatttcagactttgttggaggtgtctgccagtcaagacaaaactctgacagcagagcatgcccggggcatgggcctagacccccaaggagaccggagctttctcctggacctgctggaggcctatggcattgatgtcatgctggttatcgacaacccctgttgcccgtaggaggagccaacaggactgggagccacttcacgtgggatgtcagcagcccggagttcaccccagggccccagagggcctcattttttattaagttgacacaaaggaatattgtttatactttccaacaaacataatttttgcaatttcctttctgcccttttccctagagataaggtgagatcaccttggttttgtgtcctgccatgttaggatattggaatctgccactttctcccagagctgctggtcctctgggcttggtcatgggagttgtatcactaggagtaggctgagctctggaaacattgggatggactgttcagaaagtctgtgtggtctttgtcccttgatgtatttgagaataagacaaccacctgtcccctgtggccttagatgttcatctgcctaaaggcagaaactagaccagatgatcttttaaggtttttagtagttctaggagtctatagtcttgggatcaaatcccttttcttgttcattagggcaactttatgtcttctctgtttacttgagtagggaccacaaagagggaaaaaaggatgtttctgacaccaaatatgagcttatcttatggtcagaatgaaagaggttgcttatcagtgagctgaaaactaaaattatagaatgaagcctggaaaccttcctcaaagtaacttgatggtggccatgcaatgtaatgttcctctttgtctgaaccttcctcttcttgggatgaattggtgaattgctaagggccaatgctggccttggagcttgcaagcaaattaattttccagtttagtctcttaagggttcaataatgctcttggagtaagttgggtatttttaaaggctgaagtttggactaccggaggatagagcaattgaagttcgagcaggatggagaagccactctaagtctcttcatctggacacgaattctctggaggcattagcagcagcacctctgggtcaacacagatttactggattccaaaatctagcaaggatctgagctggttaactcagagggtggagcatgatgctaacaagacggtttatcattttggacccctcacaaacacacttctctttagcagaggtgacattccttaggctaaataattggatccagggacataacagatttgttgagagaaaatgtggcagtgccttcacccgggacagtggtcaggaagccctgagcatccctgatggatttatccatcctcttctgaagtgctctgctctaggctgggtcctgttgccacctgcctgttctctggttggcttttgcaggagggcagcttacgtgtttgtcaaccagttagaaagccagttcctgtgggtcgagtttaggcctttttggccatagttgagaattttgacttgggatactgggttgttggtgacaaataatgtcttccttttcccccttcccgcctggctcggttatgggaatagccgtcagtgcatccatgtctgtgaccaacacccagccagactaatgtacacagcagggagaaataacattcaaatggtggttcacacatctcatctcaagataagattcttagggttcactgctttattcaaaagtgttttcactgtagctccttcatatggaatatcaaaactgaagaaattcacatgtggaaatgcaaatagacattgattaatcaaggtagcatctttatgtaaatatataaataagtttgggcattgaaatgtaaactgtacagctaatagacttttctcctctgcaatgtgggttgctgtcatttcagtaatgtgtatgtttacaaaagaaaaaaaaatctgtgtttcgaggttgaagcctcaccttttattctcctttacatgcaaccctctcttcttgcctctcaagggttgaggggtcctttctgtcaagtaatggttatttttcgtggtatcctgaggttcagggtgttttaagctgggggtaggtggttagaggcaggagtagaagtgaaaggaaaggtctgattctcctagaggacacaagaagacctcctttttctggaattagggaatctgccggaaggagctgtttgaggcatttctgctctgagccttctatatgcaaacactgcagttttaactgcaagctcagaagtgctggtgtaaacatagcagggtgagaatgaagttcctgttttttcctttgaatggtgagtcagggcttctgggttcccttaactttgtgcttgtctcggtagctttctgtctcacatctccacgtgtccaccctcctgctcatgcagagggccagggtatgggtggccccagaggagaacgtgccagtgaggcagtgccatgtttcaggtcataggggccttgggctcagctgaccccaatgcagaacttctccctttaagagagattccaataaattggtccttccctaccttgccagcttcttcataggaccagaaatcttgtgcagagcctctgcttggctgaacagcgtgtgctttatctcttcagttacctttgccactgttgagcatcctcagagtatgtcttgcctgggctatgaagtggagcctgtggcttcggaaatcacctttcgaagccttgctctatgccagattctgctccccaacatgacagattaacaggcacaacctaggatcctttgctaccagttctctactagggaattccacagtggcagcagaagctaggagccatgtggacctgcttttctgccagtcttgaaatattttctgagaaaccatctgcttttgttcagaagaaagtgctgaacatcgttcacagacttctaggtctgtaagctctttaggggcgggcattatgatgaccaccggcctcctggaggagggttggatacctgtggtgtgacaccttctgccaccatctcctgccgggcctcagccctcgcctgcctgagcaggcctagttctcctgtgaagctgtcagcctgatctcatgccacactgtgaaatgaactatgtgccagtttggaaatgattgctgacctgagatgctggctgggctgccctgttgttcctgaataagtcagaagaagttccaggtgggagtggaattcaggtttggggctcgttggtatccatgcaaaatatgacaaaggcctgttcaagagggcattttcaattctgtaggctcagcagatgatactgcccagcctttgggaaaatgtccagttggcccctggcttaggactctccacaaggagtttgaaatggtagggcttatcccctaccagactaaaagtatggcccaaattatgtgtttagaatttgcttggcctttaaacacgaaccattccctatgcctggtagagaccattccagtgtcagtgtcccacctgggacctgtacagtcctcagtaaattatgattgcaatgaattagaaggcttttgccttccatatccatcatccattatagcatctgtgcttccacctggttagggggagggaagctgaaatcattgatgtatcaatagaagtaatttagcttaggaacttgcatctataacttaccttgttttgttccactttaaagtcaagacaagaaagttaagatagcacacaggtgcacatgcttccagatgccacatgtgaacatttgttgatcatgtgactaccgatgacactttagctagaagataaattaaatcttagctaaatcattgtttttccttctggtggctatgaggatgaatttgctctcagtcttgatgcactgaaagcccttcaaacacagtaaaagatgaaatcactcatctttaaactgaggccttcagggaagcttttgtaaaggacagtaatgaattaggctttcagttttaggacatcaaccctccgagaaaaggcagaaacccgagggaccatttatttcccttcgaaactgtatagcccagggaatggattgagatgctttctccagaccctgtataggtcaaccttgcagaggtaaaggaggaggggcaggtggatgaataaaataggataatgctcagcttggcagtggacttgccttagtgtgatgacaggtctaacatgggcaagacaattagaatggggaccaatatgccaggcatgggcttttatctccctagtagatcccaagctagtaggcttggattctgccaaatggccagccctcctgtcttctccccgtaccttgtagttagaccgaggtgagaatcctgctgaccccagtcccatcccctctcatttcaggaaaacccttttgtgattcaggtagggggagaggaggagttaagggctccgtttactcccaagtcatggatttttaatattccatttttatcactaatatacctctcttcctagaagctactggagtattgagtgttgtgggaaaaggctaactgtgaattaagttaatgtttttcttataagaaatggaagtttatttttttattgatattactatgtgatgaactgagtatgcatatactgaaatggaaggaaattttaaaactattattctagaagaaatgggcagttttgtaatttggtggtggctgagaccccatagaagttttactatgtaaataatttggagagtgaataaggagattgtgctatgaaatcctgacagcgctctttaggaggcagacttgacagtcctaggaaggttgacataaaaataccaaccttcagtaaagctctagtacaaaaaagggtaaatgtcatcattcttatttttaggcctctttcttgagagaggtgggagtgggaggtagtgttataactggcactttaatttgtttttggaactagaatttaggggcagttggatgaaattgcaaatttagaaggggaataagaattttctagtgctatataaagaaatgatgatggagacaaaagccttgctttcctctttttagaatttattttcgatttttagcatactgtggggcttttagagctaatatgatctaaattcagaaaatttaattttcatagtaggccaggtgtgaattacttatgtttgctatagaatgcttatttagactaacaataaatttactttgctttctaaggccagtcagcgaatgtggggatgaggcaggatgttttaaatgagccagagatgatccacaaagtgaacagtcgacacagaggtctttgagttggatggttgcaaatatattgacattagagtgaaaactccttcctttgggtaaactaaagaaagataaagtatactaaaaaattttaagatggtgttatacaaaaaaaagtttgggtctaacgtgtccacaaagactgtcaagtgaagaatggtggagattcttggtgtttgagcagccaacctggatgagtgacttcagggacagagcagaggaaagcaaaatgaatttcctttatttacccaaaacttgttgactgaatttttgtataggtccgggaaaataagcctaaacaaatagttgtagccttagaaaaactgttttcccatttctttctgagttagaatcagcatagcctccctgtcgccttaaatgtaaaaatcctattttgattaataccccagcctaagagttatagcaatacgagagactgaatctatttttgtttcgggtctttacctcatagtatgaaattagtaagacactgcatagattttgccctgaatactggtgtgcccaggtatgccgtgctctctctctgtttccagtggtggtaattttaaggcctaaagaaagctggggttaatcctgaagctaaaagtaaatgtttcttgaattgattttgttctgtggtacaaataacatctatgaatatcatatctgtatatatctgaaccaagttgtgtgcagagaggttgatataactatatttacagaaaatgatttttacaattaaagttcacattttaacatgaa

SEQ ID NO: 36161 - protein, 915 aa, Artificial Sequence
  derived and/or modified sequence
MPRGSRARGSKRKRSWNTECPSFPGERPLQVRRAGLRTAGAAASLSEAWLRCGEGFQNTSGNPSLTAEEKTITEKHLELCPRPKQETTTSKSTSGLTDITWSSSGSDLSDEDKTLSQLQRDELQFIDWEIDSDRAEASDCDEFEDDEGAVEISDCASCASNQSLTSDEKLSELPKPSSIEILEYSSDSEKEDDLENVLLIDSESPHKYHVQFASDARQIMERLIDPRTKSTETILHTPQKPTAKFPRTPENSAKKKLLRGGLAERLNGLQNRERSAISLWRHQCISYQKTLSGRKSGVLTVKILELHEECAMQVAMCEQLLGSPATSSSQSVAPRPGAGLKVLFTKETAGYLRGRPQDTVRIFPPWQKLIIPSGSCPVILNTYFCEKVVAKEDSEKTCEVYCPDIPLPRRSISLAQMFVIKGLTNNSPEIQVVCSGVATTGTAWTHGHKEAKQRIPTSTPLRDSLLDVVESQGAASWPGAGVRVVVQRVYSLPSRDSTRGQQGASSGHTDPAGTRACLLVQDACGMFGEVHLEFTMSKARQLEGKSCSLVGMKVLQKVTRGRTAGIFSLIDTLWPPAIPLKTPGRDQPCEEIKTHLPPPALCYILTAHPNLGQIDIIDEDPIYKLYQPPVTRCLRDILQMNDLGTRCSFYATVIYQKPQLKSLLLLEQREIWLLVTDVTLQTKEERDPRLPKTLLVYVAPLCVLGSEVLEALAGAAPHSLFFKDALRDQGRIVCAERTVLLLQKPLLSVVSGASSCELPGPVMLDSLDSATPVNSICSVQGTVVGVDESTAFSWPVCDMCGNGRLEQRPEDRGAFSCGDCSRVVTSPVLKRHLQVFLDCRSRPQCRVKVKLLQRSISSLLRFAAGEDGSYEVKSVLGKEVGLLNCFVQSVTAHPTSCIGLEEIELLSAGGASAEH

SEQ ID NO: 36162 - DNA, 2748 bp, Artificial Sequence
  derived and/or modified sequence
atgcccagaggcagcagagccagaggcagcaagagaaagagaagctggaacaccgagtgccccagcttccccggcgagagacccctgcaggtgagaagagccggcctgagaaccgccggcgccgccgccagcctgagcgaggcctggctgagatgcggcgagggcttccagaacaccagcggcaaccccagcctgaccgccgaggagaagaccatcaccgagaagcacctggagctgtgccccagacccaagcaggagaccaccaccagcaagagcaccagcggcctgaccgacatcacctggagcagcagcggcagcgacctgagcgacgaggacaagaccctgagccagctgcagagagacgagctgcagttcatcgactgggagatcgacagcgacagagccgaggccagcgactgcgacgagttcgaggacgacgagggcgccgtggagatcagcgactgcgccagctgcgccagcaaccagagcctgaccagcgacgagaagctgagcgagctgcccaagcccagcagcatcgagatcctggagtacagcagcgacagcgagaaggaggacgacctggagaacgtgctgctgatcgacagcgagagcccccacaagtaccacgtgcagttcgccagcgacgccagacagatcatggagagactgatcgaccccagaaccaagagcaccgagaccatcctgcacaccccccagaagcccaccgccaagttccccagaacccccgagaacagcgccaagaagaagctgctgagaggcggcctggccgagagactgaacggcctgcagaacagagagagaagcgccatcagcctgtggagacaccagtgcatcagctaccagaagaccctgagcggcagaaagagcggcgtgctgaccgtgaagatcctggagctgcacgaggagtgcgccatgcaggtggccatgtgcgagcagctgctgggcagccccgccaccagcagcagccagagcgtggcccccagacccggcgccggcctgaaggtgctgttcaccaaggagaccgccggctacctgagaggcagaccccaggacaccgtgagaatcttccccccctggcagaagctgatcatccccagcggcagctgccccgtgatcctgaacacctacttctgcgagaaggtggtggccaaggaggacagcgagaagacctgcgaggtgtactgccccgacatccccctgcccagaagaagcatcagcctggcccagatgttcgtgatcaagggcctgaccaacaacagccccgagatccaggtggtgtgcagcggcgtggccaccaccggcaccgcctggacccacggccacaaggaggccaagcagagaatccccaccagcacccccctgagagacagcctgctggacgtggtggagagccagggcgccgccagctggcccggcgccggcgtgagagtggtggtgcagagagtgtacagcctgcccagcagagacagcaccagaggccagcagggcgccagcagcggccacaccgaccccgccggcaccagagcctgcctgctggtgcaggacgcctgcggcatgttcggcgaggtgcacctggagttcaccatgagcaaggccagacagctggagggcaagagctgcagcctggtgggcatgaaggtgctgcagaaggtgaccagaggcagaaccgccggcatcttcagcctgatcgacaccctgtggccccccgccatccccctgaagacccccggcagagaccagccctgcgaggagatcaagacccacctgcccccccccgccctgtgctacatcctgaccgcccaccccaacctgggccagatcgacatcatcgacgaggaccccatctacaagctgtaccagccccccgtgaccagatgcctgagagacatcctgcagatgaacgacctgggcaccagatgcagcttctacgccaccgtgatctaccagaagccccagctgaagagcctgctgctgctggagcagagagagatctggctgctggtgaccgacgtgaccctgcagaccaaggaggagagagaccccagactgcccaagaccctgctggtgtacgtggcccccctgtgcgtgctgggcagcgaggtgctggaggccctggccggcgccgccccccacagcctgttcttcaaggacgccctgagagaccagggcagaatcgtgtgcgccgagagaaccgtgctgctgctgcagaagcccctgctgagcgtggtgagcggcgccagcagctgcgagctgcccggccccgtgatgctggacagcctggacagcgccacccccgtgaacagcatctgcagcgtgcagggcaccgtggtgggcgtggacgagagcaccgccttcagctggcccgtgtgcgacatgtgcggcaacggcagactggagcagagacccgaggacagaggcgccttcagctgcggcgactgcagcagagtggtgaccagccccgtgctgaagagacacctgcaggtgttcctggactgcagaagcagaccccagtgcagagtgaaggtgaagctgctgcagagaagcatcagcagcctgctgagattcgccgccggcgaggacggcagctacgaggtgaagagcgtgctgggcaaggaggtgggcctgctgaactgcttcgtgcagagcgtgaccgcccaccccaccagctgcatcggcctggaggagatcgagctgctgagcgccggcggcgccagcgccgagcactag

SEQ ID NO: 36163 - DNA, 2748 bp, Artificial Sequence
  derived and/or modified sequence
atgcccagaggatcaagagctagaggctcaaaaagaaaacgatcatggaataccgagtgcccttcttttcctggcgagaggcccctgcaggtgaggagagcaggtttacgaacggctggggccgccgcgagtttgagcgaggcgtggctcagatgtggtgagggcttccagaacacttctggcaacccctccctcacagctgaagaaaaaacaataacagaaaagcatttggaactctgcccacgacctaaacaggaaactactacctccaaatccacatctggccttaccgacattacctggtcctcttctggttctgacctcagtgatgaggataaaacactcagccagttgcagagggacgaactccagttcatcgactgggagatcgacagcgatcgggcagaggcgtccgattgcgatgaattcgaggacgatgagggagctgtcgagatttctgattgtgcgtcttgtgccagcaaccagagcctgacatcagatgaaaagctgtccgagctccccaaacccagttccatagagattttggaatatagttctgatagcgagaaagaagacgacctggagaacgtgctgcttatcgacagtgagtcgcctcacaaatatcacgtgcagtttgccagcgatgctcgccagattatggaaaggctcatcgatccgcgaactaaaagcaccgaaacaatactgcacactccccagaagcccaccgccaagtttccacggacacctgaaaattctgccaaaaaaaagttactcagggggggtttggccgagcgccttaacggattgcagaatagagagaggtctgcaatctccctctggcgacaccagtgcatctcttatcaaaagaccctgagcggccgtaagtctggcgtgcttactgtaaagattcttgaactccacgaggaatgcgcgatgcaggtagcaatgtgcgagcagctgttggggtcgcccgcgacaagctcaagtcagagcgtcgcccctcgccctggggctggcctcaaagtcctgttcacaaaggaaacagcaggttacctcagaggcagaccccaggatacagtacggatctttcccccatggcaaaagctaattattcctagtggctcttgtcccgtgatcctgaacacatatttctgcgagaaagtagttgccaaggaagactcagaaaagacgtgcgaggtgtactgtccagatatccccctccctcggcgatccattagcctcgcacagatgtttgtgataaaagggctgaccaataacagtcccgagattcaggtggtatgctccggggtggcaaccactggaaccgcctggacacacggtcacaaggaggccaaacagagaatccccacaagcaccccacttcgagactcgctgctggacgtagtagaaagccagggagccgctagctggccaggcgctggcgtgagagtggtggtgcagcgagtgtactccctgccttccagagactctactcgcggccagcagggcgcctcaagcgggcacacagacccggcaggtacaagagcttgtctccttgttcaggacgcctgtggcatgtttggcgaggtgcatctcgagttcaccatgagtaaggcccgccagctggaaggaaaatcctgcagcctggtaggtatgaaggtgctccagaaagttactaggggaaggaccgcagggatattcagccttatcgataccctctggcccccagcaatccccctgaagactcccggcagagaccagccctgcgaggagattaaaacacacctgccccccccagcgctctgttacattctgactgcccaccctaacctgggccagattgacatcattgacgaggatcccatctacaagttgtaccagccaccggtgacgaggtgccttcgcgatatcttgcagatgaatgacctgggtacccgctgctccttctacgccaccgtcatttaccagaagcctcagctgaaaagcttgttgctgctggaacagagggagatctggctgctggtgactgatgtgaccctgcaaactaaagaagagcgcgatccccgcctgccaaagactctattggtttatgtggctcccttatgcgttctggggtccgaagtcttagaggccttggccggggcagctccccattcactcttctttaaagatgctcttagggatcagggccgcatcgtctgcgcagagagaaccgttctcctattacagaagcccctactgtctgtagtatccggtgccagttcatgtgagcttcctggcccagtcatgcttgatagcctggactccgcaaccccagtgaattccatctgtagcgtgcaggggacagtggtaggagtggacgagagtacagctttctcgtggcctgtctgcgacatgtgtgggaatggacgactagaacagcgtcctgaggatcggggggcgttctcttgcggcgattgtagcagagtagtgacctcgcctgttctgaagcgacatttacaggttttcttggactgtaggtccagaccccagtgcagggtgaaagtcaagctcctacagagaagcatctcttcactcctcaggtttgccgcaggggaagatggatcatacgaagttaagtccgtgctggggaaagaagttggactactgaattgcttcgtgcagtccgtgactgctcatcccacatcctgcatcggcctggaagagatcgagctgctaagtgcaggaggggcatctgcagagcactag

SEQ ID NO: 36164 - DNA, 2748 bp, Artificial Sequence
  derived and/or modified sequence
atgccccggggcagccgggcccggggcagcaagaggaagaggtcctggaacacagaatgtcccagcttccctggagagcggcccctgcaggtgcggcgggccggcctgaggacagctggagctgctgccagcctgtctgaggcctggctgcgctgtggggagggcttccagaacaccagcggcaaccccagcctgacagctgaggagaagaccatcacagagaagcacctggagctgtgcccccggcccaagcaggagaccaccaccagcaagagcaccagcggcctgacagacatcacctggagcagcagcggcagtgacctgagtgatgaggacaagaccctgagccagctgcagagagatgagctgcagttcatcgactgggagattgacagcgacagagctgaggccagtgactgtgatgaatttgaagatgatgagggcgctgtggagatcagtgactgtgccagctgtgccagcaaccagagcctgaccagtgatgagaagctgtctgagctgcccaagcccagcagcattgagatcctggagtacagcagtgacagcgagaaggaggatgacctggagaatgtgctgctgattgacagcgagagcccccacaagtaccacgtgcagtttgccagtgatgcccggcagatcatggagcggctgattgaccccaggaccaagagcacagagaccatcctgcacaccccccagaagcccacagccaagttccccaggaccccagagaacagcgccaagaagaagctgctgcggggcggcctggccgagcggctgaatggcctgcagaaccgggagaggtctgccatcagcctgtggaggcaccagtgcatctcctaccagaagaccctgagcggcaggaagagcggcgtgctgactgtgaagatcctggagctgcatgaagaatgtgccatgcaggtggccatgtgtgagcagctgctgggcagccctgccaccagcagcagccagagcgtggcccccaggcctggggccggcctgaaggtgctcttcaccaaggagacagctggctacctgcggggccggccccaggacacagtgcgcatcttccccccctggcagaagctgatcatccccagcggcagctgccctgtgatcctgaacacctacttctgtgagaaggtggtggccaaggaggacagcgagaagacctgtgaggtgtactgcccagacatccccctgcccaggaggagcatcagcctggcccagatgtttgtgatcaagggcctgaccaacaacagccctgagatccaggtggtgtgcagcggcgtggccaccaccggcacagcctggacccacggccacaaggaggccaagcagaggatccccaccagcacccccctgcgggacagcctgctggatgtggtggagagccagggcgccgcctcctggccaggggccggcgtgcgggtggtggtgcagagggtgtacagcctgcccagccgggacagcacccggggccagcagggcgccagcagcggccacacagatcctgctggcacccgggcctgcctgctggtgcaggatgcctgtggcatgtttggagaggtgcacctggagttcaccatgagcaaggcccggcagctggagggcaagagctgcagcctggtgggcatgaaggtgctgcagaaggtgacccggggccgcacagctggcatcttcagcctgattgacaccctgtggcccccagccatccccctgaagaccccaggccgggaccagccctgtgaggagatcaagacccacctgcccccaccagccctgtgctacatcctgacagcccaccccaacctgggccagattgacatcattgatgaggaccccatctacaagctgtaccagccccctgtgacccgctgcctgcgggacatcctgcagatgaatgacctgggcacccgctgcagcttctacgccaccgtcatctaccagaagccccagctgaagagcctgctgctgctggagcagcgggagatctggctgctggtgacagatgtgaccctgcagaccaaggaggagcgggacccccggctgcccaagaccctgctggtgtatgtggcccccctgtgtgtgctgggcagcgaggtgctggaggccctggccggggccgccccccacagcctcttcttcaaggatgccctgcgggaccagggccgcatcgtgtgtgccgagaggacagtgctgctgctgcagaagcccctgctgtctgtggtgtctggggccagcagctgtgagctgcccggccctgtgatgctggacagcctggacagcgccacccctgtgaacagcatctgcagcgtgcagggcaccgtggtgggcgtggatgagagcacagccttctcctggcctgtgtgtgacatgtgtggaaatggccgcctggagcagaggcctgaggacagaggagccttcagctgtggggactgcagccgggtggtgaccagccctgtgctgaagaggcacctgcaggtgttcctggactgccgcagccggccccagtgccgggtgaaggtgaagctgctgcagaggagcatcagcagcctgctgcgctttgctgctggggaggatggcagctatgaggtgaagtctgtgctgggcaaggaggtgggcctgctgaactgctttgtgcagagcgtgacagcccaccccaccagctgcatcggcctggaggagattgagctgctgtctgctgggggcgccagcgctgagcactag

SEQ ID NO: 36165 - DNA, 2748 bp, Artificial Sequence
  derived and/or modified sequence
atgccccggggcagccgggcccggggcagcaagcggaagcggagctggaacactgaatgcccatcatttcctggcgagaggccccttcaggtgcgccgggccggcctgagaactgcaggggcagccgcatccctgtccgaggcttggttgcgctgtggagaaggctttcagaatacctcaggtaacccctcactcacagctgaagaaaaaaccatcactgaaaaacacttagagctgtgcccgagaccgaagcaggaaactactacttcaaagagtactagcgggctcacagatattacatggagttcctcagggtccgatctgtccgacgaggacaagacactaagccagctgcaacgcgacgaactacagtttatcgattgggagatagatagtgatagagctgaggcttcagattgcgatgagttcgaggatgacgaaggagctgtcgagatttccgactgtgcgtcatgcgctagcaatcaatcgctgacaagcgacgagaagctcagcgagctccccaagcctagcagcatcgagattttggagtattcctccgattcagaaaaggaggatgacctcgaaaatgttcttctcatcgactcagaaagccctcataagtatcatgtgcaatttgcgagtgatgcgaggcagattatggaacgtctgatcgacccacgaaccaagagcacagagaccattttgcacactccccagaagcctaccgctaaatttcctagaaccccggaaaactccgctaaaaagaaactgctgcggggagggcttgccgaaaggctaaatggcctgcagaacagggagcggtcagccatcagtttgtggcggcaccaatgcatttcgtaccagaagactctgtctgggaggaagtctggagttctgacagtgaaaatcctggaactacatgaggagtgtgcaatgcaagtcgccatgtgcgaacagctgcttggcagccctgccacctccagttcccaaagcgtggcaccgcgcccaggggccgggcttaaagtcctatttacaaaggaaacagctggctatttgagagggcgcccgcaggacacggttaggatatttccaccttggcagaaactgatcatccccagcggctcctgtcctgtaatcttaaacacgtacttctgcgagaaagtcgttgccaaagaagatagtgagaaaacctgcgaggtgtattgccccgatatcccactgccgcgaaggtccatttccctagctcagatgttcgtgatcaaggggctcacaaacaattcacctgaaatccaggtggtatgcagcggtgtggcaacaacaggtaccgcttggacccatggccacaaggaggccaagcaacgcattccgacatccacccccttacgggactcactcctcgatgtggtggaatcacaaggcgctgccagttggcccggagccggggtccgcgtggtcgtccagagagtctatagccttccctccagggatagcacccgcgggcagcagggcgcctcatcaggtcataccgatcctgctggaactagagcctgcttgttagttcaggacgcgtgtggcatgtttggcgaggtacatctggaattcactatgtccaaagcccgtcagttagagggtaagagttgtagcctagtgggcatgaaagtcctacagaaagtgactcgcggtaggactgcggggatctttagccttatagacacattgtggcctcccgccataccactgaaaacacccggcagagaccagccatgtgaagagatcaagacacatctgccaccgcccgccctttgttacatcctcaccgcccacccaaacctcgggcagattgacatcatcgacgaggaccccatctacaaattgtatcagccccctgtaaccaggtgcctgcgtgatatcctgcagatgaatgacctgggcactcgatgcagtttttacgccaccgtgatataccaaaagccacagttaaaatccctgctgctgctagaacagagggaaatatggctcctggttacggatgtgacactgcagacaaaggaggaaagggatccaagactccccaaaactttgctggtgtatgtggcccctctctgcgttctgggctcggaggtgctcgaagctctggccggtgccgcacctcattcactcttcttcaaggacgctctccgggaccagggcagaatagtttgcgcggaacgaacagtgctgctgctgcagaagcccttactctcggttgtctccggggccagtagctgcgagctgcctggccccgtgatgctggatagtctagacagtgccacacctgtcaactccatttgtagtgtccaaggtacggttgtgggagtcgatgaaagtactgcattttcttggcctgtttgcgatatgtgcggaaacggaagactcgaacagcgaccagaagatcggggcgcattctcctgtggagattgcagtcgggtggtgacgagccccgttctcaagcgccatctacaagtcttcctcgattgtagaagtaggcctcagtgcagggtgaaggtgaagctcctgcagcgctccatcagcagcttactaaggtttgctgcgggtgaggatggctcatacgaagtgaagtccgtcctcgggaaggaggttggactgctcaattgcttcgtccaatctgtgactgcccacccgacatcatgcattggacttgaagaaatcgaacttcttagtgcaggcggcgcatctgctgaacattag

SEQ ID NO: 36166 - DNA, 2748 bp, Artificial Sequence
  derived and/or modified sequence
atgccgaggggatcacgcgctcggggatccaagcgcaaacgcagctggaatactgaatgcccctccttccccggagaacggccactgcaggtgcggcgagcgggtctacgaactgctggcgctgccgcaagtctttctgaagcttggcttaggtgtggcgaaggattccagaacacctccgggaacccttcactgacagctgaagaaaaaacaatcaccgagaagcatctggaactctgtcctcggccaaaacaggagacaaccactagcaagagcacatccggcctcaccgacatcacatggagcagttccggttctgacctgtccgacgaggacaagacgctttctcagctccagcgtgacgagttacagtttatcgactgggagattgactccgatagagcagaggccagtgattgcgatgaatttgaggatgatgagggagccgtcgagatcagcgactgtgcgagctgcgcctccaaccagagcctcacctcggatgagaaactctctgagctaccaaaaccatcgtcaatcgaaatactcgaatattcttccgatagtgaaaaagaggacgacctggagaacgtccttttgattgactctgagagcccacacaagtatcatgtccagttcgcttccgatgccagacagattatggaaaggctgatcgaccccaggacaaaatccacagaaacaatcctgcacacacctcagaaacccacggccaagttccccagaaccccggaaaactctgcaaaaaagaaactcctgcgcggaggactggccgagcgactgaatgggctgcaaaacagagagagatccgcaatttctctgtggcggcaccagtgtattagctaccagaaaaccctgagtggccgtaaatctggagtcctgacagttaaaattctagagctgcacgaagagtgcgccatgcaggtggcaatgtgtgaacaattgctaggcagtccggcaacctcttccagtcaatcggtcgcccctagacccggtgccggacttaaggttctgttcacaaaagaaacagctgggtatctgcgaggtagaccacaggacacggtccgcatctttcccccttggcaaaaactgataattccttctggcagttgccccgtgattctaaacacttacttctgcgaaaaggtcgtcgccaaggaagacagcgagaagacatgcgaggtctactgccctgacattccacttcccaggcgctcaatctcattggctcaaatgttcgttatcaagggcctgacgaataacagccccgaaattcaggttgtttgtagtggggtggccacaaccggcaccgcctggacacacggccataaggaagctaagcagcgcattccaacatcaacacccctgcgcgacagtctgcttgatgtggtcgagtcccagggcgctgcttcctggcccggagccggtgtacgggtcgttgtgcaacgagtgtatagccttccttccagggatagtacccgcggtcaacaaggtgcctctagcggccacactgaccctgctggaacacgagcatgtttgctggtgcaggatgcttgtggcatgttcggagaggtccatctcgagttcaccatgagtaaggcaagacagctcgagggcaagtcatgcagtctcgtcggtatgaaggtgcttcaaaaggttacccggggacgcactgctggcatcttttctctcattgacactctgtggcctccagcgatccctctgaagacacccggtcgagatcagccgtgcgaggagataaaaacccacctcccgcctcccgctctgtgctacattctgacagcacacccaaacctaggccagatcgacatcatcgacgaggatcctatatataagctctaccagccaccagtgacaagatgcctgagagacatcctgcagatgaacgacctggggacaaggtgttctttctatgccacagtcatttatcagaaaccccagcttaagtctctgcttctccttgagcagagagaaatttggctgctggtcaccgatgttacactgcagaccaaagaggagagagacccccgactccctaagaccctcttggtctacgtagctcctctttgcgtgctggggagcgaggttcttgaagccctagctggagccgctccccactcactgttttttaaagacgcactgcgggaccagggaagaatagtgtgtgctgagcgcacagtgcttctgctgcaaaaaccattactctccgtggtatccggcgcttccagctgcgagctccccggtccagtgatgcttgattctctcgatagtgccactccagttaactcaatttgttcggtccaagggacagttgtgggcgtcgacgaatccacagccttcagctggcctgtgtgcgacatgtgcgggaacggccgtcttgagcagcggccagaagaccggggtgcattcagttgcggagattgcagccgagttgtgacgtctcccgtgttgaagcgtcatcttcaggttttcctggactgtaggagtaggccccagtgccgagtgaaggttaaactcctgcaaaggtccatctcaagtctgctgcgctttgccgctggcgaggatggttcctatgaagtgaagagcgtcttggggaaggaagtgggactcctcaactgtttcgttcagtctgtgactgcccacccaacaagctgcatagggctggaggagatcgagctcctgtctgccggtggggcatcagcagagcactag

SEQ ID NO: 36167 - DNA, 3988 bp, Artificial Sequence
  derived and/or modified sequence
agttgttgcctgacaacacagacgacagtaacttaattcgaaagacaatacttggaggcggcccccgctccaggcaccagcccagcagctcccccgaactccccaggagctcgcgggcgagcaacgccacagcccagagcgagctccgcggaacccccagccccggggaaggaagctcgactctccgcggggcactccttccgggctccgggcccgactaggccatccgggaggccctggagcgccggggccggagaagccctgccccccgccgaagccccgccctgcgcccgagcgcccgccaatggcagggcgcggtgcggcgcgccgaggtgggacggcggcgcgctgaggaggcggtgcgctcaggcggcgctcccggagatgccccgcggcagccgcgctcggggctctaagagaaaaaggagttggaatacagaatgcccatcctttccaggagaaagaccactgcaggtcagaagagcaggtctcaggacagcaggggcagctgcctctctctctgaagcatggctcaggtgtggagaagggtttcagaacacttctgggaatccgtcattaacagctgaagagaagacgattacagaaaagcaccttgaattatgccctagacccaagcaagaaaccaccacatctaaaagcaccagtgggcttacagacataacatggagctccagtggaagtgatttgtcggatgaagataagacactttctcagttacagagagatgaattacagtttatcgactgggagattgacagtgacagggcagaggctagtgactgtgatgaatttgaagatgacgagggtgctgtggaaatctcagactgtgcttcttgtgcaagtaatcagtctttgacaagtgatgagaagctgtcggagcttcccaagccaagttctatagaaattttagagtattcatcagatagtgaaaaagaagatgatttggaaaatgtcctactcattgattcagaatcccctcacaaataccacgtgcagtttgcatcggatgcaagacagattatggagagactgatagatccaaggacaaaatcaacagagaccattttgcatacacctcagaaacccacagctaagtttcccaggactccagaaaattcagcaaagaagaagcttttaagaggtggactagcagaaagactaaatggactgcagaatcgagagagatctgctatttctttgtggagacatcaatgtatttcttaccaaaagacactttcaggtagaaaatctggtgtattaactgtgaaaattttagagctgcatgaggaatgtgccatgcaagttgccatgtgtgagcagttattggggtcaccagccaccagctcctcccaaagtgtggctcccaggcctggagctggcctgaaagttctcttcaccaaggagactgcaggctacctcaggggccgtccccaggacactgtccggatcttccctccctggcaaaaactgattattccaagtggaagttgccctgttattctgaatacttacttttgtgagaaagttgttgccaaagaagattcagaaaaaacttgtgaagtgtactgtccggacataccccttccaagaagaagcatctctttggcccagatgtttgtaattaagggtctaacaaataattcacctgaaatccaggttgtgtgtagtggtgtagccactacagggacagcctggacccatgggcacaaagaagcaaaacagcgcatcccaaccagcactcccctgagggattctctcctggatgtggtggaaagccagggagctgcctcgtggccaggagctggagtccgagtggtggtgcaaagagtgtattctcttcccagcagagacagcaccaggggtcagcagggggccagctcaggacacacagacccagctggaactcgagcctgccttctggtacaagatgcctgtggaatgttcggtgaagtgcacttggagttcaccatgtcgaaggcaagacagttggaagggaagtcttgcagcctggtgggaatgaaggttctacagaaagtcaccagaggaaggacagcggggattttcagtttgattgacaccctgtggcccccagcgatacctctgaaaacacctggccgcgaccagccctgtgaagagataaaaactcatctgcctcctccagccttgtgttacatcctcacagctcatccaaatctgggacaaattgatataattgacgaagaccccatttataagctttaccagcctccagttacccgctgcttaagagacattctccagatgaatgatcttggtacccgttgcagtttctatgccacggtgatttaccaaaaaccacagctgaagagtctgctgcttctggagcaaagggagatctggctgctagtgaccgatgtcactctgcaaacgaaggaggagagagaccccaggctccccaaaaccctgctggtctatgtggcccccttgtgtgtgctgggctctgaagtcctggaggcactcgctggggctgcccctcacagcctcttcttcaaggacgctctccgtgaccagggtcggattgtttgtgctgaacgaactgtcctcttgcttcagaagccccttttgagtgtggtctctggtgcaagttcctgtgagctgcctggcccggtgatgctcgacagcctggactctgcaacacctgtcaactccatctgcagtgttcaaggcactgtggttggcgtggacgagagcactgctttctcatggcctgtgtgtgacatgtgtggcaacgggagattggaacagaggccggaagacagaggcgccttttcctgtggggactgctcccgggtggtcacatctcctgttctcaagaggcacctgcaggtcttcctggactgccgctcaagaccgcagtgcagagtgaaggtcaagctgttgcagcgcagcatttcctccctgctgaggtttgccgccggtgaagatgggagctacgaagtgaagagtgtcctcggaaaggaagtggggttgttaaattgttttgtccagtccgtaaccgcccacccgaccagctgcattggattggaggaaatcgagcttctgagtgcaggaggggcctctgcagaacactagcggttgccgcaggatctgtgaactttgcaatgtggctgcaagggtggtggtggtggtggtgatttggggtagttatttgttaactatggacacagtgaacgtagtttacgatcttgaaatgaaacttagatttttctggggaaatgttcagatacagttttgtgaactgtaaatcaaaatacctttttctacagtttatcttttattttctgcaaatttaggaacatatttactcgttttcacattgaatcttaagtttaagctcttcatttggtatttaggcaatatatgagaaaaaaattttttttgttcatttgtaattttaacaagttgaacattttaccatgattgaacatgtttttattacagtatttaacattcccccaaagaataccctgcaaagtgtaaacctttgtcccatactgtgatattactgttctgctacaataaatgtcaaacctaagcactttgcagttcactacttttgggaaaatgttctagggaactgtatcacaggtgaaactgttacccataaagtgtagctctctgaactggtgtgatcgtgtctctgctgaatggtggtggggatagctggctccaccacacacacctgttttaattaggctgggtaatgtgcacggagagcaaagatcacagactaaggagcagtcagtcggatatttgctttgctggcaaagatttaaaccaagaattaattatctttggacactataaagattttgttcccttccttatagcaatataatcatgacaggccatggttaactacatcagatacacgtagcagccgtgaccaagacatggtgccctaataccaagtgttcttgggttaaag

SEQ ID NO: 36168 - protein, 1374 aa, Artificial Sequence
  derived and/or modified sequence
MSSSFFNPSFAFSSHFDPDGAPLSELSWPSSLAVVAVSFSGLFAVIVLMLACLCCKKGGIGFKEFENAEGDEYAADLAQGSPATAAQNGPDVYVLPLTEVSLPMAKQPGRSVQLLKSTDVGRHSLLYLKEIGRGWFGKVFLGEVNSGISSAQVVVKELQASASVQEQMQFLEEVQPYRALKHSNLLQCLAQCAEVTPYLLVMEFCPLGDLKGYLRSCRVAESMAPDPRTLQRMACEVACGVLHLHRNNFVHSDLALRNCLLTADLTVKIGDYGLAHCKYREDYFVTADQLWVPLRWIAPELVDEVHSNLLVVDQTKSGNVWSLGVTIWELFELGTQPYPQHSDQQVLAYTVREQQLKLPKPQLQLTLSDRWYEVMQFCWLQPEQRPTAEEVHLLLSYLCAKGATEAEEEFERRWRSLRPGGGGVGPGPGAAGPMLGGVVELAAASSFPLLEQFAGDGFHADGDDVLTVTETSRGLNFEYKWEAGRGAEAFPATLSPGRTARLQELCAPDGAPPGVVPVLSAHSPSLGSEYFIRLEEAAPAAGHDPDCAGCAPSPPATADQDDDSDGSTAASLAMEPLLGHGPPVDVPWGRGDHYPRRSLARDPLCPSRSPSPSAGPLSLAEGGAEDADWGVAAFCPAFFEDPLGTSPLGSSGAPPLPLTGEDELEEVGARRAAQRGHWRSNVSANNNSGSRCPESWDPVSAGGHAEGCPSPKQTPRASPEPGYPGEPLLGLQAASAQEPGCCPGLPHLCSAQGLAPAPCLVTPSWTETASSGGDHPQAEPKLATEAEGTTGPRLPLPSVPSPSQEGAPLPSEEASAPDAPDALPDSPTPATGGEVSAIKLASALNGSSSSPEVEAPSSEDEDTAEATSGIFTDTSSDGLQARRPDVVPAFRSLQKQVGTPDSLDSLDIPSSASDGGYEVFSPSATGPSGGQPRALDSGYDTENYESPEFVLKEAQEGCEPQAFAELASEGEGPGPETRLSTSLSGLNEKNPYRDSAYFSDLEAEAEATSGPEKKCGGDRAPGPELGLPSTGQPSEQVCLRPGVSGEAQGSGPGEVLPPLLQLEGSSPEPSTCPSGLVPEPPEPQGPAKVRPGPSPSCSQFFLLTPVPLRSEGNSSEFQGPPGLLSGPAPQKRMGGPGTPRAPLRLALPGLPAALEGRPEEEEEDSEDSDESDEELRCYSVQEPSEDSEEEAPAVPVVVAESQSARNLRSLLKMPSLLSETFCEDLERKKKAVSFFDDVTVYLFDQESPTRELGEPFPGAKESPPTFLRGSPGSPSAPNRPQQADGSPNGSTAEEGGGFAWDDDFPLMTAKAAFAMALDPAAPAPAAPTPTPAPFSRFTVSPAPTSRFSITHVSDSDAESKRGPEAGAGGESKEA

SEQ ID NO: 36169 - DNA, 4125 bp, Artificial Sequence
  derived and/or modified sequence
atgagtagttcctttttcaacccttcgtttgcattcagctcacattttgatcccgacggcgccccattatccgaactgagctggccctcatcccttgccgtcgtggctgtgtccttcagtggtctctttgccgtaatcgtgcttatgctggcctgcttgtgctgtaagaagggcggaatcggattcaaagaattcgagaacgccgaaggtgacgaatacgcagcggacttagcccagggatctcctgctaccgctgcccagaacggccctgacgtgtacgtgttgcccctgaccgaggtcagcctgcctatggctaagcagcccggtcggagcgtgcagcttttaaagagcactgatgttggacgccacagtttgctgtacctgaaggagataggccggggctggttcggcaaagtgtttttgggcgaagtgaactccggtatttcatccgcccaggtggtggtcaaggaactccaggcttccgcctccgttcaggagcagatgcagtttctcgaagaggttcagccgtatcgcgccttaaagcactcaaacctcttgcaatgtcttgcccagtgcgctgaggtgactccatacctgctggtaatggagttctgccctctcggtgacctgaagggatacctgcggtcttgccgagttgctgaatcaatggctcccgaccctagaacccttcagcgtatggcttgtgaggtggcatgtggcgtgctacacctacacaggaataatttcgtccacagcgatctcgctctgagaaactgcttgttaacagcggatcttactgtcaaaataggcgattacggcctagcccactgtaaataccgcgaggactattttgtgactgccgatcagctctgggtgcctctgaggtggatcgcgcccgagctggtggacgaagtacatagtaaccttttggtggtcgaccagacaaaatctgggaacgtatggtccttaggagttacaatttgggagctcttcgagttgggtacacagccctatcctcaacattctgatcagcaggtgctggcctacacagtcagggaacaacagcttaaactccccaagccacagctgcaacttactctctccgatcgttggtatgaggttatgcaattctgttggctgcagccagagcaaaggccaacagcggaggaagtgcacctcctgctctcctacctatgcgctaagggcgccaccgaggcagaggaggaatttgaacgtagatggcgcagtctgcggcccgggggaggaggggtggggccagggccaggtgcggcagggcccatgctgggaggcgtggtggaactggctgccgcttctagttttccacttctggaacagtttgccggtgatggttttcatgcggatggagacgacgtgctgacagtgactgagacctctcgcggacttaactttgagtataagtgggaagcaggccgtggcgcagaggctttccccgctactctgtcccccggtcgcaccgctaggctgcaagagttatgcgccccggatggcgcacctcccggagtggttcccgtcttgagtgcccacagtccctccttgggctctgagtattttattcggctagaagaggccgcccctgcagcgggccatgaccctgactgcgcaggctgcgcaccctcccccccggcgacggcggaccaggatgacgactctgatggcagcaccgctgcgtccctggcaatggagcctctcttgggccatggaccacccgtggatgtcccttgggggcgtggtgaccactatccccgccggtctctggctcgggatcccctctgtccaagtcggtcaccaagcccctcagcaggtcctctgtcactggcagaaggcggcgccgaggatgcagattggggagtcgctgcgttctgccctgcatttttcgaagatcctctcgggacctcacctctcggatcttcaggggctcctcccctgccacttaccggggaggacgaactcgaagaagtaggggcacgccgcgcagcccagcgtggccactggcgatccaacgtcagtgctaacaataactcgggatctcgatgccctgaatcctgggaccctgtctctgctggaggacatgcagaaggatgtcctagcccgaagcagactccacgggcttcccccgaacctggttatcccggcgagcctttgcttggactgcaagccgcctcagcccaggagccaggttgttgccctggactgccgcacttgtgcagcgctcagggcttagcgcccgctccatgcctcgtcaccccaagctggacagagactgcatcttcaggcggagaccaccctcaggcagagcctaagctggccaccgaagccgaaggcaccactggaccacggttgcccctgccctccgtgccctctcccagtcaagagggagcccccctccccagcgaagaagcttctgcccctgacgcccctgacgctttaccagattccccaacacccgctacgggaggtgaggtctccgccatcaagctggcctctgccctgaatggatcctcctcgtctcccgaagtcgaggccccatcctccgaagacgaggatacagccgaggcaaccagtggaatttttaccgatacttccagtgacggcctgcaggcgcgaaggcccgacgttgtccccgcattcaggtctctccagaaacaggtggggactccagactctttggacagccttgacattccatccagcgctagcgatggcgggtatgaggtgttcagcccatcggcaacaggcccaagcgggggacagcctcgggccctagacagtggctatgataccgagaattacgagagtcctgagttcgtcctaaaggaggcccaggagggatgcgagccccaggctttcgctgaacttgcttccgaaggcgaaggccccgggccggagacccggctcagcacatccctgagtggattgaatgaaaagaacccctatcgcgatagcgcgtatttctctgatttagaagcagaggctgaagctactagtgggcccgagaagaaatgtggcggcgaccgcgccccagggccagaactcggactgccttccacaggacagcctagtgagcaggtttgcttgagaccaggtgtgagcggggaggctcaaggttctggacccggcgaggtgctgccccccctgctacagctggaaggcagtagtccagaaccgtcaacctgtccctctggcctggttcctgagccacccgagccacaagggccagccaaggtgcggccaggaccatctccaagttgctcgcagtttttcctgctgacacctgtgcctcttcggtcagaagggaattcctctgagtttcaggggccgcccggcctgctgagcggccctgcacctcagaagaggatgggtggccccggcactcctagggctcctttaaggctggccctccccggcttgccggccgcgttagagggtaggccagaagaggaggaagaagactccgaggatagcgacgaatccgacgaagagctgaggtgttatagcgtgcaggagccctcggaagatagtgaggaagaggcgcctgctgtgccggttgtggtcgccgaatcgcagtcagctcgaaatctgagatctctacttaagatgccaagtctattgtcagagaccttttgcgaggacctcgagcggaaaaagaaggccgtgtccttcttcgatgatgtcacggtgtatctgttcgatcaggaaagccctaccagagagctcggtgagccctttccaggggccaaggagagtccccccacattcttacgaggcagccccgggtccccatcggctccaaaccggccccagcaagccgatggttcaccgaatggctccactgcggaagagggcggggggttcgcatgggacgatgactttcccctgatgactgcgaaggctgcttttgctatggctttggatcccgcggcgcccgcgccagccgcgcccacgcccacccctgctcctttttctaggttcacggtgagccctgcccctacaagcagattttccatcacccacgtcagcgatagtgatgcagaatccaaaaggggccccgaagccggcgccggtggcgagtccaaagaagcttag

SEQ ID NO: 36170 - DNA, 4125 bp, Artificial Sequence
  derived and/or modified sequence
atgagcagcagcttcttcaaccccagctttgccttcagcagccactttgatcctgatggagcccccctgtctgagctgtcctggcccagcagcctggccgtggtggccgtgtccttcagcggcctgtttgctgtgattgtgctgatgctggcctgcctgtgctgcaagaagggcggcatcggcttcaaggagtttgaaaatgcagaaggagatgaatatgctgctgacctggcccagggcagccctgccacagctgcccagaatggaccagatgtgtatgtgctgcccctgacagaggtgtccctgcccatggccaagcagcccggccgctctgtgcagctgctgaagagcacagatgtgggccgccacagcctgctgtacctgaaggagatcggccggggctggtttgggaaggtgttcctgggggaggtgaacagcggcatcagcagcgcccaggtggtggtgaaggagctgcaggccagcgcctctgtgcaggagcagatgcagttcctggaggaggtgcagccctaccgggccctgaagcacagcaacctgctgcagtgcctggcccagtgtgccgaggtgaccccctacctgctggtgatggagttctgccccctgggggacctgaagggctacctgcggagctgccgggtggccgagagcatggccccagaccccaggaccctgcagaggatggcctgtgaggtggcctgtggggtgctgcacctgcacaggaacaactttgtgcacagcgacctggccctgaggaactgcctgctgacagctgacctgactgtgaagattggagactatggcctggcccactgcaagtaccgggaggactactttgtgacagctgaccagctgtgggtgcccctgcgctggatcgcccctgagctggtggatgaggtgcacagcaacctgctggtggtggaccagaccaagtctggaaatgtgtggagcctgggcgtgaccatctgggagctgtttgagctgggcacccagccctacccccagcacagcgaccagcaggtgctggcctacacagtgcgggagcagcagctgaagctgcccaagccccagctgcagctgaccctgagtgaccgctggtatgaggtgatgcagttctgctggctgcagcctgagcagaggcccacagctgaggaggtgcacctgctgctgagctacctgtgtgccaagggggccacagaggccgaggaggagtttgagcggcgctggaggagcctgcggcctgggggcggcggcgtgggccctggccctggagctgctggccccatgctgggcggcgtggtggagctggccgccgccagcagcttccccctgctggagcagtttgctggagatggcttccacgcagatggagatgatgtgctgactgtgacagagaccagccggggcctgaactttgagtacaagtgggaggccggcagaggagctgaggccttccctgccaccctgagccctggccgcacagcccggctgcaggagctgtgtgccccagatggagcccctcctggggtggtgcctgtgctgagcgcccacagccccagcctgggcagcgagtacttcatccggctggaggaggccgccccagctgctggccatgaccctgactgtgccggctgtgcccccagccccccagccacagctgaccaggatgatgacagtgatggcagcacagctgccagcctggccatggagcccctgctgggccacggcccccctgtggatgtgccctggggccgcggggaccactacccccggcgcagcctggcccgggaccccctgtgccccagccgcagccccagccccagcgctggccccctgagcctggccgagggcggcgcagaagatgctgactggggcgtggccgccttctgcccagccttctttgaggaccccctgggcaccagccccctgggcagcagcggggccccacccctgcccctgactggagaagatgagctggaggaggtgggcgcccggcgggccgcccagaggggccactggaggagcaatgtgtctgccaacaacaacagcggcagccgctgcccagagagctgggaccctgtgtctgctgggggccatgctgagggctgccccagccccaagcagaccccccgggccagccctgagcccggctacccaggagagcccctgctgggcctgcaggccgccagcgcccaggagcccggctgctgccccggcctgccccacctgtgcagcgcccagggcctggccccagccccctgcctggtgacccccagctggacagaaacagccagcagtggaggagaccacccccaggccgagcccaagctggccacagaggccgagggcaccaccggcccccggctgcccctgcccagcgtgcccagccccagccaggagggcgcccccctgcccagcgaggaggccagcgccccagatgccccagatgccctgcctgacagccccaccccagccactggaggagaggtgtctgccatcaagctggccagcgccctgaatggcagcagcagcagccctgaggtggaggcccccagcagtgaagatgaggacacagctgaggccaccagcggcatcttcacagacaccagcagtgatggcctgcaggcccggcggccagatgtggtgcctgccttccgcagcctgcagaagcaggtgggcaccccagacagcctggacagcctggacatccccagcagcgccagtgatggcggctatgaggtgttcagccccagcgccaccggccccagcggcggccagccccgggccctggacagcggctatgacacagagaactatgagagccctgagtttgtgctgaaggaggcccaggagggctgtgagccccaggcctttgctgagctggccagcgagggggagggccctggccctgagacccggctgagcaccagcctgagcggcctgaatgagaagaacccctacagagattctgcctacttcagtgacctggaggccgaggccgaggccaccagcggccctgagaagaagtgtggcggggaccgggcccctggccctgagctgggcctgcccagcacaggccagcccagcgagcaggtgtgcctgcggcctggggtgtctggagaggcccagggcagcggccctggagaggtgctgccccccctgctgcagctggagggcagcagccctgagcccagcacctgccccagcggcctggtgcctgagcccccagagccccagggccctgccaaggtgcggcccggccccagccccagctgcagccagttcttcctgctgacccctgtgcccctgcggtctgagggcaacagcagcgagttccagggccccccaggcctgctgagcggccctgccccccagaagaggatgggcggccctggcaccccccgggcccccctgcggctggccctgcccggcctgcctgctgccctggagggccggcctgaggaggaggaggaggacagcgaggacagtgatgaaagtgatgaggagctgcgctgctacagcgtgcaggagcccagtgaagattctgaggaggaggccccagctgtgcctgtggtggtggccgagagccagagcgccaggaacctgcggagcctgctgaagatgcccagcctgctgtctgagaccttctgtgaggacctggagaggaagaagaaggctgtgtccttctttgatgatgtgacagtgtacctgtttgaccaggagagccccacccgggagctgggggagcccttccctggggccaaggagagcccccccaccttcctgcggggcagccctggcagccccagcgcccccaaccggccccagcaggctgatggcagccccaacggcagcacagctgaggagggcggcggctttgcctgggatgatgacttccccctgatgacagccaaggccgcctttgccatggccctggaccctgctgccccagccccagctgcccccacccccaccccagcccccttcagccgcttcaccgtgtccccagcccccaccagccgcttcagcatcacccacgtgtctgacagtgatgctgagagcaagaggggccctgaggccggggccggcggggagagcaaggaggcctag

SEQ ID NO: 36171 - DNA, 4125 bp, Artificial Sequence
  derived and/or modified sequence
atgagcagcagcttcttcaaccccagcttcgccttcagcagccacttcgaccccgatggagcacctctgagcgagttgtcttggcctagttccttagccgtggtggcagtaagctttagtggcctgttcgccgttattgtgctcatgctggcatgtctgtgttgcaaaaagggaggaattggatttaaggagttcgaaaatgcggaaggtgacgaatatgctgccgacctcgctcagggttcaccagctactgccgcccaaaacggacctgacgtttacgtcctgcctctgacagaagtgtccctgccaatggccaaacagcccgggagaagcgtccaacttcttaaatcaactgacgtcggcagacacagtctgttgtatctcaaggagataggaaggggatggttcggcaaagtcttccttggcgaggtcaactccggcattagctctgctcaggtggtggtcaaagagctgcaggcttccgctagtgtacaagagcaaatgcagttccttgaggaagtgcagccttacagggcccttaagcacagcaatctgctccagtgcctcgcgcagtgtgctgaagtgactccttatctgcttgttatggagttctgcccgttgggtgatttaaagggatacctgaggagttgtcgcgtggccgaatctatggccccagaccccaggacccttcagcggatggcctgtgaagtggcatgcggcgtcttacacctgcaccgcaacaacttcgtacatagcgacctggccctgcgcaattgtttactaaccgccgacctcacagtgaagatcggagattatggattggcacattgcaaataccgggaagattactttgttaccgctgatcagctgtgggtgcctcttcggtggattgcccccgaactggtggacgaagtccactcaaatctgctggtcgtggatcagacgaagtctggcaatgtctggtcgttaggagttaccatttgggagctcttcgaactgggtacacaaccatatccacaacactcagaccagcaggtccttgcgtatactgtgagagaacagcagttgaaactccccaagccccagttacagcttacgctttctgatcgctggtatgaggtgatgcagttttgctggctgcagccagaacagcgccctactgcagaggaagtccatttattgctgtcctatctatgcgccaaaggagccacagaggctgaagaggaattcgagcggagatggagatccttgagacccggcggcggaggtgtcggccccgggcccggagctgccgggcccatgctcggcggggtcgtggagctggccgcagcctcgtccttcccattgttggagcagtttgcaggggatggattccatgccgacggcgatgacgtgctgaccgtgacagagacttctcgaggcctgaactttgaatacaagtgggaggcgggaagaggggcggaggcatttccagctaccctttcccctggaaggaccgctaggttgcaggaactgtgcgcacctgatggcgccccgccaggggtggttccggtgctctctgcccattcaccgtcacttggatcagaatacttcattaggctggaggaagcagctccggctgcagggcatgacccggattgtgctgggtgcgctccaagtccgccagccaccgctgaccaagacgacgacagtgacggtagcacagccgcatccttagccatggagccgctactgggacatggtccccccgtagacgtgccatggggccggggggaccactatccccgccgctcgctggcccgggatccactctgccccagccggtcccccagcccatccgcagggccgctgagtctggccgaggggggcgctgaagacgccgactggggtgtggctgccttttgccctgctttttttgaggatcccctcgggacaagtccactgggaagttccggcgctccccccctccccctcacgggagaggatgagcttgaagaagttggcgcacggagggcggcacagcgcgggcattggaggtccaacgtgagcgccaacaacaattcagggtcccggtgccccgaaagttgggatcctgtgagcgcaggggggcacgctgagggatgtccatcgcccaagcagactccgcgtgcttcccccgagcccggataccctggggagccacttcttggtttgcaggccgcctctgcgcaagaacctggttgttgccccggtctgcctcatctctgtagcgcacagggactcgctccagccccatgccttgtgacaccgagctggaccgagactgcctcctctggcggcgatcacccccaggcggagccgaagttagccactgaggcggaaggaacaaccgggccaagactgcccctgccctcagtcccatccccctctcaggaaggcgcacctctcccatctgaagaagcctccgccccagacgccccggacgccctgccggactcacctacacctgcgacagggggggaagtctccgctattaagcttgcatccgctctgaacggcagtagttcttctccagaggtggaggcccccagctccgaggacgaagataccgccgaagcaactagcgggatatttacagacacgagtagtgacgggttgcaggcccgccgtccggatgtggtgcctgccttccgctccctacagaaacaggtgggcacccccgattctctggatagcctcgatatcccaagttcagccagcgatggcggctacgaagtttttagccccagcgccacgggacctagcggcggccaaccacgagcactcgattccggctacgatacggaaaactatgagtctcctgagttcgtgctgaaggaggcacaagaaggctgtgagccacaagcctttgcagagctggcatcagagggagagggccctggcccagaaaccagactctccacttcactcagcggtctgaacgagaaaaatccctatcgcgatagtgcctactttagtgacctcgaggccgaggccgaggccacttcaggaccagaaaaaaaatgcggaggagaccgcgcccccggaccagaactgggactgcccagcactggccagccgtcagaacaggtatgtctgcggcccggagttagcggcgaggctcagggttccgggcctggagaagtattacccccactactgcaattggagggctcttccccagaaccctcaacctgtccatctggcctggtccccgagccacccgagccccagggacctgccaaggttcgccctgggccatcaccctcctgctcacagttctttttgctgacccccgttccactgaggtccgaaggcaactctagcgagtttcagggtccccctggcttactgtctgggcctgcgccacagaaacggatgggcggacctggcacgccacgcgctcccctacgactggcacttcctggtttgcctgcggcactagagggccggcccgaggaggaagaggaagactccgaggatagcgacgaaagtgatgaggaactcaggtgttactctgtgcaggaaccttccgaggactctgaagaagaggcccctgcggtgccggtagtggtggctgagagccagtctgctcggaatctccgcagtctgctgaaaatgcccagcttactgtccgagacgttctgcgaggaccttgagaggaagaagaaagcagtctctttttttgacgacgttacagtgtacctctttgaccaggaatcacctactagggaactcggcgagccattccccggggcgaaggagtccccacctacatttctgcgcgggagccccgggtccccaagcgcacccaacaggccccagcaagcagacggttcccctaatgggtcgactgccgaggagggcgggggatttgcttgggatgacgattttccattaatgaccgcaaaagccgcttttgctatggccctggaccctgctgctccagcccctgctgccccaacccccactccagcgccattcagccgatttactgtgagtcccgctcctacttctaggttctcaatcacacatgtgtccgatagcgacgcagaaagtaaacgcggtcccgaagccggagccggtggagaaagcaaggaggcctag

SEQ ID NO: 36172 - DNA, 4125 bp, Artificial Sequence
  derived and/or modified sequence
atgtccagctccttcttcaatcccagctttgccttttcttcccacttcgaccctgacggagcaccactgtcagaactctcctggccatcatcgctggcagtcgttgccgtctcattctccggcctgttcgcggtaatagtgctgatgctagcatgcctctgttgtaagaagggtggcatcggtttcaaagaatttgagaacgccgagggcgatgagtatgccgcagatttagctcagggatcacctgctaccgccgctcagaacggcccagatgtgtatgtactgccccttactgaagtgagcctgcccatggctaagcagcccggtaggagcgttcaattgctcaagtcaacagacgttggacgccactctctcttgtaccttaaggagatcgggagaggatggtttgggaaggtgtttttgggcgaggtcaactctggtatctctagcgcgcaagtggtggtcaaagaactgcaggcctcagcctccgtacaggagcagatgcaattcttggaggaagtgcagccataccgagccctcaagcacagtaaccttctgcagtgcttagcccaatgcgcggaagtgactccgtatctgttggtgatggaattttgtcccttaggcgacctaaaaggctacctgcggagttgccgggtggcggagagcatggctccagacccacgcactctccagcggatggcttgcgaggtggcatgcggtgtcctgcaccttcaccggaacaactttgtccacagcgacctggccctccggaactgtctgctgacagcagacctgactgtgaagattggcgactacggtctcgctcattgtaagtatcgggaagattatttcgtcactgcagatcagctgtgggttccattacgctggatcgcccctgaacttgtggatgaggtgcactctaatctgttggtcgtggatcaaaccaagagtgggaacgtatggagcctcggggtgactatctgggaactgtttgaactagggactcaaccgtacccacaacacagtgaccagcaagtgctcgcatataccgttagggaacagcagctgaaactgcccaagccccagttacaattgaccctttctgatcgctggtatgaagttatgcagttttgttggcttcagcctgaacaaaggccgactgcagaggaggtacacctcttattgagctatctctgtgccaaaggggctacagaagctgaggaggagttcgagcgccgttggaggagcctcaggcccggaggaggcggtgtcggcccaggcccaggcgctgccggaccaatgctcggcggtgtggtggaactcgctgctgcctcttcatttccgcttctggagcaatttgccggtgatgggttccatgctgacggagacgacgtcttgaccgtgactgagacatccaggggcctgaactttgagtacaaatgggaagctgggagaggagctgaagcgttccccgctaccctatcacccggaaggaccgcgagactccaggagctgtgtgcccctgacggcgctccgcctggcgtggttcccgtgctaagcgcccactcaccctctctaggctctgagtattttatccggctggaggaggcagctcccgcagctggccatgatcctgactgtgcaggatgtgccccttcgcctcctgctactgcggaccaggacgacgacagtgatggttccacagccgcatcccttgctatggaacctttactgggccatgggccacccgtggacgtgccatggggacgtggcgaccactaccctagaagatcactggctagagatcccctgtgcccatccagaagtccatctccttccgccggacccctcagtttagcggaagggggtgctgaggatgcagactggggcgtggccgctttttgtccagccttttttgaggaccccctgggtacttcccccctgggctcctcaggagctccacctctcccactgaccggagaagacgagctggaagaggttggagcccgtagagcggctcagagaggacattggagaagtaacgtgtctgccaacaataatagtggaagccgttgtccggaaagttgggaccctgtcagcgccggtggacatgccgaggggtgcccctctcctaagcaaaccccccgagctagccctgagcccggatatccgggagagccactgctgggcctgcaagccgcttctgctcaggaaccgggttgctgcccaggcctgccgcacttgtgttctgcacaaggcctggccccagctccttgcctcgtgacaccttcctggactgaaaccgccagcagcggaggggaccatccgcaggctgagccgaagttagccaccgaggcagaaggcactacgggaccccgactgcctctgccctctgtgccttcgccatcacaggagggcgctcccctcccaagcgaagaggcctctgcccctgatgccccagacgccttgccagactcccctacgccggctactgggggtgaggttagcgctatcaaactagccagcgcactgaacggtagcagctcatcgcccgaggtggaggccccttctagtgaagacgaggacacagcagaggcaacttctgggattttcactgatacaagctctgatgggttgcaagctaggaggcctgacgtcgtacctgccttccgatccttgcagaagcaggtgggtacacctgacagcctggacagtcttgacattcccagttccgcaagtgacgggggatacgaggtattctcaccatcagctacagggccatccgggggtcagcccagggcacttgactccggatacgacactgaaaactacgagtccccagagttcgtccttaaggaggctcaggaggggtgcgagccccaagcgttcgccgagctggccagcgagggtgaaggtccagggcctgaaaccaggctcagcactagcctgagcggacttaacgagaagaatccctaccgtgattctgcctatttctccgacctggaggctgaagccgaagccactagtgggcctgaaaagaagtgtggtggggacagggcccctgggccagaactgggcctgccatcgacaggacagcctagcgagcaggtttgtttacgcccaggggtgtccggcgaagcacaaggttctggtccgggagaggtcttgcccccactcctgcagctagagggctccagccctgaaccatccacttgccctagcggcctggtgccagagcccccagaaccccaaggacccgcaaaggtgcgacccggaccttctccatcctgctcacagttctttttgcttacacctgtgccattgaggagcgagggcaattcttccgagttccagggcccacccggacttctgtccgggcctgcccctcagaaacgtatgggaggacctgggacacccagggcaccactcaggttagccctcccagggctccctgcagctctggaggggagaccagaagaggaggaggaggactctgaagatagtgacgagagcgacgaggagttgcggtgctattctgtgcaggaaccatcagaggattctgaggaggaggccccagctgtccccgttgttgtcgctgaatctcaatccgctcgaaatttacgctctctgctcaaaatgcccagtttgctgtccgaaaccttttgcgaagatctggagagaaagaaaaaagccgttagcttcttcgacgatgttactgtgtatctctttgatcaggagtcacctacgagggagctgggggagccgttccccggtgcaaaggagtcccccccaacattcttacgcggttctccaggcagccccagcgccccaaatagacctcaacaggctgacggctctccaaacggaagcacagcagaggagggcggtggattcgcgtgggacgatgacttcccactcatgaccgctaaggccgctttcgcgatggccctggaccctgcagctcctgccccagctgccccaaccccgacacccgctccattctcgaggtttaccgtttcccctgcacccacatcccgcttctcaatcacccacgtgagcgacagtgatgctgaaagtaagcgcggaccagaagccggagccggaggagaatcgaaggaggcatag

SEQ ID NO: 36173 - DNA, 5257 bp, Artificial Sequence
  derived and/or modified sequence
atgcccgccggccgctggcccggccatgtcgtcgtccttcttcaaccccagcttcgccttcagctcgcacttcgaccccgacggcgccccgctcagcgagctgtcctggccatcctccctcgccgtggtggctgtgtctttctccgggctcttcgccgtcatcgtcctcatgctggcctgcctgtgctgtaagaagggcggtatcgggttcaaggagtttgagaatgcggagggggacgagtacgcagccgacctggcgcagggctccccggccacggcagcacagaacgggcccgacgtgtacgtcctgccactcacggaggtctccttgcccatggccaagcagcctgggcgctcagtgcagctcctcaagtccacagacgtgggccggcacagcctcctgtacctgaaggaaatcggccgtggctggttcgggaaggtgttcctgggggaggtgaactctggcatcagcagtgcccaggtggtggtgaaggagctgcaggctagtgccagcgtgcaggagcagatgcagttcctggaggaggtgcagccctacagggccctgaagcacagcaacctgctccagtgcctggcccagtgcgccgaggtgacgccctacctgctggtgatggagttctgcccactgggggacctcaagggctacctgcggagctgccgggtggcggagtccatggctcccgacccccggaccctgcagcgcatggcctgtgaggtggcctgtggcgtcctgcaccttcatcgcaacaatttcgtgcacagcgacctggccctgcggaactgcctgctcacggctgacctgacggtgaagattggtgactatggcctggctcactgcaagtacagagaggactacttcgtgactgccgaccagctgtgggtgcctctgcgctggatcgcgccagagctggtggacgaggtgcatagcaacctgctcgtcgtggaccagaccaagagcgggaatgtgtggtccctgggcgtgaccatctgggagctctttgagctgggcacgcagccctatccccagcactcggaccagcaggtgctggcgtacacggtccgggagcagcagctcaagctgcccaagccccagctgcagctgaccctgtcggaccgctggtacgaggtgatgcagttctgctggctgcagcccgagcagcggcccacagccgaggaggtgcacctgctgctgtcctacctgtgtgccaagggcgccaccgaagcagaggaggagtttgaacggcgctggcgctctctgcggcccggcgggggcggcgtggggcccgggcccggtgcggcggggcccatgctgggcggcgtggtggagctcgccgctgcctcgtccttcccgctgctggagcagttcgcgggcgacggcttccacgcggacggcgacgacgtgctgacggtgaccgagaccagccgaggcctcaattttgagtacaagtgggaggcgggccgcggcgcggaggccttcccggccacgctgagccctggccgcaccgcacgcctgcaggagctgtgcgcccccgacggcgcgcccccgggcgtggttccggtgctcagcgcgcacagcccgtcgctgggcagcgagtacttcatccgcctagaggaggccgcacccgccgccggccacgaccctgactgcgccggctgcgcccccagtccacctgccaccgcggaccaggacgacgactctgacggcagcaccgccgcctcgctggccatggagccgctgctgggccacgggccacccgtcgacgtcccctggggccgcggcgaccactaccctcgcagaagcttggcgcgggacccgctctgcccctcacgctctccctcgccctcggcggggcccctgagtctggcggagggaggagcggaggatgcagactggggcgtggccgccttctgtcctgccttcttcgaggacccactgggcacgtcccctttggggagctcaggggcgcccccgctgccgctgactggcgaggatgagctagaggaggtgggagcgcggagggccgcccagcgcgggcactggcgctccaacgtgtcagccaacaacaacagcggcagccgctgtccagagtcctgggaccccgtctctgcgggcggccacgctgagggctgccccagtccaaagcagaccccacgggcctcccccgagccggggtaccctggagagcctctgcttgggctccaggcagcctctgcccaggagccaggctgctgccccggcctccctcatctatgctctgcccagggcctggcacctgctccctgcctggttacaccctcctggacagagacagccagtagtgggggtgaccacccgcaggcagagcccaagcttgccacggaggctgagggcactaccggaccccgcctgccccttccttccgtcccctccccatcccaggagggagccccacttccctcggaggaggccagtgcccccgacgcccctgatgccctgcctgactctcccacgcctgctactggtggcgaggtgtctgccatcaagctggcttctgccctgaatggcagcagcagctctcccgaggtggaggcacccagcagtgaggatgaggacacggccgaggccacctcaggcatcttcaccgacacgtccagcgacggcctgcaggccaggaggccggatgtggtgccagccttccgctctctgcagaagcaggtggggacccccgactccctggactccctggacatcccgtcctcagccagtgatggtggctatgaggtcttcagcccgtcggccactggcccctctggagggcagccgcgagcgctggacagtggctatgacaccgagaactatgagtcccctgagtttgtgctcaaggaggcgcaggaagggtgtgagccccaggcctttgcggagctggcctcagagggtgagggccccgggcccgagacacggctctccacctccctcagtggcctcaacgagaagaatccctaccgagactctgcctacttctcagacctcgaggctgaggccgaggccacctcaggcccagagaagaagtgcggcggggaccgagcccccgggccagagctgggcctgccgagcactgggcagccgtctgagcaggtctgtctcaggcctggggtttccggggaggcacaaggctctggccccggggaggtgctgcccccactgctgcagcttgaagggtcctccccagagcccagcacctgcccctcgggcctggtcccagagcctccggagccccaaggcccagccaaggtgcggcctgggcccagccccagctgctcccagtttttcctgctgaccccggttccgctgagatcagaaggcaacagctctgagttccaggggcccccaggactgttgtcagggccggccccacaaaagcggatggggggcccaggcacccccagagccccactccgcctggctctgcccggcctccctgcggccttggagggccggccggaggaggaggaggaggacagtgaggacagcgacgagtctgacgaggagctccgctgctacagcgtccaggagcctagcgaggacagcgaagaggaggcgccggcggtgcccgtggtggtggctgagagccagagcgcgcgcaacctgcgcagcctgctcaagatgcccagcctgctgtccgagaccttctgcgaggacctggaacgcaagaagaaggccgtgtccttcttcgacgacgtcaccgtctacctctttgaccaggaaagccccacccgggagctcggggagcccttcccgggcgccaaggaatcgccccctacgttccttagggggagccccggctctcccagcgcccccaaccggccgcagcaggctgatggctccccaaatggctccacagcggaagagggtggtgggttcgcgtgggacgacgacttcccgctgatgacggccaaggcagccttcgccatggccctagacccggccgcacccgccccggctgcgcccacgcccacgcccgctcccttctcgcgcttcacggtgtcgcccgcgcccacgtcccgcttctccatcacgcacgtgtctgactcggacgccgagtccaagagaggacctgaagctggtgccgggggtgagagtaaagaggcttgagacctgggcagctcctgcccctcaaggctggcgtcaccggagcccctgccaggcagcagcgaggatggtgaccgagaaggtggggaccacgtcctggtggctgttggcagcagattcaggtgcctctgccccacgcggtgtcctggagaagcccgtgggatgagaggccctggatggtagatcggccatgctccgccccagaggcagaattcgtctgggcttttaggcttgctgctagcccctgggggcgcctggagccacagtgggtgtctgtacacacatacacactcaaaaggggccagtgcccctgggcacggcggcccccaccctctgccctgcctgcctggcctcggaggacccgcatgccccatccggcagctcctccggtgtgctcacaggacacttaaaccaggacgaggcatggccccgagacactggcaggtttgtgagcctcttcccaccccctgtgcccccacccttgcctggttcctggtggctcagggcaaggagtggccctgggcgcccgtgtcggtcctgtttccgctgcccttatctcaaagtccgtggctgtttccccttcactgactcagctagacccgtaagcccacccttcccacagggaacaggctgctcccacctgggtcccgctgtggccacggtgggcagcccaaaagatcaggggtggaggggcttccaggctgtactcctgccccgtgggccccgttctagaggtgcccttggcaggaccgtgcaggcagctcccctctgtggggcagtatctggtcctgtgccccagctgccaaaggagagtgggggccatgccccgcagtcagtgttggggggctcctacctacagggagagggatggtggggaaggggtggagctgggggcagggcagcacagggaatatttttgtaactaactaactgctgtggttggagcgaatggaagttgggtgattttaagttattgttgccaaagagatgtaaagtttattgttgcttcgcagggggatttgttttgtgttttgtttgaggcttagaacgctggtgcaatgttttcttgttccttgttttttaagagaaatgaagctaagacaaaagaaa

SEQ ID NO: 36174 - DNA, 4125 bp, Artificial Sequence
  derived and/or modified sequence
atgagcagcagcttcttcaaccccagcttcgccttcagcagccacttcgaccccgacggcgcccccctgagcgagctgagctggcccagcagcctggccgtggtggccgtgagcttcagcggcctgttcgccgtgatcgtgctgatgctggcctgcctgtgctgcaagaagggcggcatcggcttcaaggagttcgagaacgccgagggcgacgagtacgccgccgacctggcccagggcagccccgccaccgccgcccagaacggccccgacgtgtacgtgctgcccctgaccgaggtgagcctgcccatggccaagcagcccggcagaagcgtgcagctgctgaagagcaccgacgtgggcagacacagcctgctgtacctgaaggagatcggcagaggctggttcggcaaggtgttcctgggcgaggtgaacagcggcatcagcagcgcccaggtggtggtgaaggagctgcaggccagcgccagcgtgcaggagcagatgcagttcctggaggaggtgcagccctacagagccctgaagcacagcaacctgctgcagtgcctggcccagtgcgccgaggtgaccccctacctgctggtgatggagttctgccccctgggcgacctgaagggctacctgagaagctgcagagtggccgagagcatggcccccgaccccagaaccctgcagagaatggcctgcgaggtggcctgcggcgtgctgcacctgcacagaaacaacttcgtgcacagcgacctggccctgagaaactgcctgctgaccgccgacctgaccgtgaagatcggcgactacggcctggcccactgcaagtacagagaggactacttcgtgaccgccgaccagctgtgggtgcccctgagatggatcgcccccgagctggtggacgaggtgcacagcaacctgctggtggtggaccagaccaagagcggcaacgtgtggagcctgggcgtgaccatctgggagctgttcgagctgggcacccagccctacccccagcacagcgaccagcaggtgctggcctacaccgtgagagagcagcagctgaagctgcccaagccccagctgcagctgaccctgagcgacagatggtacgaggtgatgcagttctgctggctgcagcccgagcagagacccaccgccgaggaggtgcacctgctgctgagctacctgtgcgccaagggcgccaccgaggccgaggaggagttcgagagaagatggagaagcctgagacccggcggcggcggcgtgggccccggccccggcgccgccggccccatgctgggcggcgtggtggagctggccgccgccagcagcttccccctgctggagcagttcgccggcgacggcttccacgccgacggcgacgacgtgctgaccgtgaccgagaccagcagaggcctgaacttcgagtacaagtgggaggccggcagaggcgccgaggccttccccgccaccctgagccccggcagaaccgccagactgcaggagctgtgcgcccccgacggcgccccccccggcgtggtgcccgtgctgagcgcccacagccccagcctgggcagcgagtacttcatcagactggaggaggccgcccccgccgccggccacgaccccgactgcgccggctgcgcccccagcccccccgccaccgccgaccaggacgacgacagcgacggcagcaccgccgccagcctggccatggagcccctgctgggccacggcccccccgtggacgtgccctggggcagaggcgaccactaccccagaagaagcctggccagagaccccctgtgccccagcagaagccccagccccagcgccggccccctgagcctggccgagggcggcgccgaggacgccgactggggcgtggccgccttctgccccgccttcttcgaggaccccctgggcaccagccccctgggcagcagcggcgccccccccctgcccctgaccggcgaggacgagctggaggaggtgggcgccagaagagccgcccagagaggccactggagaagcaacgtgagcgccaacaacaacagcggcagcagatgccccgagagctgggaccccgtgagcgccggcggccacgccgagggctgccccagccccaagcagacccccagagccagccccgagcccggctaccccggcgagcccctgctgggcctgcaggccgccagcgcccaggagcccggctgctgccccggcctgccccacctgtgcagcgcccagggcctggcccccgccccctgcctggtgacccccagctggaccgagaccgccagcagcggcggcgaccacccccaggccgagcccaagctggccaccgaggccgagggcaccaccggccccagactgcccctgcccagcgtgcccagccccagccaggagggcgcccccctgcccagcgaggaggccagcgcccccgacgcccccgacgccctgcccgacagccccacccccgccaccggcggcgaggtgagcgccatcaagctggccagcgccctgaacggcagcagcagcagccccgaggtggaggcccccagcagcgaggacgaggacaccgccgaggccaccagcggcatcttcaccgacaccagcagcgacggcctgcaggccagaagacccgacgtggtgcccgccttcagaagcctgcagaagcaggtgggcacccccgacagcctggacagcctggacatccccagcagcgccagcgacggcggctacgaggtgttcagccccagcgccaccggccccagcggcggccagcccagagccctggacagcggctacgacaccgagaactacgagagccccgagttcgtgctgaaggaggcccaggagggctgcgagccccaggccttcgccgagctggccagcgagggcgagggccccggccccgagaccagactgagcaccagcctgagcggcctgaacgagaagaacccctacagagacagcgcctacttcagcgacctggaggccgaggccgaggccaccagcggccccgagaagaagtgcggcggcgacagagcccccggccccgagctgggcctgcccagcaccggccagcccagcgagcaggtgtgcctgagacccggcgtgagcggcgaggcccagggcagcggccccggcgaggtgctgccccccctgctgcagctggagggcagcagccccgagcccagcacctgccccagcggcctggtgcccgagccccccgagccccagggccccgccaaggtgagacccggccccagccccagctgcagccagttcttcctgctgacccccgtgcccctgagaagcgagggcaacagcagcgagttccagggcccccccggcctgctgagcggccccgccccccagaagagaatgggcggccccggcacccccagagcccccctgagactggccctgcccggcctgcccgccgccctggagggcagacccgaggaggaggaggaggacagcgaggacagcgacgagagcgacgaggagctgagatgctacagcgtgcaggagcccagcgaggacagcgaggaggaggcccccgccgtgcccgtggtggtggccgagagccagagcgccagaaacctgagaagcctgctgaagatgcccagcctgctgagcgagaccttctgcgaggacctggagagaaagaagaaggccgtgagcttcttcgacgacgtgaccgtgtacctgttcgaccaggagagccccaccagagagctgggcgagcccttccccggcgccaaggagagcccccccaccttcctgagaggcagccccggcagccccagcgcccccaacagaccccagcaggccgacggcagccccaacggcagcaccgccgaggagggcggcggcttcgcctgggacgacgacttccccctgatgaccgccaaggccgccttcgccatggccctggaccccgccgcccccgcccccgccgcccccacccccacccccgcccccttcagcagattcaccgtgagccccgcccccaccagcagattcagcatcacccacgtgagcgacagcgacgccgagagcaagagaggccccgaggccggcgccggcggcgagagcaaggaggcctag

SEQ ID NO: 36175 - protein, 458 aa, Artificial Sequence
  derived and/or modified sequence
MTRGAWMCRQYDDGLKIWLAAPRENEKPFIDSERAQKWRLSLASLLFFTVLLSDHLWFCAEAKLTRARDKEHQQQQRQQQQQQQQQRQRQQQQQQRRQQEPSWPALLASMGESSPAAQAHRLLSASSSPTLPPSPGDGGGGGGKGNRGKDDRGKALFLGNSAKPVWRLETCYPQGASSGQCFTVENADAVCARNWSRGAAGGDGQEVRSKHPTPLWNLSDFYLSFCNSYTLWELFSGLSSPNTLNCSLDVVLKEGGEMTTCRQCVEAYQDYDHHAQEKYEEFESVLHKYLQSEEYSVKSCPEDCKIVYKAWLCSQYFEVTQFNCRKTIPCKQYCLEVQTRCPFILPDNDEVIYGGLSSFICTGLYETFLTNDEPECCDVRREEKSNNPSKGTVEKSGSCHRTSLTVSSATRLCNSRLKLCVLVLILLHTVLTASAAQNTAGLSFGGINTLEENSTNEE

SEQ ID NO: 36176 - DNA, 1377 bp, Artificial Sequence
  derived and/or modified sequence
atgaccagaggcgcctggatgtgcagacagtacgacgacggcctgaagatctggctggccgcccccagagagaacgagaagcccttcatcgacagcgagagagcccagaagtggagactgagcctggccagcctgctgttcttcaccgtgctgctgagcgaccacctgtggttctgcgccgaggccaagctgaccagagccagagacaaggagcaccagcagcagcagagacagcagcagcagcagcagcagcagcagagacagagacagcagcagcagcagcagagaagacagcaggagcccagctggcccgccctgctggccagcatgggcgagagcagccccgccgcccaggcccacagactgctgagcgccagcagcagccccaccctgccccccagccccggcgacggcggcggcggcggcggcaagggcaacagaggcaaggacgacagaggcaaggccctgttcctgggcaacagcgccaagcccgtgtggagactggagacctgctacccccagggcgccagcagcggccagtgcttcaccgtggagaacgccgacgccgtgtgcgccagaaactggagcagaggcgccgccggcggcgacggccaggaggtgagaagcaagcaccccacccccctgtggaacctgagcgacttctacctgagcttctgcaacagctacaccctgtgggagctgttcagcggcctgagcagccccaacaccctgaactgcagcctggacgtggtgctgaaggagggcggcgagatgaccacctgcagacagtgcgtggaggcctaccaggactacgaccaccacgcccaggagaagtacgaggagttcgagagcgtgctgcacaagtacctgcagagcgaggagtacagcgtgaagagctgccccgaggactgcaagatcgtgtacaaggcctggctgtgcagccagtacttcgaggtgacccagttcaactgcagaaagaccatcccctgcaagcagtactgcctggaggtgcagaccagatgccccttcatcctgcccgacaacgacgaggtgatctacggcggcctgagcagcttcatctgcaccggcctgtacgagaccttcctgaccaacgacgagcccgagtgctgcgacgtgagaagagaggagaagagcaacaaccccagcaagggcaccgtggagaagagcggcagctgccacagaaccagcctgaccgtgagcagcgccaccagactgtgcaacagcagactgaagctgtgcgtgctggtgctgatcctgctgcacaccgtgctgaccgccagcgccgcccagaacaccgccggcctgagcttcggcggcatcaacaccctggaggagaacagcaccaacgaggagtag

SEQ ID NO: 36177 - DNA, 2043 bp, Artificial Sequence
  derived and/or modified sequence
gagagaaagagagagaggagagagaagaaacgggaggaggggataaggaaattaaaccctttaagtcaatgcatattgtggtgacaccggcacaggcgccctcacggtggagtcggccagggctgtgcgttcccaaaatatgaccaggggtgcttggatgtgtcggcagtatgacgacggcttaaaaatctggttggcagcaccccgagagaacgagaaaccgttcatcgattccgagagggctcagaaatggcgactgtctctggcatctctcttgtttttcacagtcctgctctctgatcacttgtggttctgcgccgaggccaagctgacccgggcccgggacaaggagcaccagcagcagcagcggcagcagcagcagcagcagcagcagcagaggcagcggcagcagcagcagcagcagcggcggcagcaggagccctcctggcccgcgctcctggcgagcatgggggagtcctcgcccgccgcccaggcacacagactcctctccgcctcctcgtcccccaccctgcccccctccccgggagacggcggcggcggcggcggcaagggcaaccgaggcaaagacgaccggggcaaggctctttttctaggaaactctgccaagcccgtgtggcgcctggagacttgttacccccagggcgcgtcctcgggccagtgcttcacggtggagaatgcggacgcggtgtgcgccaggaactggagtcggggggcggccgggggggacgggcaggaggtgaggagcaagcatcccactccgctctggaacttgtcggatttttacctttcgttttgtaattcctacacactttgggagttgttctcggggttgtccagtcccaacactttgaactgcagtctggatgtggtgctcaaggaaggcggcgagatgaccacttgcaggcagtgcgtcgaggcttaccaggactatgaccaccatgctcaggagaaatacgaagagtttgaaagcgtgctccacaaatatttacagtcggaggagtactcggtgaaatcctgtcctgaagactgtaagattgtctacaaagcctggctctgttcccagtattttgaagtcacacagtttaactgcagaaagacaattccttgcaagcaatactgtttggaggttcagacgaggtgtccatttatattgcccgacaatgatgaagtcatctacggaggcctctccagtttcatctgtacagggctttatgaaacctttctaaccaatgatgaaccagaatgctgtgacgtcaggagagaagaaaaatcaaataacccatccaaagggaccgtagagaaaagtggctcctgtcacaggacatcgctcacagtgtcatcagcaacaagactgtgcaacagcagactcaagctgtgtgttcttgtactgattctcttacacacagtgctcacagcctcggcagcacagaacacagccggactgagctttggaggcatcaacacgctggaagaaaactcaaccaatgaggagtaacggaaggacgagtgtcaccacagcagcagctggcccgccgtgaaaaatggcaactgctgtctcatgtaacagaaactgggtgcttttaccctcgaattacttattgcaaggcctttagggtaaaatttaaacagatgggcctgaatccaaacaaggacacaaccacagctttttattgactaaaaggctggaaagtgactttaaatttctcacaccattttatacactgtgttttaatgtttggaggttttatttgctttcgttttggtttgggtttatttgtttgtttattttttgcacttgttaatacaggatttattttgggggatggtttctcagaggtaaactaagtcttttcactgtctctatctctctatatatttctagtcattgtgtgtgttcatcagatagttctgtctttatgtcctgtcagcttctattagaggaatgattgctatgacctcatggtatagcaaaaaacaacaacaaaaaaagaataaaaaataaaaaagacaaaaaaaagaaaa

SEQ ID NO: 36178 - DNA, 1377 bp, Artificial Sequence
  derived and/or modified sequence
atgacacgtggggcctggatgtgccgtcagtatgatgatggactgaagatctggctggctgctcctcgcgagaacgaaaagccttttattgactctgagcgagctcagaaatggcggctgtcactcgcttcactcctatttttcactgtgctgctgagcgaccatctctggttctgtgcggaagcaaagttgactcgggcccgtgacaaggaacaccagcagcagcagcgtcagcagcagcagcagcagcagcagcagcgtcaacgacagcaacaacaacaacagcggcggcagcaggagcctagctggccagctctactcgcaagtatgggcgagagtagccccgccgcccaggcacataggctgctgtccgctagctcatcacccacactcccaccaagcccgggcgatgggggcggcggcggcggtaaaggtaatcggggcaaggatgatcgcgggaaggcgctgttcttagggaactctgctaagccagtctggaggctcgagacttgctatcctcagggtgcttcatctggccagtgttttactgttgaaaacgccgatgcggtgtgcgcaagaaattggtccagaggcgccgcaggcggagatgggcaagaggtccgtagcaaacaccccacccccctgtggaatttaagcgacttctatctttccttctgcaacagctacactctgtgggagctgtttagcggtcttagctcaccaaatacgctgaactgctcattggatgttgtgcttaaggaaggaggagagatgaccacctgcaggcaatgtgtagaggcgtaccaagattacgaccatcatgcgcaggaaaaatatgaggaattcgagagcgtcctgcataaataccttcagtctgaggagtatagtgtgaagagctgtccagaagactgcaaaatagtatacaaagcatggctgtgcagccagtattttgaagtgacccagttcaactgtcggaagaccatcccatgtaagcagtactgtctagaggtccaaacccgctgtcctttcatacttccggacaacgacgaagtaatatacgggggactgtcttcctttatctgcactggcctgtatgagacttttctcactaacgatgagccagagtgttgtgacgtgaggcgggaagagaagagcaataacccatctaaaggcaccgtagaaaagagtggatcatgtcacagaactagcctcacagtgagctccgccactcgtctgtgtaactcccggcttaagctgtgcgtactggttcttattctcctacacacagtgctgacagcctccgcagctcagaacaccgcgggtctcagcttcggaggaatcaacacgctggaggaaaactctacaaacgaggagtag

SEQ ID NO: 36179 - DNA, 1377 bp, Artificial Sequence
  derived and/or modified sequence
atgaccaggggggcctggatgtgccggcagtatgatgatggcctgaagatctggctggccgccccccgggagaatgagaagcccttcatcgacagcgagcgggcccagaagtggaggctgagcctggccagcctgctcttcttcaccgtgctgctgagtgaccacctgtggttctgtgccgaggccaagctgacccgggcccgggacaaggagcaccagcagcagcagaggcagcagcagcagcagcagcagcagcagaggcagaggcagcagcagcagcagcagaggcggcagcaggagcccagctggccagccctgctggcctccatgggagagagcagccctgctgcccaggcccaccggctgctgagcgccagcagcagccccaccctgccccccagccctggagatggcggcggcggcggcggcaagggcaacagaggcaaggatgaccggggcaaggccctcttcctgggcaacagcgccaagcctgtgtggaggctggagacctgctacccccagggcgccagcagcggccagtgcttcaccgtggagaatgctgatgctgtgtgtgccaggaactggagcagaggagctgctggaggagatggccaggaggtgcgcagcaagcaccccacccccctgtggaacctgagtgacttctacctgtccttctgcaacagctacaccctgtgggagctgttcagcggcctgagcagccccaacaccctgaactgcagcctggatgtggtgctgaaggagggcggggagatgaccacctgccggcagtgtgtggaggcctaccaggactatgaccaccacgcccaggagaagtatgaggagtttgagagcgtgctgcacaagtacctgcagagcgaggagtacagcgtgaagagctgcccagaggactgcaagatcgtgtacaaggcctggctgtgcagccagtactttgaggtgacccagttcaactgcaggaagaccatcccctgcaagcagtactgcctggaggtgcagacccgctgccccttcatcctgcctgacaatgatgaagtcatctatggaggcctgagcagcttcatctgcaccggcctgtatgagaccttcctgaccaatgatgagcctgagtgctgtgatgtgcggcgggaggagaagagcaacaaccccagcaagggcaccgtggagaagagcggcagctgccacaggaccagcctgactgtgagcagcgccacccggctgtgcaacagccggctgaagctgtgtgtgctggtgctgatcctgctgcacacagtgctgacagccagcgctgcccagaacacagctggcctgagctttggaggcatcaacaccctggaggagaacagcaccaatgaggagtag

SEQ ID NO: 36180 - DNA, 1377 bp, Artificial Sequence
  derived and/or modified sequence
atgacccggggcgcctggatgtgccggcagtacgacgacggcctgaagatttggctggcggctcccagagaaaatgaaaaaccatttattgattccgaaagggcccagaagtggaggcttagccttgcctccctgctcttctttactgttttactctcagatcatctgtggttctgcgccgaggccaagcttacccgtgccagagataaggagcatcagcaacagcaacggcagcagcagcagcagcaacagcagcagagacaaagacagcagcagcagcagcaacgacggcaacaggaaccctcttggccagccctcttggcctcgatgggggaaagttctcctgctgcccaggcccaccgtctcctgtcagctagcagttcacccactttacctcccagtcccggggacggcggcggaggcgggggcaagggcaacaggggtaaggatgatcgaggcaaagccctgtttctgggtaattccgcaaagccggtttggcggctggagacctgctatccccagggcgcctcatcagggcagtgcttcactgtggagaatgcggacgctgtctgtgccagaaactggtcgcggggggccgcgggaggcgatggtcaggaggtcagatcgaaacatcctaccccgctgtggaacctgagcgatttttacctgagcttctgcaatagttatacactgtgggagctgttttctggactgtcttctcctaacacactgaattgcagcctcgacgtggtgttaaaggaggggggagaaatgactacttgcagacagtgtgtggaagcatatcaggactatgatcaccacgctcaggagaaatatgaggagtttgagtcagtgctccataagtatctacagtctgaggaatactcagtgaaatcttgtcctgaagactgcaagattgtctacaaagcatggctctgcagtcaatacttcgaggtgacacagtttaactgccgtaagacaataccctgcaaacagtactgtctggaggtccagacacgatgtccctttatccttccagacaacgatgaagtgatctacgggggattgtcctcctttatctgtacgggactgtatgaaacattccttaccaacgacgagccagaatgttgtgatgtgaggcgggaggaaaagtccaataatcctagcaaaggcacggtagagaaatctggttcctgtcataggacctccctgaccgtctctagcgccacccgcttgtgtaatagccggctaaagctctgtgttctggtgctgatacttttacacaccgtcctgaccgccagcgccgcgcagaacactgcgggtctgtcctttgggggcatcaacacattggaagaaaatagtaccaatgaggaatag

SEQ ID NO: 36181 - DNA, 1377 bp, Artificial Sequence
  derived and/or modified sequence
atgactcgaggcgcatggatgtgccgtcagtatgacgatggcctgaaaatctggctggcagcaccaagagagaacgagaaaccttttatcgattcggagagggctcagaaatggagattaagtcttgccagtctgctttttttcactgtgctgctctccgaccatctgtggttttgcgctgaggccaagctgacccgagccagagataaggagcatcagcaacagcagagacagcagcagcaacagcaacagcagcagcgtcagaggcaacagcagcagcagcaacgcaggcagcaggagcccagttggcctgctctgcttgcgtccatgggggagagctcaccggctgcgcaagcacaccggctgctctccgcatcctcttcacccactctcccaccaagccccggagacggaggaggagggggtgggaagggcaacaggggcaaagatgatagaggaaaggcattgtttctaggcaattctgctaaaccagtctggaggcttgagacatgctaccctcagggggcatcttctggtcagtgttttacagtagagaacgcagatgccgtgtgcgcgaggaactggtctcgcggagccgcagggggagatggccaagaggtgcggtctaaacatcccactcctctgtggaacttaagcgatttctacctgagtttttgcaatagttataccctttgggagctcttctcgggcctgtcctccccaaatacactcaactgcagtctggatgttgtccttaaggaaggcggagaaatgacaacctgtcggcagtgtgtcgaggcttaccaagactatgatcatcatgcccaggaaaaatacgaggaattcgaaagcgtcttgcataagtatcttcaaagcgaagagtatagtgtcaagtcatgccctgaggactgtaaaattgtgtataaggcgtggctttgctcacagtactttgaggtcacccaattcaattgcaggaagacgatcccctgcaaacagtattgcttagaagttcaaacccgctgccctttcattctgcctgataatgatgaggtgatctacggaggtctgtcgtcattcatttgcaccggactttacgagaccttcttaacaaacgatgaacccgagtgttgcgatgtgcgtcgggaagaaaaaagtaacaaccccagtaaaggcaccgtggaaaaaagcggttcctgtcaccgaactagtctcacagtctcttctgctacaaggctttgcaattctcggctcaagctgtgcgtgttggtattgatcctgcttcacacggtattaacagcttctgccgcacagaacaccgctgggctgagcttcggagggattaatacactggaagagaactccaccaatgaagagtag

SEQ ID NO: 36182 - protein, 689 aa, Artificial Sequence
  derived and/or modified sequence
MKFGAVTRIGGPPLGNQSPSSCSLLHEKDPPTTSGPQTDQPKKHLTNFKSATRRVARTQWLTADRQTWASISSVPWAQTISEKKPGGSLWETRSSPPTTAGTEEAMNTTSLLAPAAEIMATPGSPSQASPTLGAFTHGTQTPSPTKATAPRYPQTGDLSAEWPFTAGEEPVLVPRPHQVSRVRSSCCLSPILCSPAMIAFLLTSVLMIPHAGGHPLDTPHLPQELPPGLPNNINITFFSGMFKNVESVAEIFDCLGPHFTWLQAVFTNFPVLIQFVNGMKCVAGLCPRDFEDYGCTCRFEMEGLPVDESDSCCFQHRRCYEEAAEMDCLQDPAKLSTEVNCVSKKIICESKDNCEHLLCTCDKAAIECLARSSLNSSLNLLDTSFCLAQTPETTIKEDLTTLLPRVVPVEPTDTSLTALSGEVAAETEADRLITLSKKKAGHDQEGVGAARATSPPGSAEIVATRVTAKIVTLVPAGIKSLGLAVSSVENDPEETTEKACDRFTFLHLGSGDNMQVMPQLGEMLFCLTSRCPEEFESYGCYCGQEGRGEPRDDLDRCCLSHHCCLEQVRRLGCLLERLPWSPVVCVDHTPKCGGQSLCEKLLCACDQTAAECMTSASFNQSLKSPSRLGCPGQPAACEDSLHPVPAAPTLGSSSEEDSEEDPPQEDLGRAKRFLRKSLGPLGIGPLHGR

SEQ ID NO: 36183 - protein, 477 aa, Artificial Sequence
  derived and/or modified sequence
MIAFLLTSVLMIPHAGGHPLDTPHLPQELPPGLPNNINITFFSGMFKNVESVAEIFDCLGPHFTWLQAVFTNFPVLIQFVNGMKCVAGLCPRDFEDYGCTCRFEMEGLPVDESDSCCFQHRRCYEEAAEMDCLQDPAKLSTEVNCVSKKIICESKDNCEHLLCTCDKAAIECLARSSLNSSLNLLDTSFCLAQTPETTIKEDLTTLLPRVVPVEPTDTSLTALSGEEAGHDQEGVGAARATSPPGSAEIVATRVTAKIVTLVPAGIKSLGLAVSSVENDPEETTEKACDRFTFLHLGSGDNMQVMPQLGEMLFCLTSRCPEEFESYGCYCGQEGRGEPRDDLDRCCLSHHCCLEQVRRLGCLLERLPWSPVVCVDHTPKCGGQSLCEKLLCACDQTAAECMTSASFNQSLKSPSRLGCPGQPAACEDSLHPVPAAPTLGSSSEEDSEEDPPQEDLGRAKRFLRKSLGPLGIGPLHGR

SEQ ID NO: 36184 - protein, 493 aa, Artificial Sequence
  derived and/or modified sequence
MIAFLLTSVLMIPHAGGHPLDTPHLPQELPPGLPNNINITFFSGMFKNVESVAEIFDCLGPHFTWLQAVFTNFPVLIQFVNGMKCVAGLCPRDFEDYGCTCRFEMEGLPVDESDSCCFQHRRCYEEAAEMDCLQDPAKLSTEVNCVSKKIICESKDNCEHLLCTCDKAAIECLARSSLNSSLNLLDTSFCLAQTPETTIKEDLTTLLPRVVPVEPTDTSLTALSGEVAAETEADRLITLSKKKAGHDQEGVGAARATSPPGSAEIVATRVTAKIVTLVPAGIKSLGLAVSSVENDPEETTEKACDRFTFLHLGSGDNMQVMPQLGEMLFCLTSRCPEEFESYGCYCGQEGRGEPRDDLDRCCLSHHCCLEQVRRLGCLLERLPWSPVVCVDHTPKCGGQSLCEKLLCACDQTAAECMTSASFNQSLKSPSRLGCPGQPAACEDSLHPVPAAPTLGSSSEEDSEEDPPQEDLGRAKRFLRKSLGPLGIGPLHGR

SEQ ID NO: 36185 - DNA, 2070 bp, Artificial Sequence
  derived and/or modified sequence
atgaagtttggggcagtaacacggatcggaggacctcccttggggaatcagagcccaagtagttgttctctcctgcacgaaaaggatcccccaaccaccagcggtccccagacagaccagccaaagaaacatctcacaaatttcaagtcagcaacgcgcagggttgctagaacgcagtggctgaccgcagaccgccagacgtgggcaagtatcagcagcgtcccatgggctcaaactatttccgaaaaaaagccagggggttccctgtgggaaacaaggtctagccccccaacgaccgcgggtacagaggaggccatgaatacaaccagtttgctggcccctgcagccgaaatcatggcgacaccgggaagcccatcccaggccagtccgactcttggtgcatttactcatggtacccagactccctcccccactaaggccacagctccgcgatacccccaaacgggcgatctctcggctgagtggccctttaccgccggtgaggaaccagtgctggtgccaagaccccatcaggttagcagagtccgcagctcatgctgcctcagtccaattttgtgcagtcctgctatgattgcatttctgctgacctccgtcctcatgattccacacgccggaggtcatcctttggatacaccacacctaccacaggagttacctcccggattacccaacaatattaacattacgtttttcagcggtatgttcaagaatgttgaatcagtagctgagatctttgattgcctgggtccccacttcacttggcttcaggccgttttcacaaactttccagtgctcatccagttcgtcaacgggatgaaatgtgttgctggcctgtgcccacgcgactttgaggactatggctgcacctgccggtttgaaatggagggcctgcccgtggacgaaagcgattcctgttgctttcagcacagaagatgctatgaggaggctgctgagatggattgcctgcaggatcctgccaagcttagcacagaggttaattgtgtatctaagaaaataatttgcgagtccaaggataattgtgaacatctgctgtgtacttgtgataaggccgctatcgaatgcctggccagaagttccctcaactcgagtttgaacttgctcgatacgtccttctgtctggcgcaaacacctgagacgaccattaaagaggacctgacgactctgctgcctcgagtggtacctgtcgaacctacagacacttctcttacagccctgtccggagaagtagcggctgaaactgaagcggaccggctgatcacacttagcaagaaaaaggccggtcatgaccaggaaggagtgggggcagccagagcgacatcaccccctgggagcgccgagatcgttgccacccgcgttaccgctaagatcgtgacattggtaccggcaggcatcaaatccctggggctcgccgtaagcagtgtggagaacgaccctgaggaaacaactgagaaggcatgcgaccgctttaccttcctacacctcggaagcggggataacatgcaggtgatgccacagctgggtgaaatgctcttttgtctaaccagtaggtgccccgaggaattcgaatcctacggctgctattgcgggcaggagggcagaggggagccccgagacgatttggatcggtgttgtctgagccatcattgctgtctggaacaggtgcgcagattgggttgccttctggaacgacttccttggtcccctgtggtatgtgtcgatcacacaccaaagtgtggtgggcagtctctatgtgagaaactgctctgtgcctgcgaccaaacagctgcagagtgtatgacgagcgcatcttttaaccagtccctgaagtccccgagtcgattgggatgccccggacaacccgctgcgtgcgaggacagcctccaccccgttcccgctgcacctacacttggcagttccagtgaggaagattcagaagaggacccgccacaggaagacctgggtagagcaaagcgcttcctccggaagagtctcggacccttgggcatcggcccactgcatggacgttag

SEQ ID NO: 36186 - DNA, 2070 bp, Artificial Sequence
  derived and/or modified sequence
atgaaattcggcgctgtgacccgtattggcggcccaccgctcggcaaccaaagcccgtcctcgtgctcactattgcacgaaaaggatccacccacaacctctggaccccagacagatcaacctaaaaagcacctgacaaactttaagagtgcgactcggcgggtcgcgcgcactcagtggctaacagcagaccgacagacatgggccagtattagcagcgtaccttgggcccaaacaatcagcgaaaagaagccgggcggatcactgtgggagaccagatcctcaccacctaccacggccggtactgaggaagctatgaatacaaccagccttctggcacctgcagctgagataatggccaccccaggcagccctagccaagcctcaccgaccctgggggccttcacccatggcacacagactcctagtcctacaaaggctacagctccccggtaccctcagaccggcgacctctcagcagagtggcctttcactgccggcgaggagcccgtcctggtccccagaccacatcaagtaagccgcgttaggagcagctgttgcctcagccccatcctgtgcagccccgccatgattgcattcctcctgacgagtgttctgatgataccacatgccgggggccacccgctcgatactccacacttgcctcaagaactgcctccagggctgcctaataatattaacatcaccttcttctctggaatgttcaagaacgttgagagcgtcgcagaaatctttgactgcctgggccctcacttcacgtggttgcaggccgtgtttaccaattttcccgtgctgattcaatttgtgaacgggatgaagtgtgttgctgggctttgtcccagagatttcgaggattacgggtgtacttgtaggttcgaaatggagggccttcctgtggacgaatccgactcctgctgcttccagcaccgtcgctgctatgaggaggcagccgaaatggattgtctgcaagacccggccaaattaagcactgaagttaactgcgtgtctaagaagattatatgtgaaagtaaagacaactgcgagcatttgttgtgtacgtgcgataaagccgcgattgagtgtttagcccgtagctccctgaacagctctttgaatttgctggacaccagcttctgtttagcgcagacacctgaaaccaccatcaaagaggacctcacaacactgttgccccgtgttgtaccagttgaacctaccgacacaagtctaaccgctctctccggcgaggttgctgctgaaacggaagccgaccgcttgatcaccctgagcaaaaaaaaggccggccatgatcaggaaggcgttggagcagcccgcgccacgagtcccccgggttccgccgagatcgtagctacccgagtcacagccaagatagtgaccttagtcccagccggcattaagagcctcggactggctgtcagctccgtggagaacgatccagaagaaactaccgagaaagcctgcgatcggtttacttttctccatctgggatcaggagataacatgcaggtaatgccccagttgggcgagatgcttttttgcctgacttcgcggtgccctgaggagtttgagtcctatggctgttactgtggacaggaagggaggggagagccgagagacgatcttgaccgttgttgtctgtcgcatcattgttgtctggaacaagttcgacgtcttggatgcttgcttgagcgcctgccatggtctcccgtagtgtgtgtagatcataccccgaaatgcggtggtcaatcgttgtgcgaaaaactgttgtgtgcctgtgaccagactgcagccgagtgtatgacttccgccagctttaatcagagtttgaaatcgcctagtcgactggggtgtccaggccagcccgcggcgtgtgaagactctctccatccagtaccagccgctcccactcttggcagctcaagcgaagaagacagcgaagaagaccctccccaagaggacctgggacgagcaaaacgctttctgaggaaatcccttggaccacttggcattggcccactgcacggtaggtag

SEQ ID NO: 36187 - DNA, 2070 bp, Artificial Sequence
  derived and/or modified sequence
atgaaattcggggcagtcacacggattggggggcccccactgggaaatcaatcacccagtagttgcagccttctccatgaaaaggaccctccgacgactagcggacctcagacagaccaaccaaagaagcatctcaccaacttcaagagcgccactcgtagagtcgcaagaacccaatggctgacagcagatcgacaaacatgggcaagtatctcttcagttccttgggctcagacaattagcgaaaagaaaccaggaggtagcttatgggaaaccagaagctcccctcccaccactgcgggcacggaagaagctatgaacaccacctcattgttggccccagctgcagagataatggccactcctgggagtccctcgcaagcaagccctacccttggcgcatttacacacgggacacagactcccagtcccaccaaagccacagcccctaggtatccccaaaccggagatttgtccgctgaatggcctttcacggccggggaagaaccggttcttgtgccacgccctcatcaagtcagtcgcgtccgctccagttgttgtttatcaccaattctgtgtagtcccgctatgatcgccttcctcctgacctccgtgctcatgatcccccacgccggcggccatcccctggacactccccacctgccccaggagttaccaccgggcctccctaataatatcaatataaccttcttcagcggtatgttcaagaacgtcgaatccgtcgctgaaatattcgattgcttaggccctcattttacttggttgcaagcagtatttacaaactttccagttctgattcagttcgttaatggcatgaagtgtgttgccggtctgtgtcccagagattttgaagactacggatgcacttgtcgcttcgagatggaaggtttgccagtggatgagagtgactcttgctgttttcaacaccgtagatgctacgaagaggccgctgaaatggattgtttacaggatcctgcaaagttaagtaccgaagttaattgcgtctccaagaagattatatgtgaatccaaagataactgtgagcacctcctttgtacgtgtgacaaagccgcaatagagtgtctggccaggagctcactcaattcgtcattaaatttgttggacaccagcttctgccttgcccaaacacctgagactacaataaaagaggatctaacaacactgttgccccgtgttgtaccagttgaacctaccgacacaagtctaaccgctctctccggcgaggttgctgctgaaacggaagccgaccgcttgatcaccctgagcaaaaaaaaggccggccatgatcaggaaggcgttggagcagcccgcgccacgagtcccccgggttccgccgagatcgtagctacccgagtcacagccaagatagtgaccttagtcccagccggcattaagagcctcggactggctgtcagctccgtggagaacgatccagaagaaactaccgagaaagcctgcgacagatttactttcctacacctgggttccggagacaatatgcaagttatgcctcagctgggggaaatgctattctgtttgaccagtcgatgccctgaagagtttgagagctatggttgctattgtggacaagagggaagaggagagccccgcgacgatctcgacagatgctgcttatctcaccactgttgccttgagcaggttcgccgcctgggatgtctgctggaaaggctgccatggagcccggtggtctgcgtggatcatacacccaagtgcgggggccagtccctctgcgagaagctactatgcgcatgcgaccagacagccgctgaatgtatgacctctgccagcttcaatcagtctcttaaatcccccagtagactcgggtgtccaggccaacccgccgcgtgcgaggactcgctgcatcctgtgcccgccgcacctacactcggtagcagttcagaagaggactcggaggaagatccacctcaagaagacctgggtcgcgccaagagatttctccgcaagagcctgggaccattgggcatcggcccgttgcacggaagatag

SEQ ID NO: 36188 - DNA, 2413 bp, Artificial Sequence
  derived and/or modified sequence
ctgactctcttttcggactcagcccgcctgcacccaggtgaaataaacagctttattgctcacacaaagcctgtttggtggtctcttcacacggacgcgcatgaaatttggtgccgtcactcggatcgggggacctcccttgggaaatcaatccccgtcctcctgttctttgctccatgagaaagatccacctacgacctcaggtcctcagacagaccagcccaagaaacatctcaccaatttcaaatccgctaccaggagggtggccagaactcagtggttgacagctgacagacagacgtgggcttccatatcgtccgtgccctgggctcagaccatcagtgagaaaaaacctggagggtctctctgggaaactcgttcttccccaccgactactgcagggaccgaggaagccatgaacactacaagccttttggcgcctgctgctgagataatggccacacctggcagcccatcccaggccagccctaccttgggagcattcacccatggcacacagactccgagtccaaccaaggcaacagcccccagatatccacaaacaggtgatctctctgcagagtggccattcactgctggtgaagagccagtcctggtcccaagaccccatcaagtttcaagagtccgttccagttgctgcctaagccccatcctttgttctcctgctatgattgcgtttctcctcaccagtgtgctgatgatcccccatgccggaggccatcctctggacactccacatcttccacaggagctgcctccaggactcccaaacaatatcaatatcactttcttcagtgggatgtttaaaaatgtggaaagtgtggctgaaatttttgattgcctgggcccccacttcacctggctgcaggctgtcttcaccaatttccctgtgctgatccagtttgtcaatggtatgaagtgtgtggctggtctctgcccccgagactttgaagactatggttgcacctgcaggtttgagatggaagggttgcctgtggatgaatctgacagctgctgcttccagcaccgcaggtgctatgaggaggccgctgagatggactgtctccaagaccccgccaaacttagcacagaggtcaattgtgtcagcaagaagatcatatgtgagtccaaggacaactgtgagcacctgctgtgtacctgtgataaggctgccatagagtgcttggctcgatccagcctcaactcttccctgaaccttctggacacctccttctgcctggctcagactccagagacaaccatcaaggaagacttgacaacacttctgcccagagtggttcctgtggagcccacagacaccagcctgacagccctttcaggagaagtggctgcagagactgaggctgacagactgatcactctctccaagaaaaaagcaggccacgatcaggaaggagtgggagctgctagggctacgtcccctccaggatctgcagagatagttgcaacaagggttacagctaaaattgtaacccttgtccctgctggcattaaatctctggggctggcagtgtcatctgttgaaaatgatcctgaggagaccactgaaaaagcctgtgacagattcaccttcctgcacctgggaagtggggacaacatgcaggtgatgccacagcttggagagatgctcttttgtctgacatcccggtgcccggaggaatttgagtcttatggctgttactgtggacaagaaggaagaggcgagccaagggatgacctagacaggtgctgcttgtcccatcactgctgcctagagcaagtgagaaggctgggctgcctgcttgagaggcttccttggtcaccggtggtgtgtgtggatcatacgcccaagtgtgggggccaaagcctgtgtgagaagttgctctgtgcctgtgaccagacggcagctgagtgcatgacctctgcctcctttaaccaaagcctcaagtccccaagcagactcgggtgccctgggcagccagcagcctgtgaagacagcctgcaccctgtgcccgcagcccccaccctgggctccagctctgaggaggacagcgaggaggaccctccacaggaggacctcggcagagccaagaggtttctgcggaagtcactgggtcccttggggatcgggcctcttcatggaagatagatgcccagagaaaatggctaacaccttcagtagcgtggctcctgctccaccttcagctctttatctctcagcctcctctgtcccttggagccttcttcccttcctttaactcagaggcggggagggaacagaggccgtgagccctgcccatgcctcatcagctgtggtcacctcacaagccaatgtacacttggagaaggcacaccatggtacctccatgctcctttagtgcactgtggaagc

SEQ ID NO: 36189 - DNA, 2070 bp, Artificial Sequence
  derived and/or modified sequence
atgaagttcggcgccgtgaccagaatcggcggcccccccctgggcaaccagagccccagcagctgcagcctgctgcacgagaaggacccccccaccaccagcggcccccagaccgaccagcccaagaagcacctgaccaacttcaagagcgccaccagaagagtggccagaacccagtggctgaccgccgacagacagacctgggccagcatcagcagcgtgccctgggcccagaccatcagcgagaagaagcccggcggcagcctgtgggagaccagaagcagcccccccaccaccgccggcaccgaggaggccatgaacaccaccagcctgctggcccccgccgccgagatcatggccacccccggcagccccagccaggccagccccaccctgggcgccttcacccacggcacccagacccccagccccaccaaggccaccgcccccagatacccccagaccggcgacctgagcgccgagtggcccttcaccgccggcgaggagcccgtgctggtgcccagaccccaccaggtgagcagagtgagaagcagctgctgcctgagccccatcctgtgcagccccgccatgatcgccttcctgctgaccagcgtgctgatgatcccccacgccggcggccaccccctggacaccccccacctgccccaggagctgccccccggcctgcccaacaacatcaacatcaccttcttcagcggcatgttcaagaacgtggagagcgtggccgagatcttcgactgcctgggcccccacttcacctggctgcaggccgtgttcaccaacttccccgtgctgatccagttcgtgaacggcatgaagtgcgtggccggcctgtgccccagagacttcgaggactacggctgcacctgcagattcgagatggagggcctgcccgtggacgagagcgacagctgctgcttccagcacagaagatgctacgaggaggccgccgagatggactgcctgcaggaccccgccaagctgagcaccgaggtgaactgcgtgagcaagaagatcatctgcgagagcaaggacaactgcgagcacctgctgtgcacctgcgacaaggccgccatcgagtgcctggccagaagcagcctgaacagcagcctgaacctgctggacaccagcttctgcctggcccagacccccgagaccaccatcaaggaggacctgaccaccctgctgcccagagtggtgcccgtggagcccaccgacaccagcctgaccgccctgagcggcgaggtggccgccgagaccgaggccgacagactgatcaccctgagcaagaagaaggccggccacgaccaggagggcgtgggcgccgccagagccaccagcccccccggcagcgccgagatcgtggccaccagagtgaccgccaagatcgtgaccctggtgcccgccggcatcaagagcctgggcctggccgtgagcagcgtggagaacgaccccgaggagaccaccgagaaggcctgcgacagattcaccttcctgcacctgggcagcggcgacaacatgcaggtgatgccccagctgggcgagatgctgttctgcctgaccagcagatgccccgaggagttcgagagctacggctgctactgcggccaggagggcagaggcgagcccagagacgacctggacagatgctgcctgagccaccactgctgcctggagcaggtgagaagactgggctgcctgctggagagactgccctggagccccgtggtgtgcgtggaccacacccccaagtgcggcggccagagcctgtgcgagaagctgctgtgcgcctgcgaccagaccgccgccgagtgcatgaccagcgccagcttcaaccagagcctgaagagccccagcagactgggctgccccggccagcccgccgcctgcgaggacagcctgcaccccgtgcccgccgcccccaccctgggcagcagcagcgaggaggacagcgaggaggaccccccccaggaggacctgggcagagccaagagattcctgagaaagagcctgggccccctgggcatcggccccctgcacggcagatag

SEQ ID NO: 36190 - DNA, 2070 bp, Artificial Sequence
  derived and/or modified sequence
atgaagttcggggcggtgaccagaatcggaggccctccattagggaatcagagcccatcatcttgcagcctgcttcatgagaaagaccccccgaccacaagcggaccacagaccgaccaacctaaaaagcatcttaccaattttaagtctgccactcgtagagttgctcgaacacaatggctgacagccgatcgccagacatgggcgtctatctcgtctgtcccttgggctcagacgatcagcgaaaagaaacctggcggaagcctgtgggagacccgatcatctccacctacaacagccgggactgaagaggctatgaatacaactagcctacttgctcccgctgcggaaataatggccacaccggggtccccaagccaggcctctcctacactcggtgcctttacccacgggacccaaaccccaagccccactaaggccacagctccaaggtaccctcaaacaggcgatctctctgccgagtggcctttcaccgctggcgaagagccagtgctcgtgccacgccctcaccaggtctcacgggtcaggagctcttgttgcctaagccccattctgtgctccccagccatgatagctttcctactaacctctgtattgatgataccacatgctggcgggcatccactggatactccccacctcccccaggagctgccacctggactgcccaacaatatcaacattacctttttttcagggatgttcaagaatgtcgaatctgtggcagaaatcttcgactgtctcggcccacatttcacctggctgcaggccgtgtttacaaatttcccagtgctgatacagttcgttaacggaatgaaatgtgtggccgggctttgtccacgggatttcgaggactatggctgtacatgccgatttgagatggagggactcccagtggacgagagcgactcatgttgtttccagcacaggcggtgctacgaagaggctgccgagatggactgcctccaagatcccgccaagctgagcacagaagtaaattgtgtatctaaaaaaatcatatgcgagtcaaaagacaattgtgaacacctcctctgcacttgtgataaagcagctatcgagtgtctggcacggagtagcttaaatagcagcctgaatttgttggacacgtccttttgtctggctcagacccccgaaactacaatcaaggaagacctgacaactctgttaccccgcgtcgtacccgtggagcccactgacacatccttgaccgctctgtcaggggaagtggccgctgagacggaggccgataggcttattactctgtcaaagaagaaagcaggccatgaccaagagggcgtgggggcagccagagccacatccccccctggctcagccgaaatcgtggcaaccagggtgactgccaagatagtcacattggtgccggccggaatcaagtccctgggactggccgtgagctccgtggaaaacgaccccgaggaaacgactgagaaggcctgcgacaggttcacttttctacatctgggctctggggacaatatgcaggtaatgccacagctgggcgaaatgctgttctgcctcacatctaggtgtcctgaggaattcgagtcttatgggtgttattgtggacaggagggcaggggtgagcctcgcgacgatttagaccgatgctgtctgtcacatcactgttgtctagaacaggtgcgccggctcgggtgtctgctggagcggctgccttggagccccgtggtatgtgttgaccacacccccaagtgtggcggccaatcattatgcgagaagctcctctgcgcatgcgatcagacagccgctgagtgtatgacttccgcatcttttaatcagtcactcaagagtccatctcgccttggctgtcctggccagcctgccgcctgtgaggatagcctccacccagtaccagcggctcctaccctcggctctagcagtgaggaagattccgaagaggaccctcctcaggaggaccttggcagggccaagcggttcctgaggaaaagcctgggaccactcggaatcggccctcttcacggtaggtag

SEQ ID NO: 36191 - DNA, 2070 bp, Artificial Sequence
  derived and/or modified sequence
atgaagtttggagctgtgaccagaattggaggcccccccctgggcaaccagagccccagcagctgcagcctgctgcacgagaaggacccccccaccaccagcggcccccagacagaccagcccaagaagcacctgaccaacttcaagagcgccaccaggagagtggcccggacccagtggctgacagctgaccggcagacctgggccagcatcagctctgtgccctgggcccagaccatcagcgagaagaagccaggcggcagcctgtgggagaccaggagcagcccccccaccacagctggaacagaggaggccatgaacaccaccagcctgctggccccagctgctgagatcatggccaccccaggcagccccagccaggccagccccaccctgggcgccttcacccacggcacccagacccccagccccaccaaggccacagccccccgctacccccagacaggagacctgtctgctgagtggcccttcaccgctggggaggagcctgtgctggtgccccggccccaccaggtgtcccgggtgcgcagcagctgctgcctgagccccatcctgtgcagccctgccatgattgccttcctgctgacctctgtgctgatgatcccccatgctgggggccaccccctggacaccccccacctgccccaggagctgcccccaggcctgcccaacaacatcaacatcaccttcttcagcggcatgttcaagaatgtggagagcgtggccgagatctttgactgcctgggcccccacttcacctggctgcaggccgtgttcaccaacttccctgtgctgatccagtttgtgaatggcatgaagtgtgtggccggcctgtgcccccgggactttgaagattatggctgcacctgccgctttgagatggagggcctgcctgtggatgaaagtgacagctgctgcttccagcaccggcgctgctatgaggaggccgctgagatggactgcctgcaggaccctgccaagctgagcacagaggtgaactgtgtgtccaagaagatcatctgtgagagcaaggacaactgtgagcacctgctgtgcacctgtgacaaggccgccattgaatgtctggcccggagcagcctgaacagcagcctgaacctgctggacaccagcttctgcctggcccagaccccagagaccaccatcaaggaggacctgaccaccctgctgccccgggtggtgcctgtggagcccacagacaccagcctgacagccctgagcggggaggtggccgctgagacagaagctgacaggctcatcaccctgagcaagaagaaggccggccatgaccaggagggcgtgggcgccgcccgggccaccagccccccaggcagcgctgagatcgtggccaccagggtgacagccaagatcgtgaccctggtgcctgctggcatcaagagcctgggcctggccgtgtcctctgtggagaatgaccctgaggagaccacagagaaggcctgtgaccgcttcaccttcctgcacctgggcagcggggacaacatgcaggtgatgccccagctgggggagatgctgttctgcctgaccagccgctgcccagaggagtttgagagctatggctgctactgcggccaggagggccgcggggagcccagagatgacctggaccgctgctgcctgagccaccactgctgcctggagcaggtgcggcggctgggctgcctgctggagcggctgccctggagccctgtggtgtgtgtggaccacacccccaagtgtggcggccagagcctgtgtgagaagctgctgtgtgcctgtgaccagacagctgctgagtgcatgaccagcgccagcttcaaccagagcctgaagagccccagccggctgggctgccccggccagcctgctgcctgtgaggacagcctgcaccctgtgcctgctgcccccaccctgggcagcagcagcgaggaggacagcgaggaggaccccccccaggaggacctgggccgggccaagcgcttcctgaggaagagcctgggccccctgggcatcggccccctgcatggaagatag

SEQ ID NO: 36192 - DNA, 2070 bp, Artificial Sequence
  derived and/or modified sequence
atgaagttcggcgccgtgacccggatcggcggcccccccctgggcaaccaatcgccgagttcttgcagcctcctgcatgaaaaagaccctccgactacaagcggccctcagacagaccagcccaaaaagcacctcaccaattttaagtccgcgaccagaagagttgcccgcactcagtggcttactgcggacagacagacatgggcatcaattagcagtgtgccgtgggctcaaacaatctccgaaaaaaaacccggcggcagcctgtgggagacacggtcaagtcctcctacaacagctggcacagaagaggcaatgaacacaaccagcctgttggcaccggccgcagaaatcatggcaacaccaggatctccaagccaagcctctccaactctcggagccttcacacacgggactcagacgccgtcacctaccaaggcaaccgcaccacggtacccacagacgggagatctgtccgccgaatggccctttactgccggagaggaaccagttcttgtcccccgcccccatcaggtgtctagagttagatcaagctgttgcctgtctcccattctttgttcgccagcaatgattgcgttcctcctcacatccgtgctgatgatcccccacgccggaggccatcctttagatacaccgcatctacctcaggagttgcctcccggcctgcccaataatatcaacattacgtttttctcgggaatgttcaagaacgtggagtccgttgcggaaatttttgattgcctcgggccacactttacttggttacaggcagtttttactaacttccctgtcttaatccagtttgtgaacgggatgaaatgcgtcgcagggctgtgccctcgtgattttgaggactacggatgcacttgtcgctttgagatggaggggctgcccgttgacgaaagcgactcatgctgcttccagcacaggaggtgctatgaggaggccgccgaaatggattgcctccaagatcctgccaaactcagtaccgaggtgaattgcgtgtcgaagaaaatcatctgtgagtccaaagataattgtgagcaccttctctgcacttgcgacaaagcagctatcgaatgcttagcccgcagttctttgaatagctcactcaacctcttagacaccagcttctgcttggcacagacacccgagacaacaattaaagaagacttgacgacacttctgccgcgtgtggtgcctgtggaacccacggatacttctttgactgctttatcaggggaggtggcggctgagacagaggctgataggcttatcacgctcagtaagaagaaggctggccacgatcaggaaggagttggggcagccagagctacatcaccccccgggagcgccgaaatcgtggcaactcgcgtcacagcaaaaatagtcacactggtccctgcaggcattaagtctttgggtctggccgtgtcgtccgttgagaacgatcccgaggagaccactgaaaaagcatgcgataggtttacttttcttcatctgggctcaggcgataatatgcaggtgatgccccagctcggcgaaatgctcttttgcttaacctcacgctgtcccgaggagtttgagtcttacggatgttactgcggtcaggaaggaagaggggaaccgagggacgatctggaccggtgctgcctctcgcatcattgttgcctcgagcaggttagaaggctggggtgtcttctggaacggcttccgtggagtccggtggtgtgtgtggatcacacacccaagtgcggaggccagagtctgtgcgagaagttgctttgtgcttgtgatcagacagctgcagagtgcatgacctcagcttcattcaaccagagcctgaagagcccatctcgcctgggatgccccggccaacctgcggcgtgtgaggattcactgcaccctgttcctgctgccccgacactgggtagctctagtgaagaagactcagaagaagaccctccccaagaagatctgggccgggccaagcggttcttgcggaaaagcctgggccctttggggattggtcccctgcacggtcgttag

SEQ ID NO: 36193 - DNA, 1434 bp, Artificial Sequence
  derived and/or modified sequence
atgatcgcattcctcctgacatccgtgcttatgatcccccacgccggcggccaccctttagacaccccacacctccctcaggagctgcccccgggcctgccaaataacattaatataacatttttttcagggatgtttaaaaacgttgaatccgtcgcggaaatttttgattgtcttgggcctcatttcacatggctccaggctgtatttaccaatttccccgtgctcatccaatttgtgaacggtatgaaatgtgtcgcgggcctgtgtccccgggattttgaagactatgggtgcacttgccgcttcgaaatggaaggactgcctgttgatgaaagcgacagttgctgcttccagcaccggcggtgttatgaagaagccgccgagatggattgtttgcaggaccccgctaagttgagcaccgaggttaactgcgtgtccaaaaagatcatttgtgagtctaaagacaactgcgaacacctgctttgcacctgcgacaaggctgcaattgaatgcctggccaggtctagtctgaactctagtctgaaccttctggacacttccttttgcctggcccaaacgcccgagacgacaataaaagaagatttgactaccctgctgccgcgagtcgtacctgtggagccaactgacacctcccttacggcgttgagcggcgaggaagctggccatgaccaagagggtgtgggagcagccagagccacttcacctcccggtagcgccgaaatcgtcgccacgagggtcactgccaaaatcgttacgctggtccctgcaggaattaagagtcttggcctagcagtttcctcagtcgaaaacgaccctgaagaaaccacggaaaaagcctgtgacaggtttacgtttctccatctcgggtccggggacaacatgcaagtgatgccccagttgggtgagatgttgttctgcctgactagccgttgtcctgaggagttcgagtcttatggatgttattgtggacaggagggtcgtggtgaacctcgggacgatctcgacaggtgctgtctgagccatcactgctgcctggagcaggtccggcggctaggctgccttctggaacgcttaccttggtctccagtggtgtgtgtggaccatacgcctaaatgcggcggacagtccctgtgcgaaaagctgctgtgcgcctgcgaccagacagctgcagagtgcatgacctctgcctcattcaatcaatctctcaagtcaccaagtcgactggggtgcccgggacaaccagccgcctgcgaggattccctccaccccgtacccgctgcccccacactcggtagtagctctgaggaggattctgaagaagaccctcctcaggaagatctgggcagggcaaagcgatttctgagaaagagcctggggcccctgggcataggaccacttcatggccgatag

SEQ ID NO: 36194 - DNA, 1482 bp, Artificial Sequence
  derived and/or modified sequence
atgattgcatttctgctgacatctgtgctaatgattccgcatgctggaggccaccccctggacaccccacatctgccccaagagctgcctcccgggctacctaataatatcaacattacgttctttagcgggatgttcaaaaacgtggaatcagtggcagagattttcgattgtttggggcctcactttacgtggttgcaggccgttttcaccaattttccagttctgattcagttcgtaaatgggatgaaatgtgttgcgggattgtgcccccgcgatttcgaggattacggttgtacctgtcgctttgaaatggagggtttgcccgtggacgagagtgattcctgttgcttccagcaccggagatgctatgaggaggctgctgaaatggattgcctgcaggacccggcgaagctcagcacagaagtgaattgtgtcagcaagaagatcatttgcgagtccaaggataattgcgagcatctcctgtgtacctgtgacaaggcagccatagagtgcttagcacggtcatcactaaattccagtctgaacctgctggatacttccttttgcttggcacagacacctgagactacgattaaggaagacttaactactctcctacctcgggtggtgcccgtcgagcctacagacacttcgcttacggccttgagtggagaagtggccgccgaaacggaagcagacaggttgatcactttaagcaaaaagaaagctgggcacgaccaagagggggttggcgccgctagagctacctctccccctggctccgcggaaatagtcgccaccagggtgactgcgaagattgtcaccctcgtgccggctgggatcaaatcgctggggttggctgtctctagcgttgagaacgaccccgaggagacgacagagaaggcctgcgaccgcttcacatttcttcatttaggcagcggagacaatatgcaggtcatgccacagttgggggagatgcttttttgtctcactagccgctgccccgaggagtttgaaagttacggttgttactgtgggcaagagggacgcggcgaaccccgcgacgatctggacagatgttgtttatcccatcattgctgtctcgagcaggttcggaggctcggttgcctgcttgagaggttaccctggagcccagttgtgtgtgtcgatcacacccccaagtgcgggggccagtctctctgtgagaaactgctgtgtgcctgtgatcagaccgccgctgaatgcatgactagcgcatcattcaaccagagcctcaagtcaccatcccggctcggctgcccaggccagcctgctgcatgtgaagatagtctgcacccagtacctgctgccccaacattgggctccagcagcgaagaagatagtgaagaggatccaccgcaagaggacctgggtcgcgccaaaaggttcctgcgcaagtccctcgggccattgggcattggccccctgcatggccggtag

SEQ ID NO: 36195 - DNA, 1434 bp, Artificial Sequence
  derived and/or modified sequence
atgattgccttcctgctgacctctgtgctgatgatcccccatgctgggggccaccccctggacaccccccacctgccccaggagctgcccccaggcctgcccaacaacatcaacatcaccttcttcagcggcatgttcaagaatgtggagagcgtggccgagatctttgactgcctgggcccccacttcacctggctgcaggccgtgttcaccaacttccctgtgctgatccagtttgtgaatggcatgaagtgtgtggccggcctgtgcccccgggactttgaagattatggctgcacctgccgctttgagatggagggcctgcctgtggatgaaagtgacagctgctgcttccagcaccggcgctgctatgaggaggccgctgagatggactgcctgcaggaccctgccaagctgagcacagaggtgaactgtgtgtccaagaagatcatctgtgagagcaaggacaactgtgagcacctgctgtgcacctgtgacaaggccgccattgaatgtctggcccggagcagcctgaacagcagcctgaacctgctggacaccagcttctgcctggcccagaccccagagaccaccatcaaggaggacctgaccaccctgctgccccgggtggtgcctgtggagcccacagacaccagcctgacagccctgagcggggaggaggccggccatgaccaggagggcgtgggcgccgcccgggccaccagccccccaggcagcgctgagatcgtggccaccagggtgacagccaagatcgtgaccctggtgcctgctggcatcaagagcctgggcctggccgtgtcctctgtggagaatgaccctgaggagaccacagagaaggcctgtgaccgcttcaccttcctgcacctgggcagcggggacaacatgcaggtgatgccccagctgggggagatgctgttctgcctgaccagccgctgcccagaggagtttgagagctatggctgctactgcggccaggagggccgcggggagcccagagatgacctggaccgctgctgcctgagccaccactgctgcctggagcaggtgcggcggctgggctgcctgctggagcggctgccctggagccctgtggtgtgtgtggaccacacccccaagtgtggcggccagagcctgtgtgagaagctgctgtgtgcctgtgaccagacagctgctgagtgcatgaccagcgccagcttcaaccagagcctgaagagccccagccggctgggctgccccggccagcctgctgcctgtgaggacagcctgcaccctgtgcctgctgcccccaccctgggcagcagcagcgaggaggacagcgaggaggaccccccccaggaggacctgggccgggccaagcgcttcctgaggaagagcctgggccccctgggcatcggccccctgcatggaagatag

SEQ ID NO: 36196 - DNA, 1482 bp, Artificial Sequence
  derived and/or modified sequence
atgattgccttcctgctgacctctgtgctgatgatcccccatgctgggggccaccccctggacaccccccacctgccccaggagctgcccccaggcctgcccaacaacatcaacatcaccttcttcagcggcatgttcaagaatgtggagagcgtggccgagatctttgactgcctgggcccccacttcacctggctgcaggccgtgttcaccaacttccctgtgctgatccagtttgtgaatggcatgaagtgtgtggccggcctgtgcccccgggactttgaagattatggctgcacctgccgctttgagatggagggcctgcctgtggatgaaagtgacagctgctgcttccagcaccggcgctgctatgaggaggccgctgagatggactgcctgcaggaccctgccaagctgagcacagaggtgaactgtgtgtccaagaagatcatctgtgagagcaaggacaactgtgagcacctgctgtgcacctgtgacaaggccgccattgaatgtctggcccggagcagcctgaacagcagcctgaacctgctggacaccagcttctgcctggcccagaccccagagaccaccatcaaggaggacctgaccaccctgctgccccgggtggtgcctgtggagcccacagacaccagcctgacagccctgagcggggaggtggccgctgagacagaagctgacaggctcatcaccctgagcaagaagaaggccggccatgaccaggagggcgtgggcgccgcccgggccaccagccccccaggcagcgctgagatcgtggccaccagggtgacagccaagatcgtgaccctggtgcctgctggcatcaagagcctgggcctggccgtgtcctctgtggagaatgaccctgaggagaccacagagaaggcctgtgaccgcttcaccttcctgcacctgggcagcggggacaacatgcaggtgatgccccagctgggggagatgctgttctgcctgaccagccgctgcccagaggagtttgagagctatggctgctactgcggccaggagggccgcggggagcccagagatgacctggaccgctgctgcctgagccaccactgctgcctggagcaggtgcggcggctgggctgcctgctggagcggctgccctggagccctgtggtgtgtgtggaccacacccccaagtgtggcggccagagcctgtgtgagaagctgctgtgtgcctgtgaccagacagctgctgagtgcatgaccagcgccagcttcaaccagagcctgaagagccccagccggctgggctgccccggccagcctgctgcctgtgaggacagcctgcaccctgtgcctgctgcccccaccctgggcagcagcagcgaggaggacagcgaggaggaccccccccaggaggacctgggccgggccaagcgcttcctgaggaagagcctgggccccctgggcatcggccccctgcatggaagatag

SEQ ID NO: 36197 - DNA, 1434 bp, Artificial Sequence
  derived and/or modified sequence
atgatcgccttcctgctgaccagcgtgctgatgatcccccacgccggaggacacccactcgatacaccacacctgcctcaggaactccccccaggactgcccaataacattaacataacatttttcagcgggatgtttaagaatgttgagagtgtcgccgaaatttttgactgtctgggtccgcactttacttggctccaggccgtatttacaaactttcccgtgttaatacagttcgtaaatggaatgaagtgcgtggctggactgtgcccacgagactttgaggattacgggtgtacttgtaggttcgagatggagggtctgccggtggatgagtccgatagttgctgctttcagcatcgcaggtgttatgaggaggccgctgagatggattgccttcaagaccctgcgaagctatcaactgaggtgaattgtgtgtccaaaaaaatcatttgcgaatcgaaggataattgtgaacatttactctgcacatgcgacaaagctgccattgaatgtctcgccagatcctcactaaactccagcctcaatctgttggacacttctttttgccttgcccagacaccggagacaacaatcaaggaagatttgactacgttgctcccgcgggttgtacccgtcgaacccactgacaccagcctgacagcgctgtccggagaagaggccggacatgatcaggaaggtgtgggcgcggctagagcgaccagcccaccaggctccgccgagatagtcgccactcgcgtcaccgcaaagatagtcaccctggtgcctgctggtatcaagagcctcggcctggccgtgagcagtgttgagaatgaccctgaggagaccacagagaaggcatgcgaccgattcacttttctgcatttaggctccggagacaatatgcaagttatgccccagctgggcgaaatgttgttttgtctaacctccaggtgcccagaagagtttgaatcttatggctgttactgcggacaagagggtcgaggcgagcctcgcgatgacttggaccggtgctgtctatcccatcactgctgcctggagcaggtgagaagactgggctgtctgctcgaaagactcccgtggtcccctgttgtgtgcgtggaccatacacccaaatgtggagggcagtctctgtgtgaaaagcttctgtgcgcctgcgatcagactgctgcagagtgcatgacctccgcctcctttaaccagagtctcaaatccccgtccagacttggctgccccggacaaccagccgcctgcgaggatagtctccaccctgtaccagccgcccctacgttgggatcgagtagtgaagaggattctgaggaggatccccctcaggaagacttgggccgggccaagaggttcctcagaaagagcctcgggcccctcggaatcggcccgctgcacggccgatag

SEQ ID NO: 36198 - DNA, 1482 bp, Artificial Sequence
  derived and/or modified sequence
atgatcgccttcctgctgaccagcgtgctgatgatcccccacgccggggggcatccactggacaccccccacctgccccaggagttacccccgggcctgccaaataatatcaacatcacctttttctctggaatgtttaagaatgtggaatcagtggcggaaattttcgactgcttaggacctcattttacatggctgcaagcggtgttcactaactttcccgtgctgatccagttcgtgaacggtatgaagtgtgttgctggactgtgtcctagggacttcgaggattacggttgcacatgcagatttgagatggagggtctgcctgttgacgagagtgattcttgctgtttccagcatcgccggtgctatgaggaggcggcagaaatggattgtctgcaagacccagccaaactgagcaccgaggtgaattgcgtctctaaaaagatcatttgcgagagcaaagacaactgtgagcacctgctgtgcacctgcgacaaggcggcgattgaatgcttggctaggtcttctctaaactcatctcttaacctccttgacacatctttctgtctcgcccagacacccgaaaccaccatcaaagaagacctcacgacactgctacctagggtagtgcctgttgagcccaccgacacttctcttacagcgttaagcggggaggtcgccgccgaaacagaagcagaccgcctcatcacactcagcaaaaagaaggcagggcacgatcaggagggcgtgggcgccgcccgagcgacatctccccctggatctgccgagattgtggccacgcgcgtcacagcaaaaattgtgactctcgttccagctggcattaagtccctggggttagcggtaagtagtgtggagaacgacccagaggagaccaccgaaaaagcatgtgacaggttcaccttcctccacttgggcagtggagataatatgcaagtcatgcctcaactcggggaaatgctgttctgcctcacaagcagatgtcctgaagaattcgagtcatatggatgctactgtggtcaggaggggcggggggaaccacgtgacgatctagacaggtgttgcctgtcacaccactgttgcctagaacaagtcaggcgactgggctgcctcctggaaagattgccttggagccccgtcgtgtgtgtggatcatacacctaaatgtggggggcagagcctgtgtgagaaattgctttgtgcttgcgaccaaactgccgctgagtgcatgacatccgcctcgttcaaccagtctttgaagagcccgagccggcttggatgtcctggtcaaccagcagcgtgcgaagacagcctgcaccccgttcctgccgcgccaaccctcggctccagcagcgaggaggattctgaggaggacccccctcaagaggacctcgggcgcgcaaaaaggttcctgcgtaagtcactggggccgctgggtattgggcccctgcacggccggtag

SEQ ID NO: 36199 - DNA, 1782 bp, Artificial Sequence
  derived and/or modified sequence
agcatcattcatccagctgcactccagtggagccttcacggagtccgttccagttgctgcctaagccccatcctttgttctcctgctatgattgcgtttctcctcaccagtgtgctgatgatcccccatgccggaggccatcctctggacactccacatcttccacaggagctgcctccaggactcccaaacaatatcaatatcactttcttcagtgggatgtttaaaaatgtggaaagtgtggctgaaatttttgattgcctgggcccccacttcacctggctgcaggctgtcttcaccaatttccctgtgctgatccagtttgtcaatggtatgaagtgtgtggctggtctctgcccccgagactttgaagactatggttgcacctgcaggtttgagatggaagggttgcctgtggatgaatctgacagctgctgcttccagcaccgcaggtgctatgaggaggccgctgagatggactgtctccaagaccccgccaaacttagcacagaggtcaattgtgtcagcaagaagatcatatgtgagtccaaggacaactgtgagcacctgctgtgtacctgtgataaggctgccatagagtgcttggctcgatccagcctcaactcttccctgaaccttctggacacctccttctgcctggctcagactccagagacaaccatcaaggaagacttgacaacacttctgcccagagtggttcctgtggagcccacagacaccagcctgacagccctttcaggagaagaagcaggccacgatcaggaaggagtgggagctgctagggctacgtcccctccaggatctgcagagatagttgcaacaagggttacagctaaaattgtaacccttgtccctgctggcattaaatctctggggctggcagtgtcatctgttgaaaatgatcctgaggagaccactgaaaaagcctgtgacagattcaccttcctgcacctgggaagtggggacaacatgcaggtgatgccacagcttggagagatgctcttttgtctgacatcccggtgcccggaggaatttgagtcttatggctgttactgtggacaagaaggaagaggcgagccaagggatgacctagacaggtgctgcttgtcccatcactgctgcctagagcaagtgagaaggctgggctgcctgcttgagaggcttccttggtcaccggtggtgtgtgtggatcatacgcccaagtgtgggggccaaagcctgtgtgagaagttgctctgtgcctgtgaccagacggcagctgagtgcatgacctctgcctcctttaaccaaagcctcaagtccccaagcagactcgggtgccctgggcagccagcagcctgtgaagacagcctgcaccctgtgcccgcagcccccaccctgggctccagctctgaggaggacagcgaggaggaccctccacaggaggacctcggcagagccaagaggtttctgcggaagtcactgggtcccttggggatcgggcctcttcatggaagatagatgcccagagaaaatggctaacaccttcagtagcgtggctcctgctccaccttcagctctttatctctcagcctcctctgtcccttggagccttcttcccttcctttaactcagaggcggggagggaacagaggccgtgagccctgcccatgcctcatcagctgtggtcacctcacaagccaatgtacacttggagaaggcacaccatggtacctccatgctcctttagtgcactgtggaagctcaataaatactccaatc

SEQ ID NO: 36200 - DNA, 1830 bp, Artificial Sequence
  derived and/or modified sequence
agcatcattcatccagctgcactccagtggagccttcacggagtccgttccagttgctgcctaagccccatcctttgttctcctgctatgattgcgtttctcctcaccagtgtgctgatgatcccccatgccggaggccatcctctggacactccacatcttccacaggagctgcctccaggactcccaaacaatatcaatatcactttcttcagtgggatgtttaaaaatgtggaaagtgtggctgaaatttttgattgcctgggcccccacttcacctggctgcaggctgtcttcaccaatttccctgtgctgatccagtttgtcaatggtatgaagtgtgtggctggtctctgcccccgagactttgaagactatggttgcacctgcaggtttgagatggaagggttgcctgtggatgaatctgacagctgctgcttccagcaccgcaggtgctatgaggaggccgctgagatggactgtctccaagaccccgccaaacttagcacagaggtcaattgtgtcagcaagaagatcatatgtgagtccaaggacaactgtgagcacctgctgtgtacctgtgataaggctgccatagagtgcttggctcgatccagcctcaactcttccctgaaccttctggacacctccttctgcctggctcagactccagagacaaccatcaaggaagacttgacaacacttctgcccagagtggttcctgtggagcccacagacaccagcctgacagccctttcaggagaagtggctgcagagactgaggctgacagactgatcactctctccaagaaaaaagcaggccacgatcaggaaggagtgggagctgctagggctacgtcccctccaggatctgcagagatagttgcaacaagggttacagctaaaattgtaacccttgtccctgctggcattaaatctctggggctggcagtgtcatctgttgaaaatgatcctgaggagaccactgaaaaagcctgtgacagattcaccttcctgcacctgggaagtggggacaacatgcaggtgatgccacagcttggagagatgctcttttgtctgacatcccggtgcccggaggaatttgagtcttatggctgttactgtggacaagaaggaagaggcgagccaagggatgacctagacaggtgctgcttgtcccatcactgctgcctagagcaagtgagaaggctgggctgcctgcttgagaggcttccttggtcaccggtggtgtgtgtggatcatacgcccaagtgtgggggccaaagcctgtgtgagaagttgctctgtgcctgtgaccagacggcagctgagtgcatgacctctgcctcctttaaccaaagcctcaagtccccaagcagactcgggtgccctgggcagccagcagcctgtgaagacagcctgcaccctgtgcccgcagcccccaccctgggctccagctctgaggaggacagcgaggaggaccctccacaggaggacctcggcagagccaagaggtttctgcggaagtcactgggtcccttggggatcgggcctcttcatggaagatagatgcccagagaaaatggctaacaccttcagtagcgtggctcctgctccaccttcagctctttatctctcagcctcctctgtcccttggagccttcttcccttcctttaactcagaggcggggagggaacagaggccgtgagccctgcccatgcctcatcagctgtggtcacctcacaagccaatgtacacttggagaaggcacaccatggtacctccatgctcctttagtgcactgtggaagctcaataaatactccaatc

SEQ ID NO: 36201 - DNA, 1434 bp, Artificial Sequence
  derived and/or modified sequence
atgatcgctttcctcctgactagcgtacttatgatcccccatgcaggagggcacccgctggacacgccacatttaccccaggaattgcccccaggtctgcctaataatatcaacatcacatttttttccggaatgttcaagaacgtagagagtgtagcagaaattttcgattgccttggccctcacttcacttggctgcaggctgtgttcacgaacttccccgtcctgattcagtttgtgaacggaatgaagtgcgttgcgggactttgtcccagggactttgaggactatgggtgtacgtgtcgttttgagatggagggcctccccgtagatgaatcagatagttgttgtttccagcatcgcagatgttacgaggaggccgctgagatggattgcctgcaggaccccgcaaagctcagcaccgaagtgaactgtgtaagcaaaaaaattatctgcgaatctaaggacaactgtgaacacctgttatgcacttgtgataaggcggctatcgagtgcctggccagaagttctctgaattctagcctgaatttgttagatacgagtttttgcctcgcgcagacccccgaaactacaatcaaagaggacctgaccacccttctgccacgcgtggttcccgtggaacccaccgacacctccctgacagccttgtcgggcgaagaggctggccatgatcaggagggcgttggcgcagccagggctacatccccccctggttctgctgaaatcgtggcaaccagggtgacagctaaaatcgtgacactggtgcctgctgggataaaatctctcggactggctgtgtcttctgtggagaacgacccagaagagaccaccgaaaaggcctgcgaccgttttactttcttgcatctgggctccggagacaatatgcaagtcatgccccagttgggcgagatgctgttttgccttacttctcgctgcccagaagaattcgagagctacggatgctactgtgggcaagaaggcagaggagagcccagagacgacttagaccgctgctgcctctctcaccactgttgccttgagcaggtgcggcgtctgggatgtcttctggagagactgccgtggtctcctgtagtgtgcgtcgaccataccccaaaatgtggcggacaaagcctttgcgagaagctgctctgcgcttgtgatcagacagcagccgagtgcatgacaagcgctagtttcaaccaatctctgaaaagtccttcgcgtctgggttgcccagggcagccggctgcttgcgaggatagcctccacccagtccccgcagcccctacactagggtcttcgagtgaggaagattctgaagaagacccccctcaggaggatttggggcgtgcaaagcgctttctcaggaaatctttgggcccattgggtatcggtccattgcatgggaggtag

SEQ ID NO: 36202 - DNA, 1482 bp, Artificial Sequence
  derived and/or modified sequence
atgatcgcattcctcctgacctccgtgctaatgatcccacacgccggaggtcaccccctcgacactcctcacttgcctcaggaattgccccctgggctccctaacaacatcaacatcacatttttttcagggatgttcaaaaacgtagaaagtgttgccgaaatcttcgactgcctgggcccacatttcacatggctacaggccgtgtttacaaattttccagttctcatccagttcgtcaatgggatgaaatgcgttgccggactctgccctcgcgacttcgaggattacgggtgcacctgtcgcttcgagatggagggcctgcccgtggacgagagtgactcatgctgcttccagcacagacgatgttacgaggaggccgcagagatggattgcctgcaagatcctgcgaagctttccacggaagtgaattgtgtctcaaagaaaattatatgtgaaagcaaggacaattgtgaacacctgctgtgcacctgtgataaagctgctattgaatgtttggcccgatctagccttaactctagtctgaaccttctcgatacatcattctgcctcgcacagactcctgagaccacaattaaggaggacttgaccacgctgctgccacgtgtggtccctgtcgaacctactgacacctcactcaccgcactctctggggaggtcgctgccgagaccgaagcagaccgcctgatcaccctgtctaaaaagaaagctgggcacgatcaagagggtgtgggcgcagctcgagccactagccctcctgggtctgcagagatcgttgcaacaagggtgacagccaagattgtgaccttagtcccagcgggaatcaagagtctcggcctcgctgtgtcatctgtggagaacgaccctgaggagacaacagagaaagcatgtgaccggtttactttcctccacctaggctccggagacaatatgcaggtgatgcctcagttgggggaaatgctgttttgcctcacatctaggtgcccagaggaatttgaaagctatggctgctactgcggacaagaggggaggggcgagcccagagatgatttggacagatgctgcctgtcacaccactgctgtcttgagcaggtgaggaggctcggctgcctgctcgaaagactcccatggagccccgtggtgtgcgttgatcacactccaaagtgcggtgggcagtctctctgcgaaaagctcctgtgtgcctgcgaccaaacggcagcggagtgtatgacatcggcctcctttaaccagtctctcaaatcgccatcacgtctgggctgcccagggcagcctgctgcctgtgaagactctctgcatcctgtgcccgctgctccaaccctcggatcatcctccgaggaggactctgaagaagacccaccacaggaagacctgggccgagccaaaagattccttcgcaagagcctgggccctctcggtattggtcctctacatggaagatag

SEQ ID NO: 36203 - DNA, 1434 bp, Artificial Sequence
  derived and/or modified sequence
atgatcgccttcctgctgaccagcgtgctgatgatcccccacgccggcggccaccccctggacaccccccacctgccccaggagctgccccccggcctgcccaacaacatcaacatcaccttcttcagcggcatgttcaagaacgtggagagcgtggccgagatcttcgactgcctgggcccccacttcacctggctgcaggccgtgttcaccaacttccccgtgctgatccagttcgtgaacggcatgaagtgcgtggccggcctgtgccccagagacttcgaggactacggctgcacctgcagattcgagatggagggcctgcccgtggacgagagcgacagctgctgcttccagcacagaagatgctacgaggaggccgccgagatggactgcctgcaggaccccgccaagctgagcaccgaggtgaactgcgtgagcaagaagatcatctgcgagagcaaggacaactgcgagcacctgctgtgcacctgcgacaaggccgccatcgagtgcctggccagaagcagcctgaacagcagcctgaacctgctggacaccagcttctgcctggcccagacccccgagaccaccatcaaggaggacctgaccaccctgctgcccagagtggtgcccgtggagcccaccgacaccagcctgaccgccctgagcggcgaggaggccggccacgaccaggagggcgtgggcgccgccagagccaccagcccccccggcagcgccgagatcgtggccaccagagtgaccgccaagatcgtgaccctggtgcccgccggcatcaagagcctgggcctggccgtgagcagcgtggagaacgaccccgaggagaccaccgagaaggcctgcgacagattcaccttcctgcacctgggcagcggcgacaacatgcaggtgatgccccagctgggcgagatgctgttctgcctgaccagcagatgccccgaggagttcgagagctacggctgctactgcggccaggagggcagaggcgagcccagagacgacctggacagatgctgcctgagccaccactgctgcctggagcaggtgagaagactgggctgcctgctggagagactgccctggagccccgtggtgtgcgtggaccacacccccaagtgcggcggccagagcctgtgcgagaagctgctgtgcgcctgcgaccagaccgccgccgagtgcatgaccagcgccagcttcaaccagagcctgaagagccccagcagactgggctgccccggccagcccgccgcctgcgaggacagcctgcaccccgtgcccgccgcccccaccctgggcagcagcagcgaggaggacagcgaggaggaccccccccaggaggacctgggcagagccaagagattcctgagaaagagcctgggccccctgggcatcggccccctgcacggcagatag

SEQ ID NO: 36204 - DNA, 1482 bp, Artificial Sequence
  derived and/or modified sequence
atgatcgccttcctgctgaccagcgtgctgatgatcccccacgccggcggccaccccctggacaccccccacctgccccaggagctgccccccggcctgcccaacaacatcaacatcaccttcttcagcggcatgttcaagaacgtggagagcgtggccgagatcttcgactgcctgggcccccacttcacctggctgcaggccgtgttcaccaacttccccgtgctgatccagttcgtgaacggcatgaagtgcgtggccggcctgtgccccagagacttcgaggactacggctgcacctgcagattcgagatggagggcctgcccgtggacgagagcgacagctgctgcttccagcacagaagatgctacgaggaggccgccgagatggactgcctgcaggaccccgccaagctgagcaccgaggtgaactgcgtgagcaagaagatcatctgcgagagcaaggacaactgcgagcacctgctgtgcacctgcgacaaggccgccatcgagtgcctggccagaagcagcctgaacagcagcctgaacctgctggacaccagcttctgcctggcccagacccccgagaccaccatcaaggaggacctgaccaccctgctgcccagagtggtgcccgtggagcccaccgacaccagcctgaccgccctgagcggcgaggtggccgccgagaccgaggccgacagactgatcaccctgagcaagaagaaggccggccacgaccaggagggcgtgggcgccgccagagccaccagcccccccggcagcgccgagatcgtggccaccagagtgaccgccaagatcgtgaccctggtgcccgccggcatcaagagcctgggcctggccgtgagcagcgtggagaacgaccccgaggagaccaccgagaaggcctgcgacagattcaccttcctgcacctgggcagcggcgacaacatgcaggtgatgccccagctgggcgagatgctgttctgcctgaccagcagatgccccgaggagttcgagagctacggctgctactgcggccaggagggcagaggcgagcccagagacgacctggacagatgctgcctgagccaccactgctgcctggagcaggtgagaagactgggctgcctgctggagagactgccctggagccccgtggtgtgcgtggaccacacccccaagtgcggcggccagagcctgtgcgagaagctgctgtgcgcctgcgaccagaccgccgccgagtgcatgaccagcgccagcttcaaccagagcctgaagagccccagcagactgggctgccccggccagcccgccgcctgcgaggacagcctgcaccccgtgcccgccgcccccaccctgggcagcagcagcgaggaggacagcgaggaggaccccccccaggaggacctgggcagagccaagagattcctgagaaagagcctgggccccctgggcatcggccccctgcacggcagatag

SEQ ID NO: 36205 - RNA, 2070 nt, Artificial Sequence
  derived and/or modified sequence
augaaauucggcgcugugacccguauuggcggcccaccgcucggcaaccaaagcccguccucgugcucacuauugcacgaaaaggauccacccacaaccucuggaccccagacagaucaaccuaaaaagcaccugacaaacuuuaagagugcgacucggcgggucgcgcgcacucaguggcuaacagcagaccgacagacaugggccaguauuagcagcguaccuugggcccaaacaaucagcgaaaagaagccgggcggaucacugugggagaccagauccucaccaccuaccacggccgguacugaggaagcuaugaauacaaccagccuucuggcaccugcagcugagauaauggccaccccaggcagcccuagccaagccucaccgacccugggggccuucacccauggcacacagacuccuaguccuacaaaggcuacagcuccccgguacccucagaccggcgaccucucagcagaguggccuuucacugccggcgaggagcccguccugguccccagaccacaucaaguaagccgcguuaggagcagcuguugccucagccccauccugugcagccccgccaugauugcauuccuccugacgaguguucugaugauaccacaugccgggggccacccgcucgauacuccacacuugccucaagaacugccuccagggcugccuaauaauauuaacaucaccuucuucucuggaauguucaagaacguugagagcgucgcagaaaucuuugacugccugggcccucacuucacgugguugcaggccguguuuaccaauuuucccgugcugauucaauuugugaacgggaugaaguguguugcugggcuuugucccagagauuucgaggauuacggguguacuuguagguucgaaauggagggccuuccuguggacgaauccgacuccugcugcuuccagcaccgucgcugcuaugaggaggcagccgaaauggauugucugcaagacccggccaaauuaagcacugaaguuaacugcgugucuaagaagauuauaugugaaaguaaagacaacugcgagcauuuguuguguacgugcgauaaagccgcgauugaguguuuagcccguagcucccugaacagcucuuugaauuugcuggacaccagcuucuguuuagcgcagacaccugaaaccaccaucaaagaggaccucacaacacuguugccccguguuguaccaguugaaccuaccgacacaagucuaaccgcucucuccggcgagguugcugcugaaacggaagccgaccgcuugaucacccugagcaaaaaaaaggccggccaugaucaggaaggcguuggagcagcccgcgccacgagucccccggguuccgccgagaucguagcuacccgagucacagccaagauagugaccuuagucccagccggcauuaagagccucggacuggcugucagcuccguggagaacgauccagaagaaacuaccgagaaagccugcgaucgguuuacuuuucuccaucugggaucaggagauaacaugcagguaaugccccaguugggcgagaugcuuuuuugccugacuucgcggugcccugaggaguuugaguccuauggcuguuacuguggacaggaagggaggggagagccgagagacgaucuugaccguuguugucugucgcaucauuguugucuggaacaaguucgacgucuuggaugcuugcuugagcgccugccauggucucccguaguguguguagaucauaccccgaaaugcgguggucaaucguugugcgaaaaacuguugugugccugugaccagacugcagccgaguguaugacuuccgccagcuuuaaucagaguuugaaaucgccuagucgacugggguguccaggccagcccgcggcgugugaagacucucuccauccaguaccagccgcucccacucuuggcagcucaagcgaagaagacagcgaagaagacccuccccaagaggaccugggacgagcaaaacgcuuucugaggaaaucccuuggaccacuuggcauuggcccacugcacgguagguag

SEQ ID NO: 36206 - RNA, 2070 nt, Artificial Sequence
  derived and/or modified sequence
augaaauucggggcagucacacggauuggggggcccccacugggaaaucaaucacccaguaguugcagccuucuccaugaaaaggacccuccgacgacuagcggaccucagacagaccaaccaaagaagcaucucaccaacuucaagagcgccacucguagagucgcaagaacccaauggcugacagcagaucgacaaacaugggcaaguaucucuucaguuccuugggcucagacaauuagcgaaaagaaaccaggagguagcuuaugggaaaccagaagcuccccucccaccacugcgggcacggaagaagcuaugaacaccaccucauuguuggccccagcugcagagauaauggccacuccugggagucccucgcaagcaagcccuacccuuggcgcauuuacacacgggacacagacucccagucccaccaaagccacagccccuagguauccccaaaccggagauuuguccgcugaauggccuuucacggccggggaagaaccgguucuugugccacgcccucaucaagucagucgcguccgcuccaguuguuguuuaucaccaauucuguguagucccgcuaugaucgccuuccuccugaccuccgugcucaugaucccccacgccggcggccauccccuggacacuccccaccugccccaggaguuaccaccgggccucccuaauaauaucaauauaaccuucuucagcgguauguucaagaacgucgaauccgucgcugaaauauucgauugcuuaggcccucauuuuacuugguugcaagcaguauuuacaaacuuuccaguucugauucaguucguuaauggcaugaaguguguugccggucugugucccagagauuuugaagacuacggaugcacuugucgcuucgagauggaagguuugccaguggaugagagugacucuugcuguuuucaacaccguagaugcuacgaagaggccgcugaaauggauuguuuacaggauccugcaaaguuaaguaccgaaguuaauugcgucuccaagaagauuauaugugaauccaaagauaacugugagcaccuccuuuguacgugugacaaagccgcaauagagugucuggccaggagcucacucaauucgucauuaaauuuguuggacaccagcuucugccuugcccaaacaccugagacuacaauaaaagaggaucuaacaacacuguugccccguguuguaccaguugaaccuaccgacacaagucuaaccgcucucuccggcgagguugcugcugaaacggaagccgaccgcuugaucacccugagcaaaaaaaaggccggccaugaucaggaaggcguuggagcagcccgcgccacgagucccccggguuccgccgagaucguagcuacccgagucacagccaagauagugaccuuagucccagccggcauuaagagccucggacuggcugucagcuccguggagaacgauccagaagaaacuaccgagaaagccugcgacagauuuacuuuccuacaccuggguuccggagacaauaugcaaguuaugccucagcugggggaaaugcuauucuguuugaccagucgaugcccugaagaguuugagagcuaugguugcuauuguggacaagagggaagaggagagccccgcgacgaucucgacagaugcugcuuaucucaccacuguugccuugagcagguucgccgccugggaugucugcuggaaaggcugccauggagcccgguggucugcguggaucauacacccaagugcgggggccagucccucugcgagaagcuacuaugcgcaugcgaccagacagccgcugaauguaugaccucugccagcuucaaucagucucuuaaaucccccaguagacucggguguccaggccaacccgccgcgugcgaggacucgcugcauccugugcccgccgcaccuacacucgguagcaguucagaagaggacucggaggaagauccaccucaagaagaccugggucgcgccaagagauuucuccgcaagagccugggaccauugggcaucggcccguugcacggaagauag

SEQ ID NO: 36207 - protein, 1357 aa, Artificial Sequence
  derived and/or modified sequence
MQTLGSFFGSLPGFSSARNLVANAHSSARARPAADPTGAPAAEAAQPQAQVAAHPEQTAPWTEKELQPSEKQMVSGAKDLVCSKMSRAKDAVSSGVASVVDVAKGVVQGGLDTTRSALTGTKEVVSSGVTGAMDMAKGAVQGGLDTSKAVLTGTKDTVSTGLTGAVNVAKGTVQAGVDTTKTVLTGTKDTVTTGVMGAVNLAKGTVQTGVETSKAVLTGTKDAVSTGLTGAVNVARGSIQTGVDTSKTVLTGTKDTVCSGVTGAMNVAKGTIQTGVDTSKTVLTGTKDTVCSGVTGAMNVAKGTIQTGVDTSKTVLTGTKDTVCSGVTGAMNVAKGTIQTGVDTTKTVLTGTKNTVCSGVTGAVNLAKEAIQGGLDTTKSMVMGTKDTMSTGLTGAANVAKGAMQTGLNTTQNIATGTKDTVCSGVTGAMNLARGTIQTGVDTTKIVLTGTKDTVCSGVTGAANVAKGAVQGGLDTTKSVLTGTKDAVSTGLTGAVNVAKGTVQTGVDTTKTVLTGTKDTVCSGVTSAVNVAKGAVQGGLDTTKSVVIGTKDTMSTGLTGAANVAKGAVQTGVDTAKTVLTGTKDTVTTGLVGAVNVAKGTVQTGMDTTKTVLTGTKDTIYSGVTSAVNVAKGAVQTGLKTTQNIATGTKNTFGSGVTSAVNVAKGAAQTGVDTAKTVLTGTKDTVTTGLMGAVNVAKGTVQTSVDTTKTVLTGTKDTVCSGVTGAANVAKGAIQGGLDTTKSVLTGTKDAVSTGLTGAVKLAKGTVQTGMDTTKTVLTGTKDAVCSGVTGAANVAKGAVQMGVDTAKTVLTGTKDTVCSGVTGAANVAKGAVQTGLKTTQNIATGTKNTLGSGVTGAAKVAKGAVQGGLDTTKSVLTGTKDAVSTGLTGAVNLAKGTVQTGVDTSKTVLTGTKDTVCSGVTGAVNVAKGTVQTGVDTAKTVLSGAKDAVTTGVTGAVNVAKGTVQTGVDASKAVLMGTKDTVFSGVTGAMSMAKGAVQGGLDTTKTVLTGTKDAVSAGLMGSGNVATGATHTGLSTFQNWLPSTPATSWGGLTSSRTTDNGGEQTALSPQEAPFSGISTPPDVLSVGPEPAWEAAATTKGLATDVATFTQGAAPGREDTGLLATTHGPEEAPRLAMLQNELEGLGDIFHPMNAEEQAQLAASQPGPKVLSAEQGSYFVRLGDLGPSFRQRAFEHAVSHLQHGQFQARDTLAQLQDCFRLIEKAQQAPEGQPRLDQGSGASAEDAAVQEERDAGVLSRVCGLLRQLHTAYSGLVSSLQGLPAELQQPVGRARHSLCELYGIVASAGSVEELPAERLVQSREGVHQAWQGLEQLLEGLQHNPPLSWLVGPFALPAGGQ

SEQ ID NO: 36208 - DNA, 4074 bp, Artificial Sequence
  derived and/or modified sequence
atgcagaccctgggcagcttcttcggcagcctgcccggcttcagcagcgccagaaacctggtggccaacgcccacagcagcgccagagccagacccgccgccgaccccaccggcgcccccgccgccgaggccgcccagccccaggcccaggtggccgcccaccccgagcagaccgccccctggaccgagaaggagctgcagcccagcgagaagcagatggtgagcggcgccaaggacctggtgtgcagcaagatgagcagagccaaggacgccgtgagcagcggcgtggccagcgtggtggacgtggccaagggcgtggtgcagggcggcctggacaccaccagaagcgccctgaccggcaccaaggaggtggtgagcagcggcgtgaccggcgccatggacatggccaagggcgccgtgcagggcggcctggacaccagcaaggccgtgctgaccggcaccaaggacaccgtgagcaccggcctgaccggcgccgtgaacgtggccaagggcaccgtgcaggccggcgtggacaccaccaagaccgtgctgaccggcaccaaggacaccgtgaccaccggcgtgatgggcgccgtgaacctggccaagggcaccgtgcagaccggcgtggagaccagcaaggccgtgctgaccggcaccaaggacgccgtgagcaccggcctgaccggcgccgtgaacgtggccagaggcagcatccagaccggcgtggacaccagcaagaccgtgctgaccggcaccaaggacaccgtgtgcagcggcgtgaccggcgccatgaacgtggccaagggcaccatccagaccggcgtggacaccagcaagaccgtgctgaccggcaccaaggacaccgtgtgcagcggcgtgaccggcgccatgaacgtggccaagggcaccatccagaccggcgtggacaccagcaagaccgtgctgaccggcaccaaggacaccgtgtgcagcggcgtgaccggcgccatgaacgtggccaagggcaccatccagaccggcgtggacaccaccaagaccgtgctgaccggcaccaagaacaccgtgtgcagcggcgtgaccggcgccgtgaacctggccaaggaggccatccagggcggcctggacaccaccaagagcatggtgatgggcaccaaggacaccatgagcaccggcctgaccggcgccgccaacgtggccaagggcgccatgcagaccggcctgaacaccacccagaacatcgccaccggcaccaaggacaccgtgtgcagcggcgtgaccggcgccatgaacctggccagaggcaccatccagaccggcgtggacaccaccaagatcgtgctgaccggcaccaaggacaccgtgtgcagcggcgtgaccggcgccgccaacgtggccaagggcgccgtgcagggcggcctggacaccaccaagagcgtgctgaccggcaccaaggacgccgtgagcaccggcctgaccggcgccgtgaacgtggccaagggcaccgtgcagaccggcgtggacaccaccaagaccgtgctgaccggcaccaaggacaccgtgtgcagcggcgtgaccagcgccgtgaacgtggccaagggcgccgtgcagggcggcctggacaccaccaagagcgtggtgatcggcaccaaggacaccatgagcaccggcctgaccggcgccgccaacgtggccaagggcgccgtgcagaccggcgtggacaccgccaagaccgtgctgaccggcaccaaggacaccgtgaccaccggcctggtgggcgccgtgaacgtggccaagggcaccgtgcagaccggcatggacaccaccaagaccgtgctgaccggcaccaaggacaccatctacagcggcgtgaccagcgccgtgaacgtggccaagggcgccgtgcagaccggcctgaagaccacccagaacatcgccaccggcaccaagaacaccttcggcagcggcgtgaccagcgccgtgaacgtggccaagggcgccgcccagaccggcgtggacaccgccaagaccgtgctgaccggcaccaaggacaccgtgaccaccggcctgatgggcgccgtgaacgtggccaagggcaccgtgcagaccagcgtggacaccaccaagaccgtgctgaccggcaccaaggacaccgtgtgcagcggcgtgaccggcgccgccaacgtggccaagggcgccatccagggcggcctggacaccaccaagagcgtgctgaccggcaccaaggacgccgtgagcaccggcctgaccggcgccgtgaagctggccaagggcaccgtgcagaccggcatggacaccaccaagaccgtgctgaccggcaccaaggacgccgtgtgcagcggcgtgaccggcgccgccaacgtggccaagggcgccgtgcagatgggcgtggacaccgccaagaccgtgctgaccggcaccaaggacaccgtgtgcagcggcgtgaccggcgccgccaacgtggccaagggcgccgtgcagaccggcctgaagaccacccagaacatcgccaccggcaccaagaacaccctgggcagcggcgtgaccggcgccgccaaggtggccaagggcgccgtgcagggcggcctggacaccaccaagagcgtgctgaccggcaccaaggacgccgtgagcaccggcctgaccggcgccgtgaacctggccaagggcaccgtgcagaccggcgtggacaccagcaagaccgtgctgaccggcaccaaggacaccgtgtgcagcggcgtgaccggcgccgtgaacgtggccaagggcaccgtgcagaccggcgtggacaccgccaagaccgtgctgagcggcgccaaggacgccgtgaccaccggcgtgaccggcgccgtgaacgtggccaagggcaccgtgcagaccggcgtggacgccagcaaggccgtgctgatgggcaccaaggacaccgtgttcagcggcgtgaccggcgccatgagcatggccaagggcgccgtgcagggcggcctggacaccaccaagaccgtgctgaccggcaccaaggacgccgtgagcgccggcctgatgggcagcggcaacgtggccaccggcgccacccacaccggcctgagcaccttccagaactggctgcccagcacccccgccaccagctggggcggcctgaccagcagcagaaccaccgacaacggcggcgagcagaccgccctgagcccccaggaggcccccttcagcggcatcagcaccccccccgacgtgctgagcgtgggccccgagcccgcctgggaggccgccgccaccaccaagggcctggccaccgacgtggccaccttcacccagggcgccgcccccggcagagaggacaccggcctgctggccaccacccacggccccgaggaggcccccagactggccatgctgcagaacgagctggagggcctgggcgacatcttccaccccatgaacgccgaggagcaggcccagctggccgccagccagcccggccccaaggtgctgagcgccgagcagggcagctacttcgtgagactgggcgacctgggccccagcttcagacagagagccttcgagcacgccgtgagccacctgcagcacggccagttccaggccagagacaccctggcccagctgcaggactgcttcagactgatcgagaaggcccagcaggcccccgagggccagcccagactggaccagggcagcggcgccagcgccgaggacgccgccgtgcaggaggagagagacgccggcgtgctgagcagagtgtgcggcctgctgagacagctgcacaccgcctacagcggcctggtgagcagcctgcagggcctgcccgccgagctgcagcagcccgtgggcagagccagacacagcctgtgcgagctgtacggcatcgtggccagcgccggcagcgtggaggagctgcccgccgagagactggtgcagagcagagagggcgtgcaccaggcctggcagggcctggagcagctgctggagggcctgcagcacaacccccccctgagctggctggtgggccccttcgccctgcccgccggcggccagtag

SEQ ID NO: 36209 - DNA, 4074 bp, Artificial Sequence
  derived and/or modified sequence
atgcaaacgctgggctcattctttggatcactgcccggcttctctagcgcgaggaacctggtcgctaatgcacacagcagtgcgagggcccggccagctgctgaccccacaggagcaccagcggctgaggcagctcagccccaggcacaggtggccgctcaccccgagcagaccgcaccttggaccgaaaaggagttgcagccatctgagaagcagatggtgtctggggctaaggacctagtgtgttccaagatgtcacgcgctaaggacgccgtttcctccggagtggcaagcgtggtggacgtggccaagggggtggtccaaggcggtctcgacaccactcggtccgccctaaccggcaccaaggaagtcgtttccagtggggttaccggcgcaatggacatggctaagggagccgtgcaaggtgggctagacacctctaaggcggtcctgactggaactaaagataccgtgtccaccgggctgacgggagcagttaacgttgccaaggggactgtacaggctggagtcgataccaccaagaccgtgctgaccggtaccaaggacacagtgacgactggggtcatgggcgcagtcaacctcgcaaaggggaccgtgcagactggcgtggagacatcaaaagctgttctgacaggcacaaaagatgccgtttcaactggcctcaccggggctgtcaatgtggcgcggggcagtatccagacaggcgtcgacaccagcaaaactgtcctcacaggcacgaaggatactgtctgctcaggcgtcacaggtgcaatgaatgtagccaagggcacaattcagacgggggtggacacctctaagactgtgctgaccggtacaaaggacacagtgtgcagtggcgttaccggcgccatgaacgtggctaaagggacaatccagaccggggtcgacacatcgaaaacagtgctcaccggcactaaagacactgtatgcagtggcgtaaccggcgcgatgaatgttgctaaagggaccatccaaactggggtcgatacaactaagaccgtcctgacaggaactaaaaacacggtttgcagtggggttacaggtgctgttaatctggccaaggaagctattcaaggcgggctggacacgactaaaagtatggtgatgggcaccaaggacaccatgtccacaggcctcaccggcgccgctaatgtagctaagggtgctatgcaaaccgggctgaacacaacgcagaacatagccaccggtaccaaagacaccgtttgcagcggtgtaaccggagccatgaatcttgcaagaggtaccatccagacaggagtggacactacaaaaatcgtgctcaccggcaccaaggatactgtttgcagtggggtaactggcgcagccaacgtggccaaaggcgccgtccagggaggtctggatactacaaagtctgttttaacagggactaaggacgccgtctctacgggcttgaccggggccgtgaatgtcgccaagggtactgtccaaaccggcgtggacacgacgaagaccgtgctgaccgggacaaaagatacagtttgctcaggggtgaccagcgcagtgaacgtggcgaagggggctgtccaggggggtttggatactaccaaaagtgtggtgatcggcaccaaagatacaatgtcgaccggcttaacgggtgccgccaacgttgctaagggggccgtccagacaggcgttgatactgcaaagacagtcctgacagggactaaggacacagtgaccaccgggcttgtaggggctgtgaacgtggctaagggaacagtgcaaacaggcatggataccactaaaactgtgctgacagggactaaggacaccatttattccggcgttacttccgctgtcaatgtggccaagggcgccgtccaaactggcctgaaaaccacccaaaatatcgctacgggtacgaagaacactttcggttccggtgtaacatctgctgttaacgtggctaagggagctgctcagactggagtggatacagcaaagactgtgctaacagggactaaagacaccgtgaccacggggctaatgggggccgtgaacgtcgccaaaggaaccgtgcaaaccagtgtggacaccaccaagaccgtcctcaccgggacgaaggacacagtctgcagtggggtcacaggagccgctaatgtcgccaagggagccattcagggaggcctcgatacaacgaaaagtgtcctgaccgggactaaggacgctgtttcaacaggactgaccggggcagtgaaactggcaaaaggtactgtacagacaggaatggacaccacaaaaaccgttcttacaggtacgaaagatgctgtttgttcgggcgtgacaggcgccgctaacgtggccaagggggccgttcagatgggagttgacacagccaagactgtactaaccggcacaaaagacaccgtgtgttcaggagtcactggcgcggctaatgtggccaagggggcagtccagactggactcaagacgacacagaacatcgcgactggtaccaagaacaccttgggctccggagtcactggagccgcaaaagtagccaagggagccgtgcaggggggcctggacacaactaagtctgtgcttacaggcaccaaagatgccgtaagtacaggattaactggcgcagtgaacctagccaaaggtaccgtgcagactggggttgacacttccaaaactgtgctgactgggacaaaggacacggtatgctcaggcgtcaccggtgccgtcaacgtagccaaaggaacagttcagactggtgtggatactgccaagactgtcctttctggtgctaaagacgcagttactacaggcgtgactggcgccgttaatgttgccaaaggaacggttcagacaggcgtagatgcctcaaaagcggtcctcatgggcactaaggatacagttttttctggcgtgacgggcgctatgtccatggctaaaggtgcagtacagggagggctcgatacaacaaagaccgttctgactgggaccaaggatgcagtgagtgccggcctgatggggagcggcaacgtcgccaccggcgctacccacaccggactttcgacttttcagaactggcttccctctacacctgcaactagctggggcggcctaaccagctctcgcaccaccgataatggcggcgaacagacagctctgagcccccaggaagcaccatttagtggcatctctaccccgccagatgtcctcagtgtgggtccggagccggcttgggaagccgcggctacgacgaagggactggccactgacgtggccacttttacacagggggccgcgccagggagagaagacacggggctgctcgccaccacgcacggtcctgaagaggctccccgcttggctatgctgcagaatgagcttgaaggactgggtgacatctttcatccgatgaatgccgaggaacaggctcaacttgctgcctcacagcccggccccaaagttctcagcgccgaacagggctcatatttcgtacggttgggggatcttggacctagttttagacaacgggcatttgaacacgccgtcagccatctccagcatggccagttccaagctcgagatactcttgcccaactgcaggactgttttcggctgatcgagaaagcccaacaggcccccgaggggcagccaagactggatcaagggagtggcgcctcagccgaggacgccgccgtgcaggaagagagagatgcaggtgtgctgagcagggtgtgcggactactgaggcagctgcataccgcatactccgggctggtaagtagcttgcagggactgcccgcggaactgcagcagcctgtcggacgcgctagacacagcttgtgcgagctctacggaatcgttgcctctgcggggtccgtagaggagcttcccgctgagagacttgtccagagcagagagggggtgcaccaagcttggcaggggctcgagcagctgctagaagggttgcaacacaatcccccgctaagttggctggtaggaccgttcgctctgcctgccggcggtcagtag

SEQ ID NO: 36210 - DNA, 4074 bp, Artificial Sequence
  derived and/or modified sequence
atgcagaccctgggcagcttcttcggcagcctgcccggcttcagcagcgccaggaacctggtggccaatgcccacagcagcgcccgggcccggcctgctgctgaccccactggagccccagctgctgaggccgcccagccccaggcccaggtggccgcccaccctgagcagacagccccctggacagagaaggagctgcagcccagcgagaagcagatggtgtctggggccaaggacctggtgtgcagcaagatgagccgggccaaggatgctgtgagcagcggcgtggcctctgtggtggatgtggccaagggcgtggtgcagggcggcctggacaccaccaggtctgccctgaccggcaccaaggaggtggtgtcctctggagtgactggagccatggacatggccaagggagctgtgcagggcggcctggacaccagcaaggctgtgctgaccggcaccaaggacacagtgtccacaggcctgactggagctgtgaatgtggccaagggcaccgtgcaggccggcgtggacaccaccaagacagtgctgaccggcaccaaggacacagtgaccactggagtgatgggcgctgtgaacctggccaagggcaccgtgcagacaggagtggagaccagcaaggctgtgctgaccggcaccaaggatgctgtgtccacaggcctgactggagctgtgaatgtggcccggggcagcatccagacaggagtggacaccagcaagacagtgctgaccggcaccaaggacacagtgtgcagcggcgtgactggagccatgaatgtggccaagggcaccatccagacaggagtggacaccagcaagacagtgctgaccggcaccaaggacacagtgtgcagcggcgtgactggagccatgaatgtggccaagggcaccatccagacaggagtggacaccagcaagacagtgctgaccggcaccaaggacacagtgtgcagcggcgtgactggagccatgaatgtggccaagggcaccatccagacaggagtggacaccaccaagacagtgctgaccggcaccaagaacacagtgtgcagcggcgtgactggagctgtgaacctggccaaggaggccatccagggcggcctggacaccaccaagtccatggtgatgggcaccaaggacaccatgagcacaggcctgaccggggccgccaacgtggccaagggggccatgcagacaggcctgaacaccacccagaacatcgccaccggcaccaaggacacagtgtgcagcggcgtgactggagccatgaacctggcccggggcaccatccagacaggagtggacaccaccaagatcgtgctgaccggcaccaaggacacagtgtgcagcggcgtgactggagctgccaacgtggccaagggagctgtgcagggcggcctggacaccaccaagtctgtgctgaccggcaccaaggatgctgtgtccacaggcctgactggagctgtgaatgtggccaagggcaccgtgcagacaggagtggacaccaccaagacagtgctgaccggcaccaaggacacagtgtgcagcggcgtgaccagcgctgtgaatgtggccaagggagctgtgcagggcggcctggacaccaccaagtctgtggtgattggcaccaaggacaccatgagcacaggcctgactggagctgccaacgtggccaagggagctgtgcagacaggagtggacacagccaagacagtgctgaccggcaccaaggacacagtgaccaccggcctggtgggcgctgtgaatgtggccaagggcaccgtgcagacaggcatggacaccaccaagacagtgctgaccggcaccaaggacaccatctacagcggcgtgaccagcgctgtgaatgtggccaagggagctgtgcagacaggcctgaagaccacccagaacatcgccaccggcaccaagaacacctttggaagtggagtgaccagcgctgtgaatgtggccaagggagctgcccagacaggagtggacacagccaagacagtgctgaccggcaccaaggacacagtgaccaccggcctgatgggcgctgtgaatgtggccaagggcaccgtgcagacctctgtggacaccaccaagacagtgctgaccggcaccaaggacacagtgtgcagcggcgtgactggagctgccaacgtggccaagggggccatccagggcggcctggacaccaccaagtctgtgctgaccggcaccaaggatgctgtgtccacaggcctgactggagctgtgaagctggccaagggcaccgtgcagacaggcatggacaccaccaagacagtgctgaccggcaccaaggatgctgtgtgcagcggcgtgactggagctgccaacgtggccaagggagctgtgcagatgggcgtggacacagccaagacagtgctgaccggcaccaaggacacagtgtgcagcggcgtgactggagctgccaacgtggccaagggagctgtgcagacaggcctgaagaccacccagaacatcgccaccggcaccaagaacaccctgggcagcggcgtgactggagctgccaaggtggccaagggagctgtgcagggcggcctggacaccaccaagtctgtgctgaccggcaccaaggatgctgtgtccacaggcctgactggagctgtgaacctggccaagggcaccgtgcagacaggagtggacaccagcaagacagtgctgaccggcaccaaggacacagtgtgcagcggcgtgactggagctgtgaatgtggccaagggcaccgtgcagacaggagtggacacagccaagacagtgctgagcggggccaaggatgctgtgaccaccggggtgactggagctgtgaatgtggccaagggcaccgtgcagacaggagtggatgccagcaaggctgtgctgatgggcaccaaggacaccgtcttctctggagtgactggagccatgtccatggccaagggagctgtgcagggcggcctggacaccaccaagacagtgctgaccggcaccaaggatgctgtgtctgctggcctgatgggcagcggaaatgtggccaccggggccacccacacaggcctgagcaccttccagaactggctgcccagcaccccagccacctcctggggcggcctgaccagcagcaggaccacagacaatggaggagagcagacagccctgagcccccaggaggcccccttcagcggcatcagcaccccaccagatgtgctgtctgtgggccctgagcccgcctgggaggccgccgccaccaccaagggcctggccacagatgtggccaccttcacccagggcgccgcccctggccgggaggacaccggcctgctggccaccacccacggccctgaggaggccccccggctggccatgctgcagaatgagctggagggcctgggggacatcttccaccccatgaatgctgaggagcaggcccagctggccgccagccagcccggccccaaggtgctgtctgctgagcagggcagctactttgtgcggctgggggacctgggccccagcttccggcagagggcctttgaacatgctgtgagccacctgcagcacggccagttccaggcccgggacaccctggcccagctgcaggactgcttccggctgattgagaaggcccagcaggcccctgagggccagccccggctggaccagggcagcggggccagcgcagaagatgctgctgtgcaggaggagagagatgctggggtgctgagccgggtgtgtggcctgctgcggcagctgcacacagcctacagcggcctggtgagcagcctgcagggcctgcctgctgagctgcagcagcctgtgggccgggcccggcacagcctgtgtgagctgtatggaattgtggccagcgctggctctgtggaggagctgcctgctgagcggctggtgcagagccgggagggcgtgcaccaggcctggcagggcctggagcagctgctggagggcctgcagcacaacccccccctgtcctggctggtgggcccctttgccctgcctgctgggggccagtag

SEQ ID NO: 36211 - DNA, 4074 bp, Artificial Sequence
  derived and/or modified sequence
atgcagaccctgggcagcttcttcggcagcctgcccggcttcagctcggccagaaacctggtggcgaacgcacactcatcagcccgcgccagacccgctgctgaccctactggcgctcctgctgctgaagctgcacaaccacaagcccaggtggcagcgcaccccgagcaaacggcaccctggacagaaaaggagttgcagcctagcgaaaagcagatggtgtccggagcgaaggaccttgtgtgctcgaaaatgagccgggccaaggatgctgtatcttcgggagtagccagcgtggttgacgtggccaagggcgtggtccaggggggcctggatacaacccgctccgcactaacagggactaaagaagtggtctcttcaggcgtgaccggtgccatggacatggcgaaaggggctgtgcagggaggactggacacatcaaaggccgtgctaacgggcacaaaagacacggtcagtactggactcaccggcgcggtgaacgtggcgaaaggcacagtgcaggcaggagtggatacaacgaaaacagtgctgacgggaaccaaggataccgtcaccacaggcgtgatgggtgccgttaacctcgccaaaggaaccgtacagactggtgtcgagacttccaaggcggtcttaacaggaaccaaagatgctgtgagcactggactcacgggagctgttaacgtcgcacgggggtcaatacagacaggcgtggataccagcaagacggtcctgacagggactaaagacaccgtttgctcaggagtgacaggcgccatgaacgtggctaagggcaccatacaaacaggggtggatacatctaagactgtcttgactggcacgaaggatactgtatgcagcggcgtcactggagcaatgaatgtcgcaaagggtacaatccagaccggggtcgacacatcaaagacagtgttgacaggaacaaaagatactgtatgctccggcgtgacaggggccatgaacgtcgcgaaaggcactatccagacaggtgtcgacaccacgaaaaccgttctcactggaacgaagaatacggtctgcagtggcgtcacgggagccgtcaacttagctaaggaggccatccagggaggcttggataccacaaagtctatggtgatgggaacaaaggatacaatgtcaacagggctgactggcgccgccaacgtggccaagggagcaatgcagacagggttaaatactacccagaacatagctaccggaactaaggacactgtgtgttcaggagtgacaggcgctatgaatcttgctcgcgggacgatacaaacaggcgtggacactactaaaatcgtcctaacgggtaccaaggacactgtgtgctctggcgttaccggagccgcgaatgtggccaaaggtgcggttcaaggcggcttggatacaaccaaatcggtcttgaccggtactaaggacgccgtctcaacaggtctcactggggcagttaacgtcgcaaagggcactgtgcagactggggtggacactaccaaaactgttctgacgggcacaaaagacactgtctgctctggtgtgacctcagccgtaaatgttgccaagggggctgtccagggcggcctcgacaccaccaagtccgtcgttattggcactaaagataccatgagcactgggctgacaggggccgctaacgtggctaagggagcggtgcagactggcgtggatactgcaaagaccgtcctcacaggcacgaaagacacggtgaccacgggcctagtcggggccgtcaacgtcgctaagggaactgtacaaacggggatggatacaactaaaacagttttgaccggaacaaaagataccatatattcgggagtcacgtcagcggtcaatgtagccaaaggtgcagtacagaccggtctaaaaaccacccaaaatattgctactggcacgaagaacacctttggcagcggtgtcacctctgccgtgaatgtcgccaagggtgccgctcagacgggtgtagacactgcaaagaccgttctgacagggacaaaggacactgtgaccacaggacttatgggggcggtgaatgtcgcgaaagggactgtgcagacctccgtggacactacaaaaactgtgctcacagggacgaaggacactgtatgcagcggtgttacaggggctgcaaacgtagccaaaggcgccatccagggtggcctggacactaccaaatctgtcctcacgggcaccaaggatgcggtgtccactggtctgactggcgccgtaaagctcgccaaagggacagtgcagacaggtatggacaccaccaaaacagtactcaccggcacaaaagatgcggtttgtagtggggttactggggctgcaaacgtggcaaagggggccgttcagatgggggtagatactgccaaaacggtgctcactggcacgaaggacactgtttgttccggagtcacaggcgccgccaatgtggcgaaaggagcagtgcaaaccgggctcaagacaactcaaaatattgcaaccggaacaaaaaacacgctgggaagcggtgtcacaggggccgcaaaagtggcaaaaggggcggtacagggcggcctggacaccacaaagtccgtcttgacagggaccaaagatgctgtgtctacgggcctgacaggcgcagtgaatctagctaaggggaccgtgcaaactggtgttgatactagtaaaaccgtactgaccggaactaaggacactgtttgctctggtgttactggagctgtgaatgtggcaaagggcactgtgcagacaggtgtggacactgctaaaacagtcctctcgggagctaaggacgcagttaccacgggagtgacgggcgctgtcaatgtggccaaggggacagtccagactggagtggacgcctccaaagcggtgctaatgggcacaaaagacactgtgttttccggtgttactggagccatgtcgatggctaagggcgcagtgcaaggcggtctcgacacaaccaaaaccgtgcttaccggtacaaaggatgctgtgagcgccggtcttatgggttctgggaacgtggcaacaggcgccacccacacaggtctgagcacatttcagaattggctgcccagcaccccagccacctcctgggggggcctcaccagctctcgtacgactgacaatgggggagaacagacagccctgagtcctcaggaagcgcctttctccggcatttcgacaccgcctgatgttttgagtgttgggcccgaacctgcctgggaggctgcagctaccacaaaggggctcgccacagatgtggccacattcacccagggtgccgcaccggggcgcgaagatacgggactcctggctacaactcacggaccagaggaggcacccaggttagcaatgcttcagaacgaactcgagggactcggagacatcttccaccctatgaatgctgaggagcaagctcaactagcagcctctcaaccagggccaaaggttttgtccgccgagcagggcagctattttgtcaggctaggcgacctgggcccatcctttaggcaacgtgccttcgaacacgccgtgagccatctgcagcacggccaatttcaggccagagataccctcgctcagctccaagactgcttcagactgatagagaaggcacagcaggcccccgaagggcagcctaggctggatcagggaagcggtgcctctgctgaagatgctgctgttcaggaagagcgggacgccggtgtgctgagtcgcgtgtgcggacttctccgtcaactacatacagcttattcaggcctggtgtcaagtctgcagggcctccctgccgaactgcagcaacccgtaggccgggctcgccactccctttgtgagttgtacggtatcgtggcctctgccggaagcgtggaagagctgccagccgagcgacttgtccagtcacgtgagggggtccatcaagcttggcagggtctcgagcagttgcttgaggggctgcagcacaatccacccctctcctggctggtgggcccctttgccctgcctgctggtggtcagtag

SEQ ID NO: 36212 - DNA, 6341 bp, Artificial Sequence
  derived and/or modified sequence
atgcagaccctgggcagcttctttgggtccctgcctggcttcagctctgcccggaacctggtggccaacgcacatagctcggcgagagcccggccggccgctgaccccacaggagcgcctgctgccgaggctgcccaaccacaggctcaggtggctgcccacccagagcagacggccccatggacggagaaggagctgcaaccttcggaaaagcagatggtgtccggggccaaagacctggtgtgttccaagatgtccagggccaaggatgccgtgtcctccggggtggccagcgtggtggacgtggctaagggagtggtccagggaggcctggacaccactcggtctgcacttacgggcaccaaggaggtggtgtccagcggggtcacaggggccatggacatggctaagggggccgtccaagggggtctggacacctcgaaggctgtcctcaccggcaccaaggacacggtgtccactgggctcacgggggcagtgaatgtggccaaagggaccgtacaggccggtgtggacaccaccaagactgtgctgaccggcaccaaagacacagtgactactggggtcatgggggcagtgaacttggccaaagggactgtccagactggcgtggaaacctccaaggctgtgctgaccggcaccaaagatgctgtgtccactgggctcacaggggcagtgaatgtggccagaggaagcattcagaccggtgtggacaccagtaagactgtcctaacaggtaccaaggacaccgtctgtagtggggtgactggtgccatgaatgtggccaaaggaaccatccagaccggcgtggacaccagtaagactgtcctaacaggtaccaaggacaccgtctgtagtggggtgactggtgccatgaatgtggccaaaggaaccatccagaccggcgtggacaccagtaagactgtcctaacaggtaccaaggacaccgtctgtagtggggtgactggtgccatgaatgtggccaaaggaaccatccagaccggcgtggacaccaccaagactgtcctaactggcaccaagaacactgtctgcagtggggtgaccggtgccgtgaacttggccaaagaggccatccaggggggcctggataccaccaagtctatggtcatgggtacgaaagacacgatgtccactgggctcacaggggcagcgaatgtggccaagggggccatgcaaactgggctgaacacaacccaaaatatcgcaacaggtacaaaggacaccgtctgcagtggggtgactggtgccatgaatttggccagaggaaccatccagacaggcgtggacaccaccaagatcgttctaactggtaccaaggacactgtctgcagtggggtcaccggtgctgcgaatgtggccaaaggggccgtccagggcggcctggacactacaaagtctgtcctgactggcactaaagatgctgtgtccactgggctcacaggggctgtgaacgtggccaaagggaccgtccagaccggcgtagacaccaccaagactgtcctaaccggcaccaaggacaccgtctgcagtggggtgaccagtgctgtgaacgtggccaaaggggccgtccaggggggcctggacaccaccaagtctgtggtcataggtacaaaagacacgatgtccactgggctcacgggggcagcgaatgtggccaagggggctgtccagacaggtgtagacacagccaagaccgtgctgaccggcaccaaggacacagtgactactgggctcgtgggggcagtgaatgtcgccaaagggaccgtccagacaggcatggacaccaccaaaactgtcctaaccggtaccaaggacaccatctacagtggggtcaccagtgccgtgaacgtggccaagggggctgtgcaaactgggctgaaaacgacccaaaatatcgcgacaggtacaaagaacacctttggcagtggggtgaccagtgctgtgaatgtggccaaaggggctgcccagacaggtgtagacacggccaagaccgtgctgaccggcaccaaggacacagtcactactgggctcatgggggcagtgaatgtcgccaaagggactgtccagaccagtgtggacaccaccaagactgtcctaactggtaccaaggacaccgtctgcagtggggtgaccggtgctgcgaatgtggccaaaggggccatccaagggggcctggacactacaaagtctgtcctgactggcactaaagatgctgtgtccactgggctcacaggggctgtgaagttggccaaagggactgtccagaccggcatggacaccaccaagactgtgttaactggtaccaaggatgctgtgtgcagtggggtgaccggtgctgcgaatgtggccaagggggccgtccagatgggtgtagacacggccaagaccgtgctgaccggtaccaaggacactgtctgcagtggggtcaccggtgctgcgaacgtggccaagggtgctgtgcaaactgggctgaaaacgacccaaaatatcgcaacaggtacaaagaacacccttggcagtggggtgaccggtgctgcgaaagtggccaaaggggccgtccaggggggcctggacactacaaagtctgtcctgactggcactaaagatgccgtgtccactgggctcacaggggctgtgaacttggccaaagggactgtccagaccggcgtggacaccagcaagactgtcctgaccggtaccaaggacaccgtctgcagtggagtcactggtgccgtaaatgtggccaaagggaccgtccagacaggtgtggacacagccaagacggtgctgagtggcgctaaggatgcagtgactactggagtcacgggggcagtgaatgtggccaaaggaaccgtgcagaccggcgtggacgcctccaaggctgtgcttatgggtaccaaggacactgtcttcagtggggttaccggtgccatgagcatggccaaaggggccgtccaggggggcctggacaccaccaagacagtgctgaccggaaccaaagacgcagtgtccgctgggctcatggggtcagggaacgtggcgacaggggccacccacactggcctcagcaccttccagaactggttacctagtacccccgccacctcctggggtggactcaccagttccaggaccacagacaatggtggggagcagactgccctgagcccccaagaggccccgttctctggcatctccacgcccccggatgtgctcagtgtaggcccggagcctgcctgggaagccgcagccactaccaagggccttgcgactgacgtggcgacgttcacccaaggggccgccccaggcagggaggacacggggcttttggccaccacacacggccccgaagaagccccacgcttggcaatgctgcagaatgagttggaggggctgggggacatcttccaccccatgaatgcggaggagcaagctcagctggctgcctcccagcctgggccaaaggtgctgtcggcggaacaggggagctacttcgttcgtttaggtgacctgggtcccagcttccgccagcgggcatttgaacacgcggtgagccacctgcagcacggccagttccaagccagggacactctggcccagctccaggactgcttcaggctgattgaaaaggcccagcaggctccagaagggcagccacgtctggaccagggctcaggtgccagtgcggaggacgctgctgtccaggaggagcgggatgccggggttctgtccagggtctgcggccttctccggcagctgcacacggcctacagtggcctggtctccagcctccagggcctgcccgccgagctccagcagccagtggggcgggcgcggcacagcctctgtgagctctatggcatcgtggcctcagctggctctgtagaggagctgcccgcagagcggctggtgcagagccgcgagggtgtgcaccaggcttggcaggggttagagcagctgctggagggcctacagcacaatcccccgctcagctggctggtagggcccttcgccttgcccgctggcgggcagtagctgtaggagcctgcaggcccggcgcggggtcgccctgctctgtccagggaggagctgcctcagaactttctccccgcccccaaacctggatcggttccctaaagccctagacctttggggctgcagctggctgagcgccgaggggctgcggaggcagtgaccttcttaactgagccaccccacgccctgctccgggcctgcctgcatctcccacctcctccccagcgctgcctgcccctctcggagcctggggtcactcagaccaccagccaagagccttcccttgaagtccccaagcaagcactgcaattaggaaagagaaaaagcagcgtgcccagcctggaagggcatctgtttgccccgctagcaacccttttatatctagcagggctcttccagtcctgcagcacgggcccccagctatcagcggtgcaggcagtgctgtggcatcccaggctccgggcagctccgttctcatgctgaaagtgggtctccggccttagcacacacaccttgagggtcttaagaaccacattccctcatagtagaaagtactagaaaaagcgacactgccatcatcatcccaaggcaggctgctactgcctttgctgacccccggggtggcctcacggtggggacaaagctgccaggagccacagcagccacagctggggctttgcaccagcctggcttgagactgagcagtttgcagggggtggggggtgcaaaaaacaagcaaacaggctgctgctgcctccagctgcccaccacaggcctgccccaggcacctggggctctgaggcccctggggaggctgggcccagcagctgcccctggagaacacagacaaaggacttccccgcagggaactgtgccctatggagggatcagacagggctgggaacagccacagaggctgcgtgcctatggcacagcccttcctccgccgcacactccccctgggtcctcaggcccacccaagcgccgggctgcagaggaagcggggctggggaggctgcaggcatcagagacactggtggtggcggacccggccgccgggccccgtgctctcaggctagcccaggtcgtggaggctggcaggctcaggtcgggtgtgagacgtgccgtggctgcgctcagtccagcggggaggagccgttcagcccggcctccccaggaagccatatccccactcacccggtaagagaaccttgtcgtcccctttccatgctctcctaggacacgagcccaggaaccccagacccagggggaggaagggtggaggggccccaggggtcaccgtgtgcaccaggggccgtgaggggccggggcattcagctcagctctgaaccggggaagctggcacggcaaggactgcctcaggtgacgggccgtgagaggggacgggtcaggagccttcccaagccttctcctcagcccgacacccatggccatcggaggctaggatgccagacacagccatttgcagaaatcaggcacagtgactgcagctcacgtccagccaaccaagcatggggccgcagctcaggaagtcccttcccgccacaccacagcctaattcttactgggacggaggcaactcggctacgctgggcaggacgacaaacacgagacgccactgtggaatgagcaacttcggagcacggggtgacttgcttgggaccgtgcccacgtgacagccccttatgcagaggaggaaagagaagccccgagtgggaggggaacctgtccaaagtcacacggtgtgtgggtgacacagctggggtgagtcgaggctggcccctgaggcccatgctccctgaacgctggagaccactgtcggctagcagcggctctcagggaaggcctggtctccaccctcccagcctagcctcgcggaccctcgtcctccccacatcggacctgctcacctgcctggaccctgggctgccagatgcaggaagcatcaaaccccccagcctcgtgggtgcggggcagggcgcaggcagcacagcttagatgccctggtttgtccctcttgtctcctgggaagagcttgctcccgcccagctctcctgccactggcctttcagggttgggctgggcccagagtgccttttagtcgcttctcacggtggcctgatggctcaacccagtcccaaacgggcccagtgacactgccgcctgcgccccagctcaggcccccactgcaccagcaatgctagaaaaccaagccaataaaagtgatttcttttttcattaaaaaa

SEQ ID NO: 36213 - DNA, 4074 bp, Artificial Sequence
  derived and/or modified sequence
atgcagacactgggcagctttttcggcagtctgcctggctttagcagtgccagaaacctcgtagcaaacgcacactcatctgccagggccaggcccgcagcagatcctactggcgcaccggctgcagaggccgctcagccacaggcccaggttgcagcccatcccgaacagacagccccatggactgagaaggaacttcagcccagtgagaaacaaatggtgagcggggctaaggacctggtgtgctcaaagatgtctcgggctaaagatgctgtctcctctggcgttgctagcgtcgtggatgtggctaaaggggtcgtgcagggcggactggatactaccagaagcgcacttaccggtactaaggaagtggtgtctagcggagttactggggcaatggacatggctaaaggggcagtgcagggcggactcgatacatcgaaggccgtgcttacagggacgaaggacactgtaagcacaggtttgactggggctgttaatgtggcaaagggaaccgtacaggccggagttgatacgacgaagactgtgctcactggtacgaaggataccgttactacaggagtcatgggagcagtaaatctggccaagggcaccgttcagactggtgtggagaccagcaaagccgtgcttactggcaccaaggatgctgtgtcaaccggattgacgggagccgtgaatgtcgcgagaggctccatccagactggggtggacacctccaaaactgttctgacaggaacaaaggatacagtgtgttctggtgtcacgggggctatgaacgtggccaaaggcactatccagacgggagtcgacacttcaaagacggtgttaactgggaccaaggacaccgtgtgctctggtgtgacgggcgcaatgaacgtcgcaaaggggacaatacagaccggagttgatactagtaaaaccgtgttgaccgggaccaaggacaccgtgtgctctggagtgacgggcgcaatgaacgtggctaaaggaacaattcagaccggagtcgataccactaaaactgtgctcacaggcacgaagaacacggtctgtagtggtgtgacgggcgctgtcaacctggccaaggaggcgattcagggcggattagacacaaccaagtcaatggttatggggacgaaggacaccatgagtaccggacttacaggcgctgctaatgttgcgaaaggggcaatgcagactggactcaatacaacccaaaacatcgcgacgggcaccaaggatacggtctgtagtggagtgacaggagcgatgaacctggctagagggacaatacaaaccggtgtcgacaccaccaaaattgtcctgacagggacaaaagataccgtttgcagtggcgttacaggagccgctaatgtggctaaaggcgcagtgcagggtggactggatacaacaaagtcagtgttgactggtactaaagacgcggtgagtaccgggcttaccggtgcggtcaacgtggctaaaggcaccgtccagaccggggttgacacaaccaaaaccgttctgaccggcactaaagatactgtgtgttcaggagtcacatccgccgtgaacgtagctaagggtgccgtgcagggtgggctggataccacgaaatcagtcgtgatcggcaccaaagacactatgagtacggggctgacgggcgcagcgaacgtagccaagggagccgtacagacgggcgttgataccgcaaaaaccgtcctgacgggcacaaaggataccgttaccaccggtcttgtgggagccgtgaacgtcgcgaagggcaccgtgcagacgggcatggatacaactaagaccgtcctcacagggaccaaggacaccatatatagtggagtcaccagcgccgtgaacgtggccaaaggtgccgtgcaaacaggtttaaagaccacccaaaatattgccactggaacaaagaacacctttggatctggcgtgacgtctgccgtgaacgtggccaaaggcgcagcccagactggcgttgatacagcaaagaccgtgctcacagggactaaggacacagttacgactgggttaatgggtgcagttaatgtggcgaaggggaccgttcagacttctgtggacacaactaaaaccgtgctgactggcacaaaggacacagtctgttctggcgtgaccggggctgcaaatgtggcaaaaggggcaatccaaggtggcctggacacgactaagagcgtgctgaccggcacgaaagatgcagtctctaccggcctaacaggagctgtaaagctcgctaaaggaaccgtccaaacaggaatggacaccacaaagactgtcctcacgggcactaaagatgctgtgtgcagcggggttacgggcgcagctaacgtcgctaaaggcgctgtgcagatgggcgtggatacagcaaaaacggtgctcacaggtaccaaagatacggtgtgctccggggtgacaggcgctgccaatgtggcgaagggcgctgtgcagacagggctgaagaccactcagaacatcgctacagggactaaaaataccctcggttcaggcgtgacaggagctgctaaggtggccaagggggcagtgcagggcggattggacaccactaagagtgtgctgacaggtactaaagatgcagtgtcaaccggcctcacaggcgctgtcaacttagccaaggggacagttcaaactggcgtcgacactagcaagaccgtgttgacggggactaaagacacagtgtgttcaggggtgaccggagccgtcaatgtggcgaaaggaactgtacaaacaggggtggacacagccaaaaccgttttatccggcgctaaagatgctgttaccaccggggtgaccggagctgtgaacgtggccaagggcacggtccagaccggcgtagatgcatcaaaagctgtgctcatgggcactaaagacactgtgttcagcggggtgaccggagctatgagtatggcgaagggggctgtccaaggaggcttagacacaacgaaaaccgtacttacaggcactaaagacgcagtgagcgcaggcctcatgggatccgggaatgtcgctacgggcgcaactcacacaggactgtccacctttcaaaattggcttccatcaacaccggcaactagctgggggggactgacgtcgtcccgtactacagataatggcggagagcagactgctctctcaccccaagaggcacccttcagcgggatttccaccccgccagacgttctgagcgtgggtcccgaaccggcttgggaggctgcagccacaaccaagggtctagccacagatgtggcgacgtttactcagggtgctgccccaggcagggaggatactgggctcctggcaactacacacgggccagaagaggcaccgaggctggcgatgctccagaatgaactcgaaggcctcggggacatctttcatcctatgaatgctgaggagcaggctcagctggccgcatcacagcccggacccaaggtcctgagcgctgaacagggctcctacttcgtgcggttaggcgaccttggcccaagctttcgccagagggcctttgaacacgctgtgtcacacctccagcacggccagttccaggccagagatacgctcgcccagctccaggattgcttcagattaatcgagaaggcccaacaagccccagagggccaacctagactggatcagggctccggtgcttcggccgaagatgccgctgtgcaggaggagcgtgatgccggagtgttgagtagggtgtgcggattgctgaggcagctccatacggcgtattcagggctggtgagttcacttcagggtctgcccgctgaattgcagcagccggtcggtcgcgctcgccactcactgtgtgagctttacgggatcgttgccagcgccggaagcgttgaagagctacctgccgaaaggctggtgcagtctcgagagggggtgcatcaagcctggcagggtctggagcagctgctggagggcctgcaacacaatcctcccctgtcctggctcgtagggccattcgcactgccagccggaggccagtag

SEQ ID NO: 36214 - DNA, 2280 bp, Artificial Sequence
  derived and/or modified sequence
gtccatcggggagggcgaaggccctgctctcctcggttcccggctccaggcggcgagctgaggttgggagcctggctttcccctccgagagggttcaggtgcctctgccatagcttctgtcgcctgtgctgtgacccgcactggtcgtgggagtcacctgaaaggcaagaaatgatgtttcaggattcagtggcctttgaggatgtggctgtgaccttcacccaagaggagtgggctttgctggatccttcccagaaaaatctctgtagagatgtgatgcaagaaaccttcaggaacctggcctctatagggaaaaaatggaaaccccagaacatatatgtagagtacgaaaatctaaggagaaacctaagaattgtgggagagagactctttgaaagtaaagaaggtcatcagcatggagaaattttgacccaggttccagatgacatgctgaagaaaacaactactggagtaaaatcatgcgaaagcagtgtgtatggagaagtaggcagtgctcattcatctcttaataggcacatcagagatgacactggacacaaggcatatgagtatcaagaatatggacagaaaccatataaatgtaaatactgtaaaaaacctttcaactgtctctcctctgttcagacacatgaaagggctcatagtggaaggaaactctatgtttgtgaggaatgcggaaaaacatttatttcccattcaaaccttcaaagacacaggataatgcaccgtggagatggaccttataagtgtaaattttgtgggaaagccttgatgtttctcagtttgtatcttatccacaaacgaactcacactggagagaaaccatatcaatgtaaacagtgtggtaaagcctttagtcattctagtagccttcgaatacatgaaagaactcacactggggagaagccttataaatgtaatgaatgtgggaaagcattccatagttccacatgccttcatgctcataaaagaactcacactggggagaagccatatgaatgtaaacagtgtgggaaagccttcagctcttcccattcctttcaaatacatgaaagaactcacacgggggagaagccatatgaatgtaaggaatgtggaaaagcattcaagtgtcccagttctgttcgcagacatgaaagaacccactctaggaaaaaaccctatgaatgtaaacattgtgggaaagtattatcttatcttaccagctttcaaaaccacttgggaatgcacactggagagatatctcataaatgtaagatatgtgggaaagccttttattctcccagttcacttcaaacacatgaaaaaactcacactggagagaaaccctataaatgcaaccaatgtggtaaagcctttaattcttccagttccttccgatatcatgaaagaactcacactggagagaaaccttacgagtgtaagcaatgtgggaaagccttcagatctgcctcactccttcaaacacatggtaggactcacacgggagagaaaccctatgcatgtaaggaatgtggaaaaccatttagtaatttctctttctttcaaatacatgaaaggatgcacagagaagagaagccgtatgaatgtaagggttatgggaaaacattcagtttgcccagtttatttcatagacatgaaaggactcacactggaggaaaaacctatgaatgcaagcagtgtggcagatccttcaactgttcgagctcctttcgatatcatggaaggactcacactggagagaaaccctatgaatgcaagcaatgtggaaaagccttcagatctgcctcacagcttcaaattcatggaaggactcacactggagagaaaccttatgaatgtaagcagtgtgggaaagcctttggatctgcctcacaccttcaaatgcatggaaggactcacactggagagaaaccctatgaatgtaagcagtgtgggaagtcttttggatgtgcctcgcgacttcaaatgcatggaaggactcacactggagagaaaccgtataaatgtaagcaatgtgggaaagcttttggatgtccctcaaaccttcgaaggcatggaaggactcacactggagagaaaccctataaatgtaaccaatgtggtaaagtctttagatgttcttcacaacttcaagtgcatggaagggctcactgcatagacaccccataaccccaggctttaggaggctgaggtggggggactgcttaagcccaggagttcaagaccagcctgggcaacatagtgagactctgttat

SEQ ID NO: 36215 - DNA, 2022 bp, Artificial Sequence
  derived and/or modified sequence
atgatgttccaggacagcgtggccttcgaggacgtggccgtgaccttcacccaggaggagtgggccctgctggaccccagccagaagaacctgtgcagagacgtgatgcaggagaccttcagaaacctggccagcatcggcaagaagtggaagccccagaacatctacgtggagtacgagaacctgagaagaaacctgagaatcgtgggcgagagactgttcgagagcaaggagggccaccagcacggcgagatcctgacccaggtgcccgacgacatgctgaagaagaccaccaccggcgtgaagagctgcgagagcagcgtgtacggcgaggtgggcagcgcccacagcagcctgaacagacacatcagagacgacaccggccacaaggcctacgagtaccaggagtacggccagaagccctacaagtgcaagtactgcaagaagcccttcaactgcctgagcagcgtgcagacccacgagagagcccacagcggcagaaagctgtacgtgtgcgaggagtgcggcaagaccttcatcagccacagcaacctgcagagacacagaatcatgcacagaggcgacggcccctacaagtgcaagttctgcggcaaggccctgatgttcctgagcctgtacctgatccacaagagaacccacaccggcgagaagccctaccagtgcaagcagtgcggcaaggccttcagccacagcagcagcctgagaatccacgagagaacccacaccggcgagaagccctacaagtgcaacgagtgcggcaaggccttccacagcagcacctgcctgcacgcccacaagagaacccacaccggcgagaagccctacgagtgcaagcagtgcggcaaggccttcagcagcagccacagcttccagatccacgagagaacccacaccggcgagaagccctacgagtgcaaggagtgcggcaaggccttcaagtgccccagcagcgtgagaagacacgagagaacccacagcagaaagaagccctacgagtgcaagcactgcggcaaggtgctgagctacctgaccagcttccagaaccacctgggcatgcacaccggcgagatcagccacaagtgcaagatctgcggcaaggccttctacagccccagcagcctgcagacccacgagaagacccacaccggcgagaagccctacaagtgcaaccagtgcggcaaggccttcaacagcagcagcagcttcagataccacgagagaacccacaccggcgagaagccctacgagtgcaagcagtgcggcaaggccttcagaagcgccagcctgctgcagacccacggcagaacccacaccggcgagaagccctacgcctgcaaggagtgcggcaagcccttcagcaacttcagcttcttccagatccacgagagaatgcacagagaggagaagccctacgagtgcaagggctacggcaagaccttcagcctgcccagcctgttccacagacacgagagaacccacaccggcggcaagacctacgagtgcaagcagtgcggcagaagcttcaactgcagcagcagcttcagataccacggcagaacccacaccggcgagaagccctacgagtgcaagcagtgcggcaaggccttcagaagcgccagccagctgcagatccacggcagaacccacaccggcgagaagccctacgagtgcaagcagtgcggcaaggccttcggcagcgccagccacctgcagatgcacggcagaacccacaccggcgagaagccctacgagtgcaagcagtgcggcaagagcttcggctgcgccagcagactgcagatgcacggcagaacccacaccggcgagaagccctacaagtgcaagcagtgcggcaaggccttcggctgccccagcaacctgagaagacacggcagaacccacaccggcgagaagccctacaagtgcaaccagtgcggcaaggtgttcagatgcagcagccagctgcaggtgcacggcagagcccactgcatcgacaccccctag

SEQ ID NO: 36216 - DNA, 2022 bp, Artificial Sequence
  derived and/or modified sequence
atgatgtttcaggactctgtagcttttgaagacgtggccgtgacatttacacaggaggagtgggccttgctggacccctcacagaagaacttgtgcagggacgtgatgcaggagacttttaggaacttagcctctattggaaaaaagtggaagccccagaacatctatgttgaatacgaaaatctgaggcggaatcttcggattgtgggagagcgcctctttgagtccaaggaagggcaccaacacggtgagatcctgactcaagtgcccgatgacatgttaaagaagacaacgaccggcgtcaagagttgcgaatccagtgtatacggtgaggttggctccgcccattcttcgctgaatcgacatattcgagatgacaccggtcacaaagcatacgaataccaggaatatggacagaaaccgtacaagtgtaaatattgtaaaaaaccatttaactgtttatcttctgtgcagacccatgagagagcacatagcgggaggaagctgtacgtatgtgaggagtgcggaaaaacttttatctcgcactctaacctgcagaggcaccggattatgcaccgaggcgatggtccttataagtgcaaattctgcggcaaagccttaatgttcttgtccctgtatcttattcataagaggactcatactggcgagaagccatatcagtgtaagcagtgcggcaaggccttttctcacagcagtagcttaagaatccacgaaaggactcataccggggagaagccctacaaatgtaacgaatgcggcaaggccttccacagtagcacatgtttacacgctcacaaacgaactcacaccggagaaaagccatacgaatgtaagcagtgtgggaaggcgttttcaagctcacactcatttcagatccatgagaggacacatacaggggagaagccctacgagtgcaaagaatgtggaaaggcatttaagtgtccttcatcagtgcggcgccacgaacgtacacactcgagaaagaagccttacgagtgtaagcactgcgggaaagttttatcctacctgaccagctttcagaatcacctgggcatgcataccggggagattagccacaagtgtaagatctgtgggaaggcgttctattcaccctcgagtcttcaaactcacgaaaagacacatacaggcgaaaagccgtacaagtgcaaccagtgtgggaaagccttcaattcatcaagcagctttagatatcacgagagaacacatacaggagagaagccgtatgaatgtaagcaatgcggaaaggccttcaggagtgctagcctgttgcagacacacggcagaacacacacaggtgagaagccatacgcttgcaaggagtgcgggaagcctttcagcaatttttctttttttcaaatacatgaacggatgcatagggaagagaagccttatgaatgtaaggggtatggaaaaaccttcagcctgccgtccttgtttcatagacatgagcgcacccacactgggggcaaaacctacgagtgtaagcagtgcggacgttctttcaattgcagctcatcattccggtaccacggacgcactcacacaggcgagaaaccctacgaatgtaagcagtgcgggaaggcttttagatctgcttcccaactgcaaatacatggtcgcacccacactggcgagaaaccctatgagtgcaaacaatgcggcaaggccttcggcagcgctagtcacctccagatgcacggccgcacacacactggggaaaaaccttatgaatgcaaacagtgcggaaaatccttcgggtgcgcgtctcgcttgcagatgcatgggaggacacacactggcgagaagccatacaagtgtaagcagtgtggcaaagctttcgggtgtccctctaacctgcgtcggcacggtcggacacatacaggagagaaaccgtataaatgcaaccagtgcggcaaagtgtttaggtgtagtagtcagctgcaagtccatggtcgggcgcactgcattgatactccctag

SEQ ID NO: 36217 - DNA, 2022 bp, Artificial Sequence
  derived and/or modified sequence
atgatgttccaggacagcgtggcctttgaagatgtggccgtgaccttcacccaggaggagtgggccctgctggaccccagccagaagaacctgtgcagagatgtgatgcaggagaccttcaggaacctggccagcatcggcaagaagtggaagccccagaacatctacgtggagtatgagaacctgcggaggaacctgcgcatcgtgggggagcggctgtttgagagcaaggagggccaccagcacggggagatcctgacccaggtgcctgatgacatgctgaagaagaccaccactggagtgaagagctgtgagagctctgtgtatggagaggtgggcagcgcccacagcagcctgaacagacacatcagagatgacaccggccacaaggcctatgagtaccaggagtatggccagaagccctacaagtgcaagtactgcaagaagcccttcaactgcctgagctctgtgcagacccatgagcgggcccacagcggcaggaagctgtatgtgtgtgaggagtgtgggaagaccttcatcagccacagcaacctgcagaggcaccgcatcatgcacagaggagatggcccctacaagtgcaagttctgtgggaaggccctgatgttcctgagcctgtacctgatccacaagaggacccacactggagagaagccctaccagtgcaagcagtgtgggaaggccttcagccacagcagcagcctgcgcatccacgagaggacccacactggagagaagccctacaagtgcaatgaatgtgggaaggccttccacagcagcacctgcctgcacgcccacaagaggacccacactggagagaagccctatgagtgcaagcagtgtgggaaggccttcagcagcagccacagcttccagatccacgagaggacccacactggagagaagccctatgagtgcaaggaatgtgggaaggccttcaagtgccccagctctgtgagaagacatgagaggacccacagcaggaagaagccctatgagtgcaagcactgcggcaaggtgctgagctacctgaccagcttccagaaccacctgggcatgcacactggagagatcagccacaagtgcaagatctgtgggaaggccttctacagccccagcagcctgcagacccatgagaagacccacactggagagaagccctacaagtgcaaccagtgtgggaaggccttcaacagcagcagcagcttccgctaccacgagaggacccacactggagagaagccctatgagtgcaagcagtgtgggaaggccttccgcagcgccagcctgctgcagacccacggccgcacccacactggagagaagccctatgcctgcaaggaatgtgggaagcccttcagcaacttctccttcttccagatccacgagaggatgcaccgggaggagaagccctatgaatgtaaaggctacggcaagaccttcagcctgcccagcctcttccacagacatgagaggacccacactggaggcaagacctatgagtgcaagcagtgtggccgctccttcaactgcagcagcagcttccgctaccacggccgcacccacactggagagaagccctatgagtgcaagcagtgtgggaaggccttccgcagcgccagccagctgcagatccacggccgcacccacactggagagaagccctatgagtgcaagcagtgtgggaaggcctttggaagtgccagccacctgcagatgcacggccgcacccacactggagagaagccctatgagtgcaagcagtgtgggaagagctttggctgtgccagccggctgcagatgcacggccgcacccacactggagagaagccctacaagtgcaagcagtgtgggaaggccttcggctgccccagcaacctgcggcggcacggccgcacccacactggagagaagccctacaagtgcaaccagtgtgggaaggtgttccgctgcagcagccagctgcaggtgcacggccgggcccactgcatcgacaccccctag

SEQ ID NO: 36218 - DNA, 2022 bp, Artificial Sequence
  derived and/or modified sequence
atgatgttccaggacagcgtggccttcgaggacgtggccgtgaccttcacgcaggaagagtgggccctgcttgatccctcacagaagaacctttgtagggatgtaatgcaggaaactttcaggaaccttgctagcattggcaaaaagtggaaacctcaaaatatctatgtcgagtatgaaaacttgcgtagaaacctgcgaattgtgggtgaacggctctttgagtcgaaagaaggtcatcagcacggtgaaatactgactcaggtgcctgacgacatgctcaaaaagaccaccactggtgtgaaatcctgcgagtcttccgtttacggtgaggttggtagcgcacactcatccttgaacagacacatcagggatgatactggccacaaagcgtacgaataccaggaatatggtcagaagccgtataagtgcaagtactgtaaaaagccgttcaactgcctctcttctgtacagacccatgagagggcccacagtggccgaaagctgtatgtatgtgaagagtgtggcaaaacctttatcagccactccaacttgcagaggcatagaatcatgcacaggggagatggcccatacaaatgcaaattttgtggaaaggcccttatgttcctcagcctgtacctgatccacaaacggactcacactggcgagaaaccataccaatgcaaacagtgcggaaaagcattctcacatagttcttcactccgtattcatgagaggacacatacaggcgagaaaccatataaatgcaacgagtgcggcaaggcctttcattcgagtacttgtctgcacgcacacaaaaggacgcacacaggcgagaaaccgtatgagtgtaagcaatgcggaaaggccttctcctcctcacacagcttccagatacacgagcggacgcacactggagagaagccctacgaatgtaaggagtgtggcaaggcttttaagtgcccctcttcagtgcgacgccacgagcggacgcacagccgaaaaaagccctacgaatgcaaacactgtgggaaggtgctctcatacttaaccagctttcagaaccacctcggtatgcacacaggtgagatctcccacaaatgtaagatctgtggtaaagccttctacagtccttcttcactccagacccacgaaaagacacacactggtgagaaaccatataaatgtaatcagtgtggcaaagccttcaacagcagttctagctttaggtatcatgagcgcacccacaccggtgagaaaccatatgagtgcaagcagtgtggcaaggcgttccgctcggcctcgctgttacaaactcatggccgcacccacactggagaaaagccatatgcttgcaaggaatgtggtaagccttttagcaatttttccttttttcagatccacgaacgaatgcacagggaggagaaaccctacgagtgcaaaggttatggaaaaaccttctctctcccctcactctttcaccggcatgagcgaactcacacaggggggaaaacctacgagtgtaagcagtgtggccgcagtttcaattgctcgtctagcttccgctaccacggtagaactcacactggcgaaaaaccatacgagtgtaaacaatgcgggaaagcctttcgaagcgcaagtcagctccagattcatggaagaacacacaccggtgagaagccttatgaatgtaagcagtgtggaaaggcttttggatccgcttcccacctccagatgcatggccgtacacacactggggagaaaccttacgagtgtaagcagtgcggaaaatcatttgggtgcgcgtctcgactccagatgcatggaagaacacacaccggggaaaaaccatacaaatgcaagcagtgcggaaaggcatttgggtgcccctcaaatcttagacggcatggccgcacccacaccggcgagaagccctataagtgcaatcagtgcggcaaagtgtttagatgtagttctcagctgcaagtccatgggcgggcccattgcatcgatacgccatag

SEQ ID NO: 36219 - DNA, 2022 bp, Artificial Sequence
  derived and/or modified sequence
atgatgtttcaagatagcgtggccttcgaggatgttgcggtgactttcacccaagaggaatgggctctgctcgacccctcacagaaaaatctgtgcagggatgtgatgcaggaaacctttaggaatctggcatcaattgggaaaaagtggaaaccccagaatatttacgtagaatacgaaaacttacgtcgcaaccttcgaatcgtcggcgagagactgtttgagagtaaagaaggacatcagcatggcgaaatcctcacacaggtacccgacgacatgttaaagaaaactacaaccggggttaagtcttgcgagtcatctgtttacggggaggtcgggtctgcccattctagcctcaatcgccacattagggatgacacaggccataaagcctacgaataccaggagtacgggcaaaagccatacaagtgcaaatattgtaaaaaaccttttaattgcttgtcctctgtacagacacacgaacgagctcatagcggtcgaaagctgtacgtctgtgaggagtgcggaaagacgtttatctctcattcaaacctccagcggcacaggatcatgcaccgaggcgatggaccctacaaatgtaagttttgtggcaaggctctgatgttcctctcactgtacttgattcacaagcggacgcataccggagaaaagccgtaccagtgtaaacaatgcggaaaggcattctctcacagttcttcactgagaatacacgagcggactcataccggagaaaaaccttacaagtgtaacgagtgcgggaaagcctttcacagtagtacatgccttcatgctcacaaaagaactcacactggcgaaaaaccttacgagtgtaaacagtgtgggaaagccttctcttcgagccactcctttcagattcacgaaaggacacacacaggagaaaagccttacgagtgtaaagaatgcggaaaggcattcaagtgtcctagtagcgtgagaagacatgaacgaacacacagtcgaaagaaaccttatgaatgtaagcactgtggaaaggtcttatcctacctcacatcattccagaatcatctggggatgcatacgggtgaaattagtcacaaatgtaagatatgcggtaaggcgttttatagtccatcgagtttgcagacccatgagaagactcatactggtgagaaaccttataagtgcaaccagtgtggaaaggccttcaatagcagttccagcttccggtatcacgagaggacacacaccggagaaaagccttatgaatgcaagcagtgtggcaaagcctttcggtcggccagcctgttacagacacatggccgtacacacacaggtgagaaaccatacgcctgcaaagagtgcggcaaaccgttttctaacttttccttcttccaaatccacgagcgaatgcacagagaggagaagccctatgagtgcaaaggatatggtaagactttcagcctgccctctctgtttcaccggcacgagcggacccatacaggtgggaagacctatgagtgtaagcagtgcgggagaagcttcaattgctcctcttcctttaggtaccatggcagaacccataccggtgaaaagccatacgagtgcaagcaatgcgggaaagcattcagatcagccagccagctccagattcacggacgtacccatactggcgagaagccgtacgagtgcaagcaatgtggaaaagccttcgggagcgcctcccatctgcagatgcatggaaggacgcacaccggggagaaaccatacgaatgtaaacagtgtgggaagtcattcggttgcgcatcccggctccaaatgcacggtagaacacacaccggcgaaaaaccgtacaagtgcaagcagtgcggtaaggctttcggctgccctagcaatctgcggaggcatgggcgtactcatactggagaaaagccttacaaatgtaatcaatgcggcaaggtctttcgctgctcaagccaactccaagtccacggaagggcccactgcattgacacgccatag

SEQ ID NO: 36220 - protein, 34 aa, Artificial Sequence
  derived and/or modified sequence
MTVMSLSRDLKDDFHSDTVLSILNEQRIRGILCD

SEQ ID NO: 36221 - protein, 94 aa, Artificial Sequence
  derived and/or modified sequence
MTVMSLSRDLKDDFHSDTVLSILNEQRIRGILCDVTIIVEDTKFKAHSNVLAASSLYFKNIFWSHTICISSHVLELDDLKAEVFTEILNYIYSS

SEQ ID NO: 36222 - protein, 118 aa, Artificial Sequence
  derived and/or modified sequence
MTVMSLSRDLKDDFHSDTVLSILNEQRIRGILCDVTIIVEDTKFKAHSNVLAASSLYFKNIFWSHTICISSHVLELDDLKAEVFTEILNYIYSSTVVVKRQETVTDLAAAGKKLGISF

SEQ ID NO: 36223 - protein, 111 aa, Artificial Sequence
  derived and/or modified sequence
MTVMSLSRDLKDDFHSDTVLSILNEQRIRGILCDVTIIVEDTKFKAHSNVLAASSLYFKNIFWSHTICISSHVLELDDLKAEVFTEILNYIYSSTVVVKRQETVTDLAAAG

SEQ ID NO: 36224 - protein, 150 aa, Artificial Sequence
  derived and/or modified sequence
MTVMSLSRDLKDDFHSDTVLSILNEQRIRGILCDVTIIVEDTKFKAHSNVLAASSLYFKNIFWSHTICISSHVLELDDLKAEVFTEILNYIYSSTVVVKRQETVTDLAAAGKKLGISFLEDLTDRNFSNSPGPYVFCITEKGVVKEEKNE

SEQ ID NO: 36225 - protein, 108 aa, Artificial Sequence
  derived and/or modified sequence
MTVMSLSRDLKDDFHSDTVLSILNEQRIRGILCDVTIIVEDTKFKAHSNVLAASSLYFKNIFWSHTICISSHVLELDDLKAEVFTEILNYIYSSTVVVKRQETVTDLA

SEQ ID NO: 36226 - protein, 70 aa, Artificial Sequence
  derived and/or modified sequence
MTVMSLSRDLKDDFHSDTVLSILNEQRIRGILCDVTIIVEDTKFKAHSNVLAASSLYFKNIFWSHTICIS

SEQ ID NO: 36227 - DNA, 3588 bp, Artificial Sequence
  derived and/or modified sequence
atgaccgtgatgagcctgagcagagacctgaaggacgacttccacagcgacaccgtgctgagcatcctgaacgagcagagaatcagaggcatcctgtgcgacgtgaccatcatcgtggaggacaccaagttcaaggcccacagcaacgtgctggccgccagcagcctgtacttcaagaacatcttctggagccacaccatctgcatcagcagccacgtgctggagctggacgacctgaaggccgaggtgttcaccgagatcctgaactacatctacagcagcaccgtggtggtgaagagacaggagaccgtgaccgacctggccgccgccggcaagaagctgggcatcagcttcctggaggacctgaccgacagaaacttcagcaacagccccggcccctacgtgttctgcatcaccgagaagggcgtggtgaaggaggagaagaacgagaagagacacgaggagcccgccatcaccaacggccccagaatcaccaacgccttcagcatcatcgagaccgagaacagcaacaacatgttcagccccctggacctgagagccagcttcaagaaggtgagcgacagcatgagaaccgccagcctgtgcctggagagaaccgacgtgtgccacgaggccgagcccgtgagaaccctggccgagcacagctacgccgtgagcagcgtggccgaggcctacagaagccagcccgtgagagagcacgacggcagcagccccggcaacaccggcaaggagaactgcgaggccctggccgccaagcccaagacctgcagaaagcccaagaccttcagcatcccccaggacagcgacagcgccaccgagaacatcccccccccccccgtgagcaacctggaggtgaaccaggagagaagcccccagcccgccgccgtgctgaccagaagcaagagccccaacaacgagggcgacgtgcacttcagcagagaggacgagaaccagagcagcgacgtgcccggcccccccgccgccgaggtgccccccctggtgtacaactgcagctgctgcagcaaggccttcgacagcagcaccctgctgagcgcccacatgcagctgcacaagcccacccaggagcccctggtgtgcaagtactgcaacaagcagttcaccaccctgaacagactggacagacacgagcagatctgcatgagaagcagccacatgcccatccccggcggcaaccagagattcctggagaactaccccaccatcggccagaacggcggcagcttcaccggccccgagcccctgctgagcgagaacagaatcggcgagttcagcagcaccggcagcaccctgcccgacaccgaccacatggtgaagttcgtgaacggccagatgctgtacagctgcgtggtgtgcaagagaagctacgtgaccctgagcagcctgagaagacacgccaacgtgcacagctggagaagaacctacccctgccactactgcaacaaggtgttcgccctggccgagtacagaaccagacacgagatctggcacaccggcgagagaagataccagtgcatcttctgcctggagaccttcatgacctactacatcctgaagaaccaccagaagagcttccacgccatcgaccacagactgagcatcagcaagaagaccgccaacggcggcctgaagcccagcgtgtacccctacaagctgtacagactgctgcccatgaagtgcaagagagccccctacaagagctacagaaacagcagctacgagaacgccagagagaacagccagatgaacgagagcgcccccggcacctacgtggtgcagaacccccacagcagcgagctgcccaccctgaacttccaggacaccgtgaacaccctgaccaacagccccgccatccccctggagaccagcgcctgccaggacatccccaccagcgccaacgtgcagaacgccgagggcaccaagtggggcgaggaggccctgaagatggacctggacaacaacttctacagcaccgaggtgagcgtgagcagcaccgagaacgccgtgagcagcgacctgagagccggcgacgtgcccgtgctgagcctgagcaacagcagcgagaacgccgccagcgtgatcagctacagcggcagcgcccccagcgtgatcgtgcacagcagccagttcagcagcgtgatcatgcacagcaacgccatcgccgccatgaccagcagcaaccacagagccttcagcgaccccgccgtgagccagagcctgaaggacgacagcaagcccgagcccgacaaggtgggcagattcgccagcagacccaagagcatcaaggagaagaagaagaccaccagccacaccagaggcgagatccccgaggagagcaactacgtggccgaccccggcggcagcctgagcaagaccaccaacatcgccgaggagaccagcaagatcgagacctacatcgccaagcccgccctgcccggcaccagcaccaacagcaacgtggcccccctgtgccagatcaccgtgaagatcggcaacgaggccatcgtgaagagacacatcctgggcagcaagctgttctacaagagaggcagaagacccaagtaccagatgcaggaggagcccctgccccagggcaacgaccccgagcccagcggcgacagccccctgggcctgtgccagagcgagtgcatggagatgagcgaggtgttcgacgacgccagcgaccaggacagcaccgacaagccctggagaccctactacaactacaagcccaagaagaagagcagacagctgaagaagatgagaaaggtgaactggagaaaggagcacggcaacagaagccccagccacaagtgcaagtaccccgccgagctggactgcgccgtgggcaaggccccccaggacaagcccttcgaggaggaggagaccaaggagatgcccaagctgcagtgcgagctgtgcgacggcgacaaggccgtgggcgccggcaaccagggcagaccccacagacacctgaccagcagaccctacgcctgcgagctgtgcgccaagcagttccagagccccagcaccctgaagatgcacatgagatgccacaccggcgagaagccctaccagtgcaagacctgcggcagatgcttcagcgtgcagggcaacctgcagaagcacgagagaatccacctgggcctgaaggagttcgtgtgccagtactgcaacaaggccttcaccctgaacgagaccctgaagatccacgagagaatccacaccggcgagaagagataccactgccagttctgcttccagagattcctgtacctgagcaccaagagaaaccacgagcagagacacatcagagagcacaacggcaagggctacgcctgcttccagtgccccaagatctgcaagaccgccgccgccctgggcatgcaccagaagaagcacctgttcaagagccccagccagcaggagaagatcggcgacgtgtgccacgagaacagcaaccccctggagaaccagcacttcatcggcagcgaggacaacgaccagaaggacaacatccagaccggcgtggagaacgtggtgctgtag

SEQ ID NO: 36228 - DNA, 357 bp, Artificial Sequence
  derived and/or modified sequence
atgaccgtgatgagcctgagcagagacctgaaggacgacttccacagcgacaccgtgctgagcatcctgaacgagcagagaatcagaggcatcctgtgcgacgtgaccatcatcgtggaggacaccaagttcaaggcccacagcaacgtgctggccgccagcagcctgtacttcaagaacatcttctggagccacaccatctgcatcagcagccacgtgctggagctggacgacctgaaggccgaggtgttcaccgagatcctgaactacatctacagcagcaccgtggtggtgaagagacaggagaccgtgaccgacctggccgccgccggcaagaagctgggcatcagcttctag

SEQ ID NO: 36229 - DNA, 336 bp, Artificial Sequence
  derived and/or modified sequence
atgaccgtgatgagcctgagcagagacctgaaggacgacttccacagcgacaccgtgctgagcatcctgaacgagcagagaatcagaggcatcctgtgcgacgtgaccatcatcgtggaggacaccaagttcaaggcccacagcaacgtgctggccgccagcagcctgtacttcaagaacatcttctggagccacaccatctgcatcagcagccacgtgctggagctggacgacctgaaggccgaggtgttcaccgagatcctgaactacatctacagcagcaccgtggtggtgaagagacaggagaccgtgaccgacctggccgccgccggctag

SEQ ID NO: 36230 - DNA, 453 bp, Artificial Sequence
  derived and/or modified sequence
atgaccgtgatgagcctgagcagagacctgaaggacgacttccacagcgacaccgtgctgagcatcctgaacgagcagagaatcagaggcatcctgtgcgacgtgaccatcatcgtggaggacaccaagttcaaggcccacagcaacgtgctggccgccagcagcctgtacttcaagaacatcttctggagccacaccatctgcatcagcagccacgtgctggagctggacgacctgaaggccgaggtgttcaccgagatcctgaactacatctacagcagcaccgtggtggtgaagagacaggagaccgtgaccgacctggccgccgccggcaagaagctgggcatcagcttcctggaggacctgaccgacagaaacttcagcaacagccccggcccctacgtgttctgcatcaccgagaagggcgtggtgaaggaggagaagaacgagtag

SEQ ID NO: 36231 - DNA, 2316 bp, Artificial Sequence
  derived and/or modified sequence
atgaccgtgatgagcctgagcagagacctgaaggacgacttccacagcgacaccgtgctgagcatcctgaacgagcagagaatcagaggcatcctgtgcgacgtgaccatcatcgtggaggacaccaagttcaaggcccacagcaacgtgctggccgccagcagcctgtacttcaagaacatcttctggagccacaccatctgcatcagcagccacgtgctggagctggacgacctgaaggccgaggtgttcaccgagatcctgaactacatctacagcagcaccgtggtggtgaagagacaggagaccgtgaccgacctggccgccgccggcaagaagctgggcatcagcttcctggaggacctgaccgacagaaacttcagcaacagccccggcccctacgtgttctgcatcaccgagaagggcgtggtgaaggaggagaagaacgagaagagacacgaggagcccgccatcaccaacggccccagaatcaccaacgccttcagcatcatcgagaccgagaacagcaacaacatgttcagccccctggacctgagagccagcttcaagaaggtgagcgacagcatgagaaccgccagcctgtgcctggagagaaccgacgtgtgccacgaggccgagcccgtgagaaccctggccgagcacagctacgccgtgagcagcgtggccgaggcctacagaagccagcccgtgagagagcacgacggcagcagccccggcaacaccggcaaggagaactgcgaggccctggccgccaagcccaagacctgcagaaagcccaagaccttcagcatcccccaggacagcgacagcgccaccgagaacatcccccccccccccgtgagcaacctggaggtgaaccaggagagaagcccccagcccgccgccgtgctgaccagaagcaagagccccaacaacgagggcgacgtgcacttcagcagagaggacgagaaccagagcagcgacgtgcccggcccccccgccgccgaggtgccccccctggtgtacaactgcagctgctgcagcaaggccttcgacagcagcaccctgctgagcgcccacatgcagctgcacaagcccacccaggagcccctggtgtgcaagtactgcaacaagcagttcaccaccctgaacagactggacagacacgagcagatctgcatgagaagcagccacatgcccatccccggcggcaaccagagattcctggagaactaccccaccatcggccagaacggcggcagcttcaccggccccgagcccctgctgagcgagaacagaatcggcgagttcagcagcaccggcagcaccctgcccgacaccgaccacatggtgaagttcgtgaacggccagatgctgtacagctgcgtggtgtgcaagagaagctacgtgaccctgagcagcctgagaagacacgccaacgtgcacagctggagaagaacctacccctgccactactgcaacaaggtgttcgccctggccgagtacagaaccagacacgagatctggcacaccggcgagagaagataccagtgcatcttctgcctggagaccttcatgacctactacatcctgaagaaccaccagaagagcttccacgccatcgaccacagactgagcatcagcaagaagaccgccaacggcggcctgaagcccagcgtgtacccctacaagctgtacagactgctgcccatgaagtgcaagagagccccctacaagagctacagaaacagcagctacgagaacgccagagagaacagccagatgaacgagagcgcccccggcacctacgtggtgcagaacccccacagcagcgagctgcccaccctgaacttccaggacaccgtgaacaccctgaccaacagccccgccatccccctggagaccagcgcctgccaggacatccccaccagcgccaacgtgcagaacgccgagggcaccaagtggggcgaggaggccctgaagatggacctggacaacaacttctacagcaccgaggtgagcgtgagcagcaccgagaacgccgtgagcagcgacctgagagccggcgacgtgcccgtgctgagcctgagcaacagcagcgagaacgccgccagcgtgatcagctacagcggcagcgcccccagcgtgatcgtgcacagcagccagttcagcagcgtgatcatgcacagcaacgccatcgccgccatgaccagcagcaaccacagagccttcagcgaccccgccgtgagccagagcctgaaggacgacagcaagcccgagcccgacaaggtgggcagattcgccagcagaccctag

SEQ ID NO: 36232 - DNA, 441 bp, Artificial Sequence
  derived and/or modified sequence
atgaccgtgatgagcctgagcagagacctgaaggacgacttccacagcgacaccgtgctgagcatcctgaacgagcagagaatcagaggcatcctgtgcgacgtgaccatcatcgtggaggacaccaagttcaaggcccacagcaacgtgctggccgccagcagcctgtacttcaagaacatcttctggagccacaccatctgcatcagcagccacgtgctggagctggacgacctgaaggccgaggtgttcaccgagatcctgaactacatctacagcagcaccgtggtggtgaagagacaggagaccgtgaccgacctggccgccgccggcaagaagctgggcatcagcttcctggaggacctgaccgacagaaacttcagcaacagccccggcccctacgtgttctgcatcaccgagaagggcgtggtgaaggagtag

SEQ ID NO: 36233 - DNA, 633 bp, Artificial Sequence
  derived and/or modified sequence
atgaccgtgatgagcctgagcagagacctgaaggacgacttccacagcgacaccgtgctgagcatcctgaacgagcagagaatcagaggcatcctgtgcgacgtgaccatcatcgtggaggacaccaagttcaaggcccacagcaacgtgctggccgccagcagcctgtacttcaagaacatcttctggagccacaccatctgcatcagcagccacgtgctggagctggacgacctgaaggccgaggtgttcaccgagatcctgaactacatctacagcagcaccgtggtggtgaagagacaggagaccgtgaccgacctggccgccgccggcaagaagctgggcatcagcttcctggaggacctgaccgacagaaacttcagcaacagccccggcccctacgtgttctgcatcaccgagaagggcgtggtgaaggaggagaagaacgagaagagacacgaggagcccgccatcaccaacggccccagaatcaccaacgccttcagcatcatcgagaccgagaacagcaacaacatgttcagccccctggacctgagagccagcttcaagaaggtgagcgacagcatgagaaccgccagcctgtgcctggagagaaccgacgtgtgccactag

SEQ ID NO: 36234 - DNA, 327 bp, Artificial Sequence
  derived and/or modified sequence
atgaccgtgatgagcctgagcagagacctgaaggacgacttccacagcgacaccgtgctgagcatcctgaacgagcagagaatcagaggcatcctgtgcgacgtgaccatcatcgtggaggacaccaagttcaaggcccacagcaacgtgctggccgccagcagcctgtacttcaagaacatcttctggagccacaccatctgcatcagcagccacgtgctggagctggacgacctgaaggccgaggtgttcaccgagatcctgaactacatctacagcagcaccgtggtggtgaagagacaggagaccgtgaccgacctggcctag

SEQ ID NO: 36235 - DNA, 3588 bp, Artificial Sequence
  derived and/or modified sequence
atgactgtcatgagtctttctcgggacctgaaagacgattttcacagcgacacagtcctgtctatcttgaatgaacagagaattcggggaattctgtgcgatgttactatcatcgtcgaggatacaaagttcaaggctcactctaacgtattggcggcctctagtctctatttcaagaatatattttggtcacataccatctgtatctctagccacgtgctggagctcgatgatctgaaagcggaggtatttactgagatactgaactacatttactcttcgacggtggtagtaaagaggcaggagactgtaactgacctggccgccgcggggaagaaactcggcatttcattccttgaggacctgactgatagaaacttctccaattcacctggaccctacgtattctgcataacagagaaaggggtggtgaaggaggagaagaatgaaaaaagacatgaagagccggccattactaatggcccacgcattactaatgcattctctatcattgaaactgagaacagcaacaatatgttttcaccgctggatcttagagcatcttttaagaaggtgtcagacagtatgaggactgcctccctgtgcttggagcgtacggacgtgtgtcacgaggcggagcccgtgcgtactctagccgagcattcctacgctgtgagtagcgtcgctgaggcataccggagtcagcccgtgcgggagcacgatggctcgtcacccggcaatacgggaaaggagaattgtgaagccttggccgcaaagcccaaaacgtgccgaaagcccaagacctttagtattccccaggatagtgacagcgccacagagaatatacccccccctccagtcagcaacctggaggtgaatcaggagagatctccccagcctgctgcagttctcacaaggagcaagtcccccaataatgaaggcgatgtgcacttctcaagagaggacgaaaatcagagtagcgacgtgcctggcccccctgctgctgaggttcccccactggtttataattgctcgtgctgttccaaagcctttgatagcagtaccctgcttagcgcgcatatgcagcttcataaaccaacacaagagccccttgtgtgcaaatactgcaacaaacaattcactacgcttaacagactggataggcatgagcaaatctgcatgcggtcgagtcacatgcctatacctggagggaaccagcgattcttggagaactatcccactatcgggcagaacggtggatcatttacaggccccgaacccctgttaagcgagaaccggattggggagttctcttctaccgggagcaccctgcccgacaccgaccacatggtcaaatttgtgaacggtcagatgctttactcttgtgttgtctgcaagcgcagctacgtgacactgtctagcctacgccgacatgcaaacgtgcattcttggcggaggacttacccctgccactactgtaacaaggtgttcgcgctggccgaatataggacacgccacgaaatatggcataccggagaacggagataccagtgtattttctgtctggaaacctttatgacttactatatcctgaagaatcatcagaagagcttccacgctattgaccatcgtctttccatttccaagaagactgcaaatggagggttaaagcctagtgtgtatccatataagttgtatcgtctgttgcctatgaagtgcaaaagagctccatataagagctaccgcaatagttcatatgagaatgcccgcgaaaacagtcagatgaacgaaagtgctcccggaacctacgtggtccagaatcctcattcatctgagttgccaactctaaatttccaggacacagtgaatacactgactaatagtcctgctattcctctggaaacctcagcctgtcaggacatccctacctccgccaacgtgcagaacgccgaaggcactaaatggggcgaagaagcgctgaaaatggacctggataacaacttctacagcactgaagtttctgtgtcaagcactgaaaatgccgtgtcctccgacttaagggccggcgatgttccggtcctatctttaagtaactccagcgaaaacgccgccagcgtaatatcttatagtgggtccgcacccagcgtgattgtgcacagctcacagttcagtagcgttatcatgcattcgaacgcgatcgccgctatgacctcctctaatcacagagctttctcagatccagccgtaagtcaaagcctcaaggacgacagtaaacccgaaccagataaagtgggtcgcttcgcttcgcggccgaaatccatcaaggagaagaaaaaaactacatctcacacaaggggtgagatccctgaagaaagtaactatgtggccgacccaggcggcagtctgagtaagacaacaaatatcgcagaggagacaagcaagatagagacatacatcgcaaagcccgcgctcccagggacctctactaacagcaacgtggctcccttatgccaaattactgtgaagataggtaacgaggctattgtgaagaggcacatcctggggtcgaagttgttctacaaaagaggccggagacctaagtaccagatgcaggaagagcccctacctcagggcaatgatccagagccaagtggagacagccctctgggcctttgtcagtccgagtgcatggagatgagcgaagtcttcgacgatgccagcgaccaagattcgacggataagccgtggcggccatattacaattataagccgaaaaaaaagtccagacaactgaaaaaaatgcgaaaagttaattggcgcaaggaacatggcaacagaagtccctcacacaaatgcaaatacccggccgaactggattgcgcagtgggaaaagcgccccaggataaaccattcgaagaggaggagaccaaagagatgcccaaacttcagtgcgagttgtgtgatggggacaaggctgtgggggcaggaaaccaggggagaccccacagacacctcacttctagaccctacgcttgcgaattgtgtgcaaagcagttccagtcaccgtccactctgaagatgcatatgagatgccatacaggggagaagccataccagtgtaagacatgcggtcgctgctttagcgttcagggcaacttacagaaacacgaaaggattcatctggggcttaaggagtttgtgtgtcaatactgcaacaaagcattcacattgaacgaaaccctgaaaattcatgaaagaatccatactggagagaaaaggtaccattgccagttttgcttccaaaggtttctatacttgtcgacaaaacgcaatcacgaacagcggcacattagggagcacaacggcaaaggatatgcttgttttcagtgccccaagatttgcaaaaccgccgcagcactgggcatgcaccagaagaagcatctttttaagagtcccagccagcaggagaaaatcggagatgtgtgtcatgagaatagtaaccctctggaaaatcagcatttcatcggctcagaggacaacgatcaaaaggacaacattcagacaggagtggaaaatgtcgtgttgtag

SEQ ID NO: 36236 - DNA, 357 bp, Artificial Sequence
  derived and/or modified sequence
atgacagtcatgtccctcagccgcgatcttaaggatgactttcacagtgatactgtcctttccatactaaacgagcaacggattagagggatcttatgtgacgtgaccatcattgtggaagacacaaagttcaaagcacatagtaacgtcctcgccgcatcctcactgtacttcaaaaacattttctggagccacaccatctgtatctcatctcacgtcctagagctggatgacctgaaggccgaagtatttaccgagatcttgaactacatctattcttctactgtcgttgttaaaaggcaggaaactgttacggacctcgctgctgcaggtaaaaaactgggcatctctttttag

SEQ ID NO: 36237 - DNA, 336 bp, Artificial Sequence
  derived and/or modified sequence
atgacagtgatgtccctgagtagggacctgaaagatgatttccactcagacactgtgctgtctatcttgaacgagcagcgaattcggggaatattatgcgatgtgactattattgtagaggatactaaattcaaggcgcacagcaatgtgctggctgccagttccctctactttaaaaacatcttctggagtcatacaatatgcatctcttcccacgtactagagctggatgacctcaaagcagaggtgtttacagagattctaaattacatatattcaagcactgttgtagttaagagacaggagactgtgacagatttggccgcagctggatag

SEQ ID NO: 36238 - DNA, 453 bp, Artificial Sequence
  derived and/or modified sequence
atgactgtcatgtcgctgtcacgggacttgaaagacgatttccactccgataccgttctctccatcttgaatgagcagcggattcggggcattctgtgcgatgtgacaataatagttgaagacaccaaattcaaggcacacagtaacgtcctggccgccagcagtctgtacttcaaaaatatcttttggagccataccatatgcatctcctcccacgtgctggaactggatgacctaaaagcagaggtcttcacagagatcctgaactacatctacagtagcacggtagtggtcaaacgtcaggagacagttactgatcttgccgctgccggcaaaaagctgggaatctcatttctggaagacctgacagataggaacttctccaacagccccggtccatatgtgttctgcatcactgagaaaggtgtcgtcaaggaagaaaagaacgagtag

SEQ ID NO: 36239 - DNA, 2316 bp, Artificial Sequence
  derived and/or modified sequence
atgaccgtgatgtcactgtccagagaccttaaggacgatttccactccgacactgtgctgagcattctgaacgagcagagaatccgaggtatcctctgcgatgtgactatcattgtcgaagataccaaatttaaggcccactctaacgtgttggcggcatcttccttgtactttaagaacatcttttggagtcacacaatctgtattagctcacacgtcttagagctggatgaccttaaggccgaggtgtttaccgaaattttgaattatatctactcatccacagtggtggtcaagaggcaggagacggtgacagatctggcagctgccgggaagaaactgggcatttcctttctggaagatctcactgaccgcaattttagtaatagcccagggccatatgtgttttgtatcaccgagaaaggagtggtcaaggaagaaaagaatgagaaacgacacgaagaacctgcgattaccaatggtccacggatcactaacgcctttagcatcattgaaaccgaaaatagcaataatatgttcagtcccctggacttaagggcctccttcaaaaaggtctccgacagtatgagaaccgcttctttatgtttggaacggacagatgtctgccacgaggctgaaccggtgcgcactctggccgaacacagctacgcagtgtcatcggtggccgaggcataccgaagccaacctgtgagggaacacgacggatcatccccagggaacactggaaaagagaactgcgaggctctggcagcaaaacctaagacctgccgcaagccaaagactttcagcattccccaagactccgacagcgctacagaaaatatacccccacctccggtttctaatcttgaggttaaccaggaacggagcccccagcctgcagctgtcctgacaaggtctaaaagccctaacaacgaaggagacgtacatttctcccgcgaggatgaaaatcaatcatccgacgttccggggcctccagccgcagaggtcccaccactcgtatataattgttcatgttgctctaaggctttcgattcttcaaccctgttaagcgcgcacatgcagttacataaaccaactcaggagcccctggtgtgtaaatactgcaacaaacagtttaccacgctgaataggctagatagacacgagcagatatgcatgcgtagctctcacatgcccattccgggtggcaatcagcggttcttagaaaattatccaacaatcgggcagaacggtggcagctttaccgggcccgaaccattactgagtgaaaatcggataggggaattcagctccacagggagcacattgccagataccgaccatatggtcaagttcgtcaatgggcaaatgctttactcctgcgtagtgtgcaaacggagttatgtgaccttgagttctctccgcaggcatgcaaacgtgcattcgtggcgcaggacctatccttgtcattattgcaacaaggtgttcgcgctagcagagtaccggaccaggcacgagatttggcatactggcgaaagacgctaccagtgcatcttctgcctggaaacattcatgacatactacatcctgaagaaccatcagaagtcttttcacgccattgaccaccgcctttcgatatctaaaaagacagccaacggtggactgaaaccttccgtttacccttataagctatataggctactaccaatgaaatgtaagagagctccttataagtcttataggaatagttcctacgagaacgctcgtgagaactcacagatgaatgaatctgcccctggcacctatgttgtccagaaccctcattcatctgagttgccaacattgaatttccaggacacggtaaacactttaaccaattctccggccatcccattggaaacatccgcatgccaggatatcccaacctcagcaaacgttcaaaatgccgaagggacaaaatggggtgaagaggccctcaaaatggacctggacaacaatttctattccaccgaggtgtctgtcagctcgaccgaaaatgcagttagcagcgatctgcgcgccggggacgtcccggtactgtctctttcgaactcctctgaaaacgcagctagcgttatctcctacagtggttctgccccctctgtgattgtccattcatctcagttctcttccgtgatcatgcactctaatgctatcgctgctatgacgtcttctaatcaccgcgcgttcagcgacccggctgtatcacaatctctgaaggacgatagcaagcccgagccagacaaggtgggcaggttcgcttcacgcccctag

SEQ ID NO: 36240 - DNA, 441 bp, Artificial Sequence
  derived and/or modified sequence
atgaccgtgatgtctctgtctcgggatctgaaggatgacttccatagtgacacagttctgagcattttgaatgagcagagaattagaggaattctttgtgacgtcactatcatagtggaagataccaaattcaaagcccattcaaacgtgcttgctgcaagcagcctgtattttaagaatatcttttggagccataccatctgtatctccagtcacgtgctcgaattagatgacttgaaggccgaagtttttacggaaatcttaaattacatctacagcagcaccgttgtggtgaagcgccaggagacggtaacggaccttgccgccgcgggaaagaagctgggcatttcattcctggaggatttgactgacaggaatttctccaactcacccggcccctacgtgttttgtatcactgagaagggagtggtaaaggagtag

SEQ ID NO: 36241 - DNA, 633 bp, Artificial Sequence
  derived and/or modified sequence
atgactgtaatgtccttatcaagagacttgaaagatgatttccatagcgacaccgtgctgagcatcctcaatgaacaacggattaggggcatcttatgcgacgtcaccataatagtagaagacacgaagtttaaagcccattccaacgtgctcgccgcctctagcttgtacttcaaaaatatcttctggagccacactatttgtataagtagccatgtgctggagctcgatgacctgaaagccgaggttttcacggagatcctcaattatatttacagctcaacagtcgtggtgaagagacaagagaccgtgacagacctcgctgcagctggaaaaaagttgggaatcagcttcctggaggacctgactgacaggaattttagcaactccccgggaccctatgtattctgcatcaccgagaagggcgtcgtgaaagaggaaaagaacgagaaacggcacgaagaaccagcgatcacaaatggtcccagaataaccaacgcattctcgatcatcgaaacggaaaacagcaataacatgttttcccctctggacctgagagcttcttttaaaaaggtttctgactcaatgagaactgcgagcctttgcttggaaaggacagatgtttgtcactag

SEQ ID NO: 36242 - DNA, 327 bp, Artificial Sequence
  derived and/or modified sequence
atgacagtcatgtcactgtctagagacttgaaagatgattttcacagcgacaccgttttgtctatcctcaatgagcagaggatccgcggcatcctatgcgacgtgactatcatagtagaagacactaagtttaaagctcatagcaatgtactggccgcctcctctctatattttaagaacatcttttggtcccataccatctgtatctcgagtcatgtccttgaactcgacgatctcaaggctgaagtgttcactgaaatcctgaactatatatatagctctacggtggtagtgaaaagacaggagactgttaccgatctcgcttag

SEQ ID NO: 36243 - DNA, 3588 bp, Artificial Sequence
  derived and/or modified sequence
atgactgtgatgtctcttagccgcgatcttaaggatgatttccacagtgacaccgtgctgtcaattctgaatgaacaaagaatccggggaatactctgtgatgtgaccatcatagttgaagacacaaaattcaaggctcactctaatgttctcgcggcttcttccttgtattttaagaacatcttttggagtcatactatatgtatctcaagccatgtgttggaacttgatgatctcaaggcagaagttttcaccgagattctcaactacatctattcttccacagtggtggtgaaacgccaggagaccgtaacagacctcgcagccgccggcaaaaaactggggatatccttcctggaagatctcaccgaccgcaacttcagcaacagcccaggaccttatgttttttgcatcaccgagaagggcgtggtgaaggaggaaaagaatgagaagagacatgaggaacccgcgattactaatggaccccgtattacgaacgccttcagcataattgagacggagaactccaataatatgtttagcccactcgatcttagggcctcctttaagaaagtgagcgacagtatgcgcacagcatccttgtgcctggaaagaaccgatgtctgtcacgaagccgagccagtgcggacattagctgagcactcctatgcggtgagctcagtggccgaagcttataggtctcagccggttcgagaacatgatgggtcttcacctggcaataccgggaaggaaaactgtgaagcgctggcagcaaagcctaagacctgtcgtaaaccgaaaaccttcagtatcccccaggactctgattccgcgaccgagaacattcctcctccacctgtgtcaaacctcgaagtcaaccaggaacgaagtccgcagcccgccgctgtgctgacaaggtctaaaagccctaacaatgagggcgatgtgcattttagccgagaagatgagaatcagtcaagcgacgttcccgggccccctgcagctgaagtgcctccactggtgtacaactgctcttgctgctctaaagctttcgactcttcaaccttactttctgcgcacatgcagctccataaaccaacacaggagcccctggtgtgtaagtactgtaacaaacagttcaccaccctgaaccgattagaccgccatgaacagatttgcatgagaagcagccacatgcctatccccggcggaaaccagaggttcctagagaactaccccacaatcggccagaatggtggatcttttacaggacccgaaccactactctcagagaatcgaatcggggaattttcatccacggggtccacattgccagacacagaccatatggtcaagtttgtcaatggacagatgctgtattcctgcgtagtctgcaagcgctcatatgtcaccctttcttcgctgcgccgccacgccaacgtccactcatggagacgtacttacccctgccactattgcaataaagtgttcgccctcgccgaataccgtacacggcatgagatatggcacaccggcgagagaaggtaccagtgtatattttgcctggagactttcatgacctactatatactgaaaaatcaccagaaaagcttccatgccattgatcaccggctgagcattagcaagaaaacagcgaatggcgggctgaaaccctccgtctatccctataaactgtatcggcttctgcccatgaagtgcaaacgcgcaccgtacaagtcatacaggaactcaagttatgaaaacgctagggagaatagccagatgaatgagagcgccccgggcacttatgtcgtacagaatcctcacagcagcgaacttcctaccctgaactttcaggacaccgttaatacgttaactaatagccccgcaatcccacttgaaacctccgcctgtcaggatattcccaccagcgccaacgtccaaaacgcagaaggtacaaagtggggtgaagaggctctgaagatggatttagacaacaatttctattccacggaggtgtccgtgagcagtacggagaacgccgtgtcctccgatttacgcgcgggggacgtgcccgtactgagcctaagcaactcttctgagaacgctgctagcgtgatctcttattccggttctgccccaagtgttatcgtccattctagccagttttctagcgtgatcatgcattctaacgctatcgcagccatgacttcaagcaatcaccgagcatttagtgatcctgcagtatcccagagccttaaagacgactccaagcccgagcccgataaagttggtagattcgcctctagacccaagtccatcaaggaaaagaaaaaaaccacaagtcacactcgaggtgaaatcccggaagagtctaactatgtggctgaccctggcggctccctgtctaaaactacaaatatcgctgaggaaacctcaaagatcgaaacatatattgcaaagcccgcgttacccggcacttctaccaattccaacgtggcaccactgtgtcagatcacagtcaaaattggcaatgaggcaatcgtcaaacgtcacatcctgggaagcaaacttttctataaaagaggtcgccggccaaagtatcagatgcaagaggagccccttccacaaggaaacgaccccgagccttccggcgattcgccactgggtctctgtcagtctgagtgtatggagatgtctgaggtgtttgatgatgcttccgatcaggacagcactgataagccctggagaccctattataattataagccaaagaagaagagccggcagctgaagaagatgaggaaagtgaactggcgcaaggagcacgggaaccggtctccatcacacaagtgtaaatacccagccgagctagattgcgccgttggtaaggcaccccaagataaacccttcgaagaggaggaaaccaaggagatgccgaagcttcagtgcgaactatgcgatggcgataaagctgtcggcgccggcaaccaaggaagaccacatcgtcacctcaccagtaggccttacgcatgtgagctgtgcgctaagcagttccagagcccaagcactctgaagatgcacatgcggtgtcatacaggtgagaagccctaccagtgcaaaacatgcggccgctgcttctcagttcaaggaaacttacagaagcatgaacgcatccatctcgggttgaaggaattcgtgtgccaatattgtaacaaggctttcactcttaacgaaaccctcaaaatccacgagcgcattcatactggcgagaagcgctaccactgccaattctgcttccagaggtttctttacttgtctacgaagaggaaccacgagcagcgtcacatacgcgagcacaacggcaagggatatgcctgttttcaatgccccaagatatgtaagactgctgctgcactggggatgcaccaaaagaaacacctgttcaaatctccatcgcagcaggaaaagattggagatgtgtgccacgaaaactccaatccattggaaaatcagcatttcattggcagcgaggacaatgaccagaaggacaatattcagactggggtcgagaacgtggttctctag

SEQ ID NO: 36244 - DNA, 3588 bp, Artificial Sequence
  derived and/or modified sequence
atgacagtgatgagcctgagccgggacctgaaggatgacttccacagcgacacagtgctgagcatcctgaatgagcagaggatccggggcatcctgtgtgatgtgaccatcatcgtggaggacaccaagttcaaggcccacagcaatgtgctggccgccagcagcctgtacttcaagaacatcttctggagccacaccatctgcatcagcagccacgtgctggagctggatgacctgaaggccgaggtgttcacagagatcctgaactacatctacagcagcacagtggtggtgaagaggcaggagaccgtgacagacctggccgccgccggcaagaagctgggcatctccttcctggaggacctgacagacaggaacttcagcaacagccctggcccctacgtgttctgcatcacagagaagggcgtggtgaaggaggagaagaatgagaagagacatgaggagcccgccatcaccaacggcccccgcatcaccaatgccttcagcatcattgaaacagagaacagcaacaacatgttcagccccctggacctgcgggccagcttcaagaaggtgtctgacagcatgaggacagccagcctgtgcctggagaggacagatgtgtgccacgaggccgagcctgtgaggaccctggccgagcacagctatgctgtgtcctctgtggccgaggcctaccgcagccagcctgtgcgggagcatgatggcagcagccctggcaacacaggcaaggagaactgtgaggccctggccgccaagcccaagacctgcaggaagcccaagaccttcagcatcccccaggacagcgacagcgccacagagaacatccccccacctcctgtgagcaacctggaggtgaaccaggagaggagcccccagcctgctgctgtgctgaccaggagcaagagccccaacaatgaaggagatgtgcacttcagcagagaagatgagaaccagagcagtgatgtgcccggccccccagctgctgaggtgccccccctggtgtacaactgcagctgctgcagcaaggcctttgacagcagcaccctgctgagcgcccacatgcagctgcacaagcccacccaggagcccctggtgtgcaagtactgcaacaagcagttcaccaccctgaaccggctggacagacatgagcagatctgcatgaggagcagccacatgcccatccctgggggcaaccagcgcttcctggagaactaccccaccatcggccagaatggaggcagcttcaccggccctgagcccctgctgtctgaaaatcgcatcggggagttcagcagcacaggcagcaccctgcctgacacagaccacatggtgaagtttgtgaatggccagatgctgtacagctgtgtggtgtgcaagaggagctatgtgaccctgagcagcctgcggagacatgccaacgtgcacagctggaggaggacctacccctgccactactgcaacaaggtgtttgccctggccgagtaccgcaccaggcatgagatctggcacactggagagcggcgctaccagtgcatcttctgcctggagaccttcatgacctactacatcctgaagaaccaccagaagagcttccacgccatcgaccaccggctgagcatcagcaagaagacagccaatggaggcctgaagcccagcgtgtacccctacaagctgtaccgcctgctgcccatgaagtgcaagagggccccctacaagagctacagaaacagcagctatgaaaatgcccgggagaacagccagatgaatgaaagtgcccctggcacctacgtggtgcagaacccccacagcagcgagctgcccaccctgaacttccaggacacagtgaacaccctgaccaacagccctgccatccccctggagaccagcgcctgccaggacatccccaccagcgccaacgtgcagaatgctgagggcaccaagtggggcgaggaggccctgaagatggacctggacaacaacttctacagcacagaggtgtctgtgagcagcacagaaaatgctgtgtccagtgacctgcgggctggagatgtgcctgtgctgagcctgagcaacagcagtgaaaatgctgccagcgtcatctcctacagcggcagcgcccccagcgtgattgtgcacagcagccagttcagcagcgtcatcatgcacagcaatgccatcgccgccatgaccagcagcaaccaccgggccttcagtgaccctgctgtgtcccagagcctgaaggatgacagcaagccagagccagacaaggtgggccgctttgccagccggcccaagagcatcaaggagaagaagaagaccaccagccacaccagaggagagatccctgaggagagcaactacgtggccgaccccggcggcagcctgagcaagaccaccaacattgctgaggagaccagcaagattgagacctacatcgccaagccagccctgcccggcaccagcaccaacagcaatgtggcccccctgtgccagatcaccgtgaagattggaaatgaggccatcgtgaagaggcacatcctgggcagcaagctgttctacaagaggggccggcggcccaagtaccagatgcaggaggagcccctgccccagggcaatgaccctgagcccagcggggacagccccctgggcctgtgccagagcgagtgcatggagatgtctgaggtgtttgatgatgccagtgaccaggacagcacagacaagccctggaggccctactacaactacaagcccaagaagaagagccggcagctgaagaagatgaggaaggtgaactggaggaaggagcacggcaacagaagccccagccacaagtgcaagtacccagctgagctggactgtgctgtgggcaaggccccccaggacaagccctttgaggaggaggagaccaaggagatgcccaagctgcagtgtgagctgtgtgatggagacaaggctgtgggcgccggcaaccagggccggccccaccgccacctgaccagccggccctatgcctgtgagctgtgtgccaagcagttccagagccccagcaccctgaagatgcacatgcgctgccacactggagagaagccctaccagtgcaagacctgtggccgctgcttctctgtgcagggcaacctgcagaagcatgagcgcatccacctgggcctgaaggagtttgtgtgccagtactgcaacaaggccttcaccctgaatgagaccctgaagatccacgagcgcatccacactggagagaagcgctaccactgccagttctgcttccagcgcttcctgtacctgagcaccaagaggaaccacgagcagaggcacatccgggagcacaacgggaagggctacgcctgcttccagtgccccaagatctgcaagacagctgctgccctgggcatgcaccagaagaagcacctgttcaagagccccagccagcaggagaagattggagatgtgtgccacgagaacagcaaccccctggagaaccagcacttcatcggcagcgaggacaatgaccagaaggacaacatccagacaggagtggagaatgtggtgctgtag

SEQ ID NO: 36245 - DNA, 357 bp, Artificial Sequence
  derived and/or modified sequence
atgacagtgatgagcctgagccgggacctgaaggatgacttccacagcgacacagtgctgagcatcctgaatgagcagaggatccggggcatcctgtgtgatgtgaccatcatcgtggaggacaccaagttcaaggcccacagcaatgtgctggccgccagcagcctgtacttcaagaacatcttctggagccacaccatctgcatcagcagccacgtgctggagctggatgacctgaaggccgaggtgttcacagagatcctgaactacatctacagcagcacagtggtggtgaagaggcaggagaccgtgacagacctggccgccgccggcaagaagctgggcatctccttctag

SEQ ID NO: 36246 - DNA, 336 bp, Artificial Sequence
  derived and/or modified sequence
atgacagtgatgagcctgagccgggacctgaaggatgacttccacagcgacacagtgctgagcatcctgaatgagcagaggatccggggcatcctgtgtgatgtgaccatcatcgtggaggacaccaagttcaaggcccacagcaatgtgctggccgccagcagcctgtacttcaagaacatcttctggagccacaccatctgcatcagcagccacgtgctggagctggatgacctgaaggccgaggtgttcacagagatcctgaactacatctacagcagcacagtggtggtgaagaggcaggagaccgtgacagacctggccgccgccggctag

SEQ ID NO: 36247 - DNA, 453 bp, Artificial Sequence
  derived and/or modified sequence
atgacagtgatgagcctgagccgggacctgaaggatgacttccacagcgacacagtgctgagcatcctgaatgagcagaggatccggggcatcctgtgtgatgtgaccatcatcgtggaggacaccaagttcaaggcccacagcaatgtgctggccgccagcagcctgtacttcaagaacatcttctggagccacaccatctgcatcagcagccacgtgctggagctggatgacctgaaggccgaggtgttcacagagatcctgaactacatctacagcagcacagtggtggtgaagaggcaggagaccgtgacagacctggccgccgccggcaagaagctgggcatctccttcctggaggacctgacagacaggaacttcagcaacagccctggcccctacgtgttctgcatcacagagaagggcgtggtgaaggaggagaagaatgaatag

SEQ ID NO: 36248 - DNA, 2316 bp, Artificial Sequence
  derived and/or modified sequence
atgacagtgatgagcctgagccgggacctgaaggatgacttccacagcgacacagtgctgagcatcctgaatgagcagaggatccggggcatcctgtgtgatgtgaccatcatcgtggaggacaccaagttcaaggcccacagcaatgtgctggccgccagcagcctgtacttcaagaacatcttctggagccacaccatctgcatcagcagccacgtgctggagctggatgacctgaaggccgaggtgttcacagagatcctgaactacatctacagcagcacagtggtggtgaagaggcaggagaccgtgacagacctggccgccgccggcaagaagctgggcatctccttcctggaggacctgacagacaggaacttcagcaacagccctggcccctacgtgttctgcatcacagagaagggcgtggtgaaggaggagaagaatgagaagagacatgaggagcccgccatcaccaacggcccccgcatcaccaatgccttcagcatcattgaaacagagaacagcaacaacatgttcagccccctggacctgcgggccagcttcaagaaggtgtctgacagcatgaggacagccagcctgtgcctggagaggacagatgtgtgccacgaggccgagcctgtgaggaccctggccgagcacagctatgctgtgtcctctgtggccgaggcctaccgcagccagcctgtgcgggagcatgatggcagcagccctggcaacacaggcaaggagaactgtgaggccctggccgccaagcccaagacctgcaggaagcccaagaccttcagcatcccccaggacagcgacagcgccacagagaacatccccccacctcctgtgagcaacctggaggtgaaccaggagaggagcccccagcctgctgctgtgctgaccaggagcaagagccccaacaatgaaggagatgtgcacttcagcagagaagatgagaaccagagcagtgatgtgcccggccccccagctgctgaggtgccccccctggtgtacaactgcagctgctgcagcaaggcctttgacagcagcaccctgctgagcgcccacatgcagctgcacaagcccacccaggagcccctggtgtgcaagtactgcaacaagcagttcaccaccctgaaccggctggacagacatgagcagatctgcatgaggagcagccacatgcccatccctgggggcaaccagcgcttcctggagaactaccccaccatcggccagaatggaggcagcttcaccggccctgagcccctgctgtctgaaaatcgcatcggggagttcagcagcacaggcagcaccctgcctgacacagaccacatggtgaagtttgtgaatggccagatgctgtacagctgtgtggtgtgcaagaggagctatgtgaccctgagcagcctgcggagacatgccaacgtgcacagctggaggaggacctacccctgccactactgcaacaaggtgtttgccctggccgagtaccgcaccaggcatgagatctggcacactggagagcggcgctaccagtgcatcttctgcctggagaccttcatgacctactacatcctgaagaaccaccagaagagcttccacgccatcgaccaccggctgagcatcagcaagaagacagccaatggaggcctgaagcccagcgtgtacccctacaagctgtaccgcctgctgcccatgaagtgcaagagggccccctacaagagctacagaaacagcagctatgaaaatgcccgggagaacagccagatgaatgaaagtgcccctggcacctacgtggtgcagaacccccacagcagcgagctgcccaccctgaacttccaggacacagtgaacaccctgaccaacagccctgccatccccctggagaccagcgcctgccaggacatccccaccagcgccaacgtgcagaatgctgagggcaccaagtggggcgaggaggccctgaagatggacctggacaacaacttctacagcacagaggtgtctgtgagcagcacagaaaatgctgtgtccagtgacctgcgggctggagatgtgcctgtgctgagcctgagcaacagcagtgaaaatgctgccagcgtcatctcctacagcggcagcgcccccagcgtgattgtgcacagcagccagttcagcagcgtcatcatgcacagcaatgccatcgccgccatgaccagcagcaaccaccgggccttcagtgaccctgctgtgtcccagagcctgaaggatgacagcaagccagagccagacaaggtgggccgctttgccagccggccctag

SEQ ID NO: 36249 - DNA, 441 bp, Artificial Sequence
  derived and/or modified sequence
atgacagtgatgagcctgagccgggacctgaaggatgacttccacagcgacacagtgctgagcatcctgaatgagcagaggatccggggcatcctgtgtgatgtgaccatcatcgtggaggacaccaagttcaaggcccacagcaatgtgctggccgccagcagcctgtacttcaagaacatcttctggagccacaccatctgcatcagcagccacgtgctggagctggatgacctgaaggccgaggtgttcacagagatcctgaactacatctacagcagcacagtggtggtgaagaggcaggagaccgtgacagacctggccgccgccggcaagaagctgggcatctccttcctggaggacctgacagacaggaacttcagcaacagccctggcccctacgtgttctgcatcacagagaagggcgtggtgaaggagtag

SEQ ID NO: 36250 - DNA, 633 bp, Artificial Sequence
  derived and/or modified sequence
atgacagtgatgagcctgagccgggacctgaaggatgacttccacagcgacacagtgctgagcatcctgaatgagcagaggatccggggcatcctgtgtgatgtgaccatcatcgtggaggacaccaagttcaaggcccacagcaatgtgctggccgccagcagcctgtacttcaagaacatcttctggagccacaccatctgcatcagcagccacgtgctggagctggatgacctgaaggccgaggtgttcacagagatcctgaactacatctacagcagcacagtggtggtgaagaggcaggagaccgtgacagacctggccgccgccggcaagaagctgggcatctccttcctggaggacctgacagacaggaacttcagcaacagccctggcccctacgtgttctgcatcacagagaagggcgtggtgaaggaggagaagaatgagaagagacatgaggagcccgccatcaccaacggcccccgcatcaccaatgccttcagcatcattgaaacagagaacagcaacaacatgttcagccccctggacctgcgggccagcttcaagaaggtgtctgacagcatgaggacagccagcctgtgcctggagaggacagatgtgtgccactag

SEQ ID NO: 36251 - DNA, 327 bp, Artificial Sequence
  derived and/or modified sequence
atgacagtgatgagcctgagccgggacctgaaggatgacttccacagcgacacagtgctgagcatcctgaatgagcagaggatccggggcatcctgtgtgatgtgaccatcatcgtggaggacaccaagttcaaggcccacagcaatgtgctggccgccagcagcctgtacttcaagaacatcttctggagccacaccatctgcatcagcagccacgtgctggagctggatgacctgaaggccgaggtgttcacagagatcctgaactacatctacagcagcacagtggtggtgaagaggcaggagaccgtgacagacctggcctag

SEQ ID NO: 36252 - DNA, 3588 bp, Artificial Sequence
  derived and/or modified sequence
atgaccgtgatgagcctgagccgggacctgaaggacgacttccacagtgacactgtgcttagcattctgaatgagcagcgtatacgcggtattctctgtgacgtcaccataatcgtagaggacacaaaatttaaggcccacagcaatgtcttggcagcatcctccctgtacttcaagaacatattctggtcccacaccatttgtatcagcagccacgttctggagctggacgatttaaaggccgaagtgtttactgaaatcctgaactatatttacagctccactgtggtggtgaaaagacaggagacggtcaccgacctggctgccgccgggaagaagttggggatttcatttctggaggacctgacagacaggaacttctcaaactcaccaggaccctatgtgttctgtatcacagaaaagggggtcgtaaaggaagaaaagaacgaaaagcgacacgaagagcccgcgatcactaacggtccccggatcaccaacgctttctctattattgagacagaaaattcaaacaacatgttctcgcctctggacttgcgcgcttctttcaagaaggtctccgactcaatgagaaccgcgtccttgtgccttgagagaaccgatgtgtgtcacgaagccgagcctgttcgaactcttgccgagcacagttatgcagtttctagcgtcgccgaagcataccggagccagcccgtacgggagcacgatggctcgagcccaggcaacactggaaaggagaactgcgaggccctcgctgcgaaaccaaagacctgccggaagcccaagacgttttccatccctcaggacagcgacagtgccacagagaatatcccacctcctcccgtaagcaatttagaagtcaatcaagagagatctccccagccagccgccgtcctgacccgttcaaagtcccccaataacgaaggtgacgtgcatttctctcgcgaggatgaaaatcagagttcagatgtgccaggaccccctgccgccgaggtgccacccctcgtgtacaactgttcctgctgcagtaaggccttcgactctagcacactgctgtcagctcacatgcagttacacaagcccacccaagagccgctggtgtgcaagtattgcaataagcagttcacgacactcaaccggctggatagacacgagcagatctgtatgcgttcttcccacatgcccatccccggaggaaatcagaggttcctggaaaactatccaaccatcggccaaaacggaggctcctttactggcccggagccactgcttagcgagaatcggatcggtgagttttcttccacgggcagcacactgcctgatacagaccacatggtcaagttcgtgaacggtcagatgctatatagttgcgtagtgtgtaaacgttcatacgtgacactttcttcgctgcgtaggcacgccaacgtgcattcatggcgtcgaacgtatccgtgtcactattgcaataaagtgttcgctttagccgagtaccgtactcggcacgagatctggcacacaggagaaagaaggtaccagtgcatcttctgtttggaaacctttatgacctactatatcttgaagaatcaccagaagtcattccacgctatcgatcacaggctgagcatctccaaaaagactgccaatggagggcttaagcccagcgtgtacccatataaactctaccgcctcctgcctatgaagtgtaaaagagccccatataagtcttaccgtaatagcagttacgagaatgcccgagaaaattcacagatgaacgaatctgcaccaggcacatatgttgtccaaaatcctcacagctcggaattaccaaccctgaattttcaggataccgtgaacacgcttacaaactccccagctattccgctggaaacctccgcctgtcaggatattcccacatccgctaacgttcagaatgcagagggcactaaatggggtgaggaggcgcttaaaatggatctggataacaacttctatagcacggaggtgtctgtgtcgtctactgaaaacgctgtgagttcagacctgagagccggcgatgtacctgtcctgtctttgtccaacagttctgagaacgcggccagcgttatatcatactcaggatcggctccctcagtgattgtgcactcctcccaatttagtagcgtcattatgcactctaatgccattgccgccatgacatctagcaaccatagagctttctcagatcccgctgtcagtcagtctctgaaagatgattccaagccagaacctgacaaagtcggcagatttgccagccgaccaaagtcaatcaaggagaagaaaaaaacgactagccacacacggggagaaatcccagaagagagtaattatgtcgctgatcctggcggcagtctgtccaagaccacaaatatagccgaggagacgagtaagattgagacatatatcgcaaaaccagctctgccagggaccagcacgaattctaatgtggcacctctttgtcagataactgtgaaaataggaaacgaagccatagtgaaaagacacattctcggttccaaactgttctataagcgaggcagaaggcccaagtaccagatgcaggaggagcctctcccccagggaaacgatcccgaaccgagcggggatagccccctcggtctgtgccaatccgagtgcatggagatgtcagaggtatttgacgatgccagtgatcaggattcaaccgacaagccctggaggccgtactacaactacaagcccaaaaagaagagccgccagctcaagaaaatgaggaaggtcaattggagaaaggagcacggtaaccgcagtccgtcacataagtgtaaatatcctgcagagctcgattgtgccgttggaaaggctcctcaggacaaaccatttgaagaagaagagaccaaagagatgcccaaactgcaatgtgagctgtgcgatggggacaaggcggtgggcgccgggaaccagggcagaccacaccgccatctgacatctcggccgtatgcctgcgaactgtgcgctaagcagttccagtctcccagcacactgaagatgcatatgagatgccacacaggggagaaaccataccagtgcaaaacgtgcgggagatgctttagtgtccagggcaatcttcagaaacatgagaggattcatctgggcttaaaagaattcgtatgccagtactgcaacaaagcctttactctaaatgagacactcaaaatccacgagagaatccatacaggggagaaaaggtatcattgtcagttctgctttcagcgatttctgtatctgtctaccaaaaggaatcacgaacagcgacatatccgggaacacaacggaaagggatacgcttgcttccaatgcccgaagatctgcaagaccgccgccgcgttaggaatgcaccaaaagaaacacctgttcaaatccccatctcagcaggagaagattggcgacgtttgtcacgagaattcaaatcccttggagaaccagcattttatagggtctgaggacaatgatcagaaagataatatccagaccggagttgagaatgtggtgctttag

SEQ ID NO: 36253 - DNA, 357 bp, Artificial Sequence
  derived and/or modified sequence
atgaccgtgatgagcctgagccgggacctgaaggacgacttccactcagacaccgtgttatctattctaaatgaacagaggatcagaggaatcctctgtgacgtcacaattatcgtggaagacactaagttcaaggctcatagtaacgttctcgctgcttccagcctctatttcaagaacattttttggtcccacactatttgcatcagctctcacgtcctcgaactggacgacctgaaggcagaagtgttcacagaaatcctgaattacatatattcctcaacggtggtcgttaagcggcaagagacagtaaccgacctggccgctgccggcaagaagttggggatcagcttttag

SEQ ID NO: 36254 - DNA, 336 bp, Artificial Sequence
  derived and/or modified sequence
atgaccgtgatgagcctgagccgggacctgaaggacgacttccacagtgacacagtactctcaatcttgaatgaacagaggatacgcggtattctgtgcgacgttaccatcattgttgaagataccaaattcaaggctcatagtaatgtcctcgccgcaagcagtctctatttcaagaatattttctggagtcatacaatttgcattagttcccacgtcttggaattagacgacctgaaggccgaggtgtttacggagatcctgaactacatatacagctccactgtggtggttaagaggcaggagactgtgactgatctggcggccgcgggctag

SEQ ID NO: 36255 - DNA, 453 bp, Artificial Sequence
  derived and/or modified sequence
atgaccgtgatgagcctgagccgggacctgaaggacgacttccactctgacacggtgctgtctatcctgaatgagcagagaatcagggggattctctgcgacgtgactatcatcgtcgaagatactaaatttaaggcccacagcaacgtgctggcagccagcagcctctatttcaagaacattttctggtcacacactatatgcatttcgagccacgttcttgagctggacgacctcaaagccgaggtgtttaccgagatcctgaactacatttactcctccacagtggtggtgaagcggcaagagaccgtgactgacctggcagctgctggaaagaaactcgggataagcttcctcgaggaccttacagatcgaaacttcagtaattcaccgggaccatacgttttttgcattacggagaaaggagtggtaaaggaagagaaaaatgagtag

SEQ ID NO: 36256 - DNA, 2316 bp, Artificial Sequence
  derived and/or modified sequence
atgaccgtgatgagcctgagccgggacctgaaggacgacttccacagcgacacagtactaagcatcctgaacgagcagcgcattcgaggcattttgtgtgatgtcactattatagtcgaagatacaaagtttaaggctcattccaacgtcctggcggcctccagcctgtattttaaaaatattttctggagtcacacaatctgcattagctcccacgtgctcgagttggacgatttgaaggcagaggtgttcaccgagattctgaattacatatattcctccacggtggttgtgaagcgacaggagacagttacagacctggccgcagcaggtaagaaattgggcatctctttcctggaagacttgaccgatcggaacttctcaaatagtccaggaccatatgtgttttgcattacggagaagggggtcgtgaaagaagagaaaaatgagaaacgtcacgaggaacctgccataacaaatggcccccgaattacaaatgctttttcaataattgagaccgaaaactctaacaacatgttctcacctcttgaccttcgggcaagttttaaaaaagttagcgactccatgaggaccgcttctctttgcctagagaggactgacgtgtgtcacgaagccgagccggtgagaacacttgcggaacactcgtacgctgtaagcagcgtggctgaagcctacagaagtcagcccgtacgcgaacacgacggaagctctccaggtaacaccggtaaggagaactgtgaggctctcgctgctaagcctaaaacatgtagaaaacccaagactttctctatcccccaggactccgactcggccactgaaaatataccacccccgcccgtctccaacctggaagttaaccaggaacggagtccgcagcctgccgcagttctaacacggtcaaagtcaccaaacaacgagggagatgtgcatttctcacgcgaagacgaaaaccagtcatctgatgtgccgggtccgccagccgcggaagtgccaccacttgtgtacaattgtagctgctgttcaaaggcttttgactcatctactctcctcagcgctcatatgcagctccacaaacccacgcaggaaccgctcgtgtgtaaatactgcaacaagcagtttaccacactgaacaggctggatcggcacgagcagatttgcatgcgctctagccatatgcccatacccggcggtaaccagaggttcctagagaactaccccaccataggccagaatggtggatctttcaccgggcccgaacctcttttatccgagaatagaataggcgagttctccagtacgggttctactctcccggatacagatcatatggttaagttcgtcaacgggcaaatgctctattcctgcgtcgtgtgtaaacggtcttacgtgactctcagcagtttgcgtagacacgcaaacgtgcacagctggagaaggacttacccttgtcattattgtaacaaggtgtttgcactggcggagtaccgaacccgccacgaaatctggcacacgggcgaacggcgatatcaatgcatattttgtctggaaacattcatgacctactacattctaaagaaccaccagaagagctttcacgccatcgaccacagactgagtatttcaaaaaaaactgccaacgggggcctgaaaccctctgtctacccctacaaactttaccgtcttctgccaatgaagtgtaaaagggccccttacaagagctaccgcaacagcagctatgaaaatgcacgggaaaacagtcaaatgaacgagtccgctcctggaacctacgtggtgcaaaatcctcatagcagtgagctgcctacactcaacttccaagacacagttaacacactcactaattcaccggccataccccttgagacatccgcctgtcaggacatccctacttcagctaatgtccagaacgcggagggcaccaaatggggggaggaagcactgaagatggatttggacaataacttctacagcactgaggtctctgtttcctccaccgaaaacgccgtgagtagtgacctgcgcgcaggagacgtccccgtgctgagtctgtctaactcgtccgagaatgcagcttcagtgatctcctactctggctccgctccaagcgtcattgttcattcgtctcaattcagttctgttattatgcactccaacgccatcgcggccatgacatcgtccaatcacagagcattctccgaccctgcagtgtcacagtctctaaaggatgactctaaacctgaacccgacaaggtcggcaggttcgcaagccgcccgtag

SEQ ID NO: 36257 - DNA, 441 bp, Artificial Sequence
  derived and/or modified sequence
atgaccgtgatgagcctgagccgggacctgaaggacgacttccactctgacacggtgctcagcatcctgaacgagcagaggataaggggcatactgtgtgacgttactataatcgtggaagataccaagttcaaagcacacagtaacgtgcttgccgctagtagtctatattttaaaaatatcttctggtctcataccatttgcatctcctcccatgttttggagttagacgatctcaaggccgaggtgtttactgaaatcctcaactatatttacagcagcaccgtggtggttaaacggcaggagacagtgacagacctcgcggcagccggcaagaaactgggtataagttttctggaggatctgacagacagaaacttctccaatagtccagggccctacgttttctgcattaccgagaaaggcgttgtgaaggaatag

SEQ ID NO: 36258 - DNA, 633 bp, Artificial Sequence
  derived and/or modified sequence
atgaccgtgatgagcctgagccgggacctgaaggacgacttccacagtgacactgtgctcagcatacttaacgagcagaggattagggggatactttgtgacgtgacaatcatagttgaggatacaaaattcaaagcacacagtaacgtcctggcggcctcatccctttatttcaagaacatattctggagtcacaccatctgtattagtagccatgtgcttgagctggacgatcttaaggcagaggtattcactgagatcctgaactacatttactctagcacagtcgtggtaaagagacaagaaacagtcacagacctggctgccgccggtaaaaagttggggattagctttctagaagacctgacggataggaactttagcaactcaccaggaccatatgtgttttgtatcacggagaagggcgtggtaaaggaagagaagaacgaaaaaaggcacgaggagcccgcgattacgaatggaccaagaatcacaaacgcgttcagcatcatcgaaaccgaaaactctaacaacatgttttcaccacttgatctgagagccagcttcaagaaggtaagcgacagcatgcggacggcgagcctgtgcttggaaaggaccgatgtatgccattag

SEQ ID NO: 36259 - DNA, 327 bp, Artificial Sequence
  derived and/or modified sequence
atgaccgtgatgagcctgagccgggacctgaaggacgacttccactctgatacagtcctctctatcctgaatgagcagcgcattcgggggatcctctgcgatgtaacaataatcgtagaagataccaagtttaaggcccactctaatgtgctggccgcctccagcctgtattttaaaaacatattctggagccacactatctgtatctcatctcacgtgttggagctcgacgatctcaaggctgaagtgtttacagagatactcaattacatttactcttccacagtggttgtgaaacgccaggaaacagtgacagatctcgcctag

SEQ ID NO: 36260 - DNA, 3588 bp, Artificial Sequence
  derived and/or modified sequence
atgaccgtgatgagcctgagccgggacctgaaggacgacttccactctgacaccgtacttagcatcctgaatgagcaaagaattaggggtatcctttgcgatgttactatcattgtggaggataccaagtttaaagcacacagcaacgtcctcgctgcatcctctctgtactttaagaatatcttttggagtcacaccatctgtattagctcccatgtgcttgagctcgacgacctgaaggcggaggtgtttaccgaaattctaaattacatctactccagtacagtcgtggttaagagacaggagaccgtgacagaccttgccgctgccggcaaaaaactgggaatcagtttcctggaagatctaacagatcgaaacttctccaactctcccggaccctatgtcttctgtattacagagaaaggggtggtgaaggaggaaaaaaatgaaaaacggcatgaggaacccgccattacaaacggaccaaggatcaccaatgccttctccataatcgagactgaaaattcaaataacatgttctcccccctagacctgagggcaagttttaagaaagtgtccgactcaatgcgtaccgccagcctgtgtctcgagcgcacagatgtctgccatgaggctgagcccgtcaggactctcgccgagcacagctacgccgtctccagcgtcgccgaggcctaccgatcacagcccgtccgcgagcatgacggcagctcacctggtaatactggtaaggagaactgtgaggcgctggcagctaaacccaagacttgtcggaagccaaaaaccttctccattccacaggactcagactccgctacagagaacatcccaccccctccagtgtccaatctggaagtcaaccaggaaaggtctccgcaaccagctgccgtgctgaccagatctaaaagcccaaacaacgagggcgacgtgcatttttctcgcgaagatgagaaccaatcttccgatgtcccaggcccacctgccgctgaagtcccacctctggtttataactgtagttgctgttcaaaggcatttgactcgagtacactgctgtccgcacacatgcagctgcataaacccacccaggagcctctcgtctgtaagtactgcaacaagcagttcaccactctgaacagattggaccgtcatgaacagatttgcatgcgctcttcacatatgcccattccgggaggcaatcagcgcttccttgaaaattatccgacaattggtcagaacggtggctcctttactggccctgaacccctcctgtcggaaaacagaattggcgaattctcatcaacaggctctaccctcccagacactgatcacatggtgaagtttgtcaatggccagatgctgtacagctgcgtggtatgtaaaaggtcctatgtcactctatcatccctgaggcgccatgcgaatgtccattcctggcgcagaacctatccctgccattattgcaacaaagtgtttgccctcgctgagtatagaaccagacacgaaatttggcatacaggggagcgacgttaccagtgtatattctgtttagagacttttatgacctattatattctaaagaaccaccagaagtccttccacgccatcgaccatcggctaagtattagcaaaaagaccgctaacggtggtctcaaacccagcgtgtacccctataagctatatagattactgccaatgaaatgcaagcgggcgccctacaaaagctatagaaattcctcgtatgagaatgctcgcgagaattctcagatgaatgaatcagccccaggaacttacgttgtccagaatccacattcttcagagctcccaactttaaattttcaagacacggttaatactcttacaaactcaccggcgatcccgctggagacctccgcatgtcaagacattccaacaagcgccaacgtgcagaacgctgaaggaactaagtggggtgaagaagctctcaagatggatctggacaataacttttactctactgaagtcagcgtgagctcaaccgagaacgccgtgtcttctgatcttagagctggtgacgtcccagtactaagcctaagcaactcctccgagaacgccgcttcggtgattagctacagcggttcggccccatcagtgattgtccattccagtcagttttcctctgtgatcatgcactccaatgctattgctgcaatgacctcaagtaaccaccgtgcgttctctgatcccgccgtttcacagtctcttaaggacgatagcaagcctgagccggacaaggtaggacggttcgcatcccgcccaaagagcattaaggaaaaaaaaaagaccacttctcatactagaggggagatccccgaggagagcaactacgtggctgaccccggcggttctctgagtaagactacaaacatcgccgaggaaacgtccaaaatcgagacgtacattgctaagccagccttgccaggcacctctacaaacagtaatgtggcacccctctgtcaaatcacagtgaagatcggtaacgaagctatcgtgaaacgccatattttggggtctaaacttttttacaaacgaggtcgccggcccaagtaccagatgcaagaggaaccgctgccacagggcaacgatccagagcctagcggcgattctccacttgggctgtgccagagcgagtgcatggagatgtccgaagtgtttgatgacgcttctgatcaggacagtactgacaaaccttggcgaccatactataactacaagccaaagaagaagtcaagacagctgaagaaaatgcgaaaagtgaattggcggaaagagcatggcaacaggagccctagccacaagtgtaaatacccggccgaactggactgcgcagttggtaaggctccacaagataagccatttgaagaggaggaaacaaaagagatgccaaagcttcagtgtgagctatgcgacggggacaaagcagtgggggcggggaaccaggggaggcctcataggcatctcactagtcgaccctacgcctgtgagctgtgcgctaagcagttccagagcccatcaactctgaaaatgcacatgcggtgccacacgggcgagaaaccttaccagtgcaaaacatgtggcaggtgtttctctgtccagggaaatctccagaaacacgaacggattcaccttgggctgaaggagtttgtgtgtcagtattgcaataaagccttcactctcaatgagaccttaaaaatacatgaacgcattcacacaggcgagaaaaggtaccattgccagttctgctttcagagatttctctacctctcgaccaagagaaatcacgaacagcgccacatccgggagcacaacggcaagggctatgcttgctttcaatgtccgaagatctgtaagacggccgcggccctgggtatgcatcagaagaagcatttgttcaagtccccctcacagcaggagaaaattggagatgtctgccatgagaacagcaatccccttgaaaaccagcatttcatcggcagtgaggacaatgaccaaaaggacaatatccaaactggtgtggagaatgtggtcctttag

SEQ ID NO: 36261 - DNA, 3588 bp, Artificial Sequence
  derived and/or modified sequence
atgaccgtcatgagtctgtcacgggaccttaaggacgacttccactcagacaccgtgctctctatcctcaacgagcagagaatccgcggaatactgtgcgacgtgaccatcattgtcgaggacacaaagtttaaagcacactctaatgttttagccgcatcttccctatatttcaagaatatattttggtctcacactatctgtatatcaagccacgtcctggagttggatgacctcaaggcagaggtgttcaccgagattctgaattacatttattcctccaccgtcgtggtgaaaaggcaggaaaccgttaccgacctcgccgcagccggtaagaagcttggtatcagcttcctggaggacctcacagatcggaacttctccaactcgccaggaccatatgtattttgtataaccgaaaaaggcgtcgtgaaggaagaaaaaaacgagaagaggcatgaagagccagctataaccaatggacctagaattactaacgcgttctccatcatagagactgaaaacagtaacaacatgttctctccccttgatctgagggcatcttttaaaaaagtgtccgattccatgaggaccgccagcttatgtttggagcggacggacgtgtgccacgaggccgaaccagtgcggacactggctgaacattcgtacgctgtgtcatctgtcgccgaggcatacagatcacagccagtccgggaacatgatgggtctagtcccggtaacactgggaaagaaaattgtgaggccttggccgctaaaccaaagacatgtagaaaaccgaagactttcagcattccgcaggattccgactccgctacagaaaacattccgcctccaccagtgtccaatttagaagttaatcaggaaagatccccccagcccgcagccgtgctgactcggtccaagagtcctaataatgagggagatgtccatttctcccgggaggatgaaaaccagagttcagatgtgcctgggccaccagccgctgaggttccaccactcgtgtacaactgctcctgttgttcgaaagcttttgattcctcaaccctactgtctgctcacatgcagctccacaaacctactcaggaaccactggtgtgcaaatactgtaacaagcaattcacaactttgaaccggcttgaccggcatgagcagatttgcatgaggagctcacatatgcctattccgggaggcaatcagcggtttctcgagaactacccaacaatcgggcagaatggcggatctttcactggccctgagcccctgcttagtgagaataggatcggagagttctcctcaactggcagtaccctgcccgacacagatcatatggtgaagtttgtgaatggccagatgctgtatagttgcgtggtctgcaaaaggtcctatgttaccctgtccagcctccggcgtcatgccaacgtgcacagttggcgccgtacgtatccctgccattactgcaataaagttttcgctctggccgagtatcggacaaggcatgaaatttggcatactggcgagcggagatatcaatgtattttctgtctggagacattcatgacttattacatcctgaagaatcaccagaaaagctttcacgcaattgaccaccgcttgagtatttccaaaaagacggccaatgggggattgaagccctccgtatatccttacaaattgtatcgactgttgccaatgaaatgtaagcgcgcaccatataagagttacagaaattccagctatgagaacgctagagaaaacagccaaatgaacgagagcgccccagggacatatgtggtccagaatccccattccagcgagcttccgactcttaacttccaggacaccgtcaataccctgaccaattcccccgcaatccccttggagacatccgcttgccaggacattcctacgagcgcaaatgtccagaacgccgagggcacaaaatggggtgaggaggccctgaaaatggacctcgataataatttctattccacggaggtgtcagttagttcaactgagaatgcagtgagtagtgatttacgcgcaggcgacgtgcccgtcctcagcttgtcgaacagctccgaaaatgccgcttcggttatctcatactcaggatccgctccctctgttattgtccattcgagtcagttcagttcagtgataatgcactcaaatgctatagcagcgatgacaagttccaatcacagagccttctccgaccctgccgtgtctcagtcactgaaagacgacagcaagcccgagcccgataaggtcggcaggttcgccagtcgccctaagagcatcaaggaaaaaaagaagacgacctcccatacacgcggagaaattcctgaagaatcaaactacgtcgccgacccgggtggctccctgtctaagaccactaatatcgctgaggagacctcaaagattgagacgtatatagccaagccagccctgccagggactagtacaaattccaatgtcgctcctctttgtcaaatcacggtgaaaatcggaaacgaggcaattgtcaagcgccacatcctagggtccaaactcttttataagcggggacgtcgccctaagtaccagatgcaagaggaacctctgcctcaaggcaatgatcccgaaccttctggagattccccactgggcctgtgccagagcgaatgcatggagatgagcgaagtgtttgacgatgcctcagaccaggattcaacagataaaccctggcgtccttattataattacaaaccaaagaagaaatcgagacagcttaagaaaatgcgaaaagtcaattggcggaaggagcacgggaaccggagcccaagccacaagtgtaaataccctgccgaactggattgtgcagtcgggaaagcccctcaggacaagcccttcgaagaagaggaaaccaaggagatgccaaagttgcaatgtgaactgtgcgacggcgacaaggctgtgggcgctggcaaccaggggaggccccacagacaccttacgtcacggccatatgcttgcgaactgtgtgcaaaacaattccagagccctagtactctgaagatgcatatgagatgtcatactggggaaaaaccatatcagtgcaaaacgtgtgggagatgcttctccgtgcagggcaatctgcagaaacatgagcgcatccatctcggccttaaggaattcgtctgtcagtattgcaataaagccttcactctcaacgagactctcaaaatacacgagagaattcacaccggagaaaagcgctaccattgtcaattctgcttccaacgcttcctatacctctcaactaagcgcaatcatgaacagcgccacataagagagcacaacggcaagggatatgcgtgctttcagtgccctaagatctgtaaaacagccgctgccctcgggatgcaccaaaagaagcacctgttcaagagtccatcacagcaagaaaagatcggggacgtgtgccacgagaacagcaatcccctggagaatcagcatttcatcggaagcgaagataatgatcaaaaagacaacattcagaccggcgttgagaatgttgtactgtag

SEQ ID NO: 36262 - DNA, 357 bp, Artificial Sequence
  derived and/or modified sequence
atgacagttatgtcactgtcccgcgacctaaaggacgactttcattccgataccgtgctgagcatcctgaacgaacagcgaataaggggaatactgtgtgacgtgaccattatcgttgaggacacaaagttcaaggcacattccaacgtgctggccgcatcctcgttatatttcaaaaacattttttggtcacacacaatctgcatctcctctcacgtccttgaactcgatgacttgaaggctgaggtgttcacggagattctgaattatatttacagctcaacagtggtggtcaagcggcaagaaacagttactgacctcgcagcggcaggtaagaagcttgggatcagcttctag

SEQ ID NO: 36263 - DNA, 336 bp, Artificial Sequence
  derived and/or modified sequence
atgaccgtaatgtctttgtccagagacttgaaagacgattttcactctgacactgtgctctcgatcctcaacgagcagagaatccgcggtatcctgtgcgacgtgaccattatcgtagaagacactaaattcaaggcacactcaaatgttctcgccgcatcttctctttactttaaaaacatcttttggtcgcacaccatctgtataagcagccatgtcctggagctggacgacctgaaggccgaggtattcaccgaaattctgaattacatctattcgagcacagtggttgtaaaaaggcaagagaccgtcactgatttggcggctgctgggtag

SEQ ID NO: 36264 - DNA, 453 bp, Artificial Sequence
  derived and/or modified sequence
atgactgttatgtctctcagtagggatctcaaagacgatttccatagcgataccgtgcttagtatcctcaatgaacagcgtatcaggggcattctgtgcgacgtgacaataatcgtggaagataccaagttcaaagcccacagcaatgttttggctgctagtagcctgtactttaagaatatcttctggtctcacaccatctgcatctcatcacatgtcctcgagctcgacgacttaaaggccgaggtctttaccgaaattcttaactacatctacagctccaccgtcgtggtgaaacgacaggagaccgtgaccgacctcgcagcagccggtaaaaagttgggcatctcttttcttgaagacctgacggatagaaacttttccaacagcccaggcccttatgtgttttgtatcactgaaaagggcgtggtcaaagaggaaaaaaacgaatag

SEQ ID NO: 36265 - DNA, 2316 bp, Artificial Sequence
  derived and/or modified sequence
atgactgtcatgagcctctctcgggacttgaaagacgacttccactcggacacagtgctgtctattctgaatgagcaaagaattagggggatcctgtgtgacgtgacaatcattgtggaagacaccaaattcaaggcacactcaaacgtcctggcagcctcatctctctacttcaagaatatattctggagccacaccatttgcatctcatcccatgtgttggagctggatgacctgaaggctgaggtcttcaccgagatcttgaattatatctactctagcactgtagtagttaagcgccaggagactgtaacagatctcgccgcagccggaaagaaactggggatatcttttctcgaggacctcactgatcgaaactttagcaatagcccaggcccatacgtgttttgcatcaccgagaagggagtggttaaggaagagaaaaatgaaaagaggcacgaggagcccgctatcaccaatgggccaagaatcactaacgccttcagcattatagagacagaaaattctaacaatatgtttagcccgctggacctccgcgcatcttttaaaaaggtgtcagatagtatgcgcacagcttcactttgtctggaacgaactgacgtgtgtcatgaagcagagcccgttcggaccctggccgagcatagctacgccgtgagttcagtagccgaagcatacaggtcccagccagtacgggaacacgatgggagtagtcctggaaataccgggaaggagaactgcgaggccctagccgcaaaaccgaaaacatgccgcaaacccaaaaccttctctatacctcaagattcggactcagccacagagaatatcccccctccacctgtctcgaatctggaggtaaatcaggagagatccccacaaccggcagcagtgcttaccaggagcaagtccccaaataacgagggagatgtccatttcagtcgcgaagatgagaatcagagctcagatgtgccaggcccacctgctgccgaggtccctcctcttgtgtacaattgcagctgctgttcaaaagctttcgatagttcgactctgctatcagcccatatgcagctgcacaaaccgacccaggaacccctagtatgtaagtattgtaacaaacaattcactacactgaaccgtcttgataggcacgaacaaatatgcatgcgatcatcccacatgcccatccccggaggcaatcagaggttcttggaaaactacccaaccatcggacaaaatggcggaagctttacaggacccgaaccactcctctcagagaatagaatcggagaattttcctccacgggtagcacacttccagatacggatcacatggttaaatttgttaacggtcagatgctttatagttgcgtggtttgcaagcgctcctatgttacactcagtagtttaagacgccatgcgaatgtgcactcctggcgacgcacctatccatgccactattgcaataaggtctttgccctggccgagtataggacacgacatgagatctggcataccggagaacgtagatatcagtgcattttttgcctcgaaacctttatgacatattacatactgaagaatcaccagaaaagctttcacgccattgaccaccggctgtcgatttccaaaaagactgcaaatggtggactgaaaccgagcgtatatccgtacaagctgtatagactgttgcccatgaaatgcaagcgcgctccctacaagagctacagaaacagcagttatgaaaatgccagggagaatagccagatgaacgaaagtgccccaggaacctatgtggtgcagaatccccactcatccgaattgcccaccctaaatttccaggatactgtgaatacactcaccaacagcccagctattccgctggagacctcggcttgtcaggatatccctactagcgccaacgttcagaatgctgaaggcaccaaatggggcgaagaagcgttgaagatggacctggataacaatttctattcaactgaggtgtctgtgtcttccactgaaaacgccgtatccagtgatctgcgggcaggggacgtaccagttctgagtttatccaattcatctgagaatgccgctagtgttataagctactctggctccgccccttctgtgatcgtacacagttcgcagttttcctccgtgataatgcacagcaacgcaattgccgctatgacatccagtaaccaccgcgcattctccgaccccgcagtcagccaatcattgaaagacgattctaagcccgagcctgataaggtgggacggtttgcaagcagaccgtag

SEQ ID NO: 36266 - DNA, 441 bp, Artificial Sequence
  derived and/or modified sequence
atgacagtcatgtccctgagtcgcgatcttaaagacgacttccactccgatacagtgctaagcatactgaatgagcagcgtatccgaggtattctgtgcgatgtgactattattgtcgaggataccaagttcaaagctcactcaaacgtgctggcagcttcctcactctacttcaagaacattttctggtcacatacgatctgtatttcgtcacacgtcctggagttggacgatttaaaggccgaggtgtttacagagatcctcaattacatttatagcagcaccgtcgtcgtgaaaaggcaagaaaccgtgacagatctcgcagccgctggaaaaaagctgggcatttctttcctcgaagacctgaccgatcgcaatttctccaatagccctggtccctatgtgttctgcataacggagaagggggtggtgaaggaatag

SEQ ID NO: 36267 - DNA, 633 bp, Artificial Sequence
  derived and/or modified sequence
atgacagtcatgagtctcagcagagatctgaaagatgatttccatagtgacacagtgttaagcatccttaacgagcagcgcataagaggaatcctgtgtgatgttacgatcatagttgaggacacaaaattcaaggctcattctaatgtcctggcagcatcctccttgtattttaagaacattttctggtcacatacgatatgtatcagctcacacgtcctggagttggatgatctcaaagcagaagtgtttacagaaattctaaactacatttatagttccaccgtcgtggtgaagcgacaagagaccgtcactgaccttgcagctgcagggaaaaaacttggaatctcttttttggaagatctgacagaccgaaacttcagcaatagtcccggtccatatgtgttttgtattaccgagaagggggtggtcaaggaggagaagaacgaaaaaaggcacgaggaaccagccataaccaatggaccgaggattacaaacgctttcagcatcattgagaccgaaaattccaataacatgttctcacctttagacctgcgggcttccttcaaaaaagtttctgactctatgagaaccgcaagcctctgcctggaaaggactgatgtgtgtcactag

SEQ ID NO: 36268 - DNA, 327 bp, Artificial Sequence
  derived and/or modified sequence
atgacagtgatgtccctgtccagggatctgaaggatgatttccattctgacacagtgttaagcatcctgaacgagcagagaatccggggaatcttgtgcgatgttacaattatcgtcgaggacaccaagtttaaggcccacagcaacgtcctcgccgcatccagcttatactttaagaatatcttttggtcacatacgatctgtatctcttcacacgtgcttgaactggatgatctgaaggctgaggtctttaccgagatcctgaattatatttactcatccacagtcgtggttaaacggcaggaaacagtgactgatctagcgtag

SEQ ID NO: 36269 - DNA, 3588 bp, Artificial Sequence
  derived and/or modified sequence
atgactgttatgagcctgagtcgcgacctgaaggacgactttcactcagatacggtgctgagtatcctcaacgagcagcgcatccgcggaattctgtgcgatgtgacgatcattgtcgaggataccaagttcaaagcccactcaaacgttctcgccgcatcttcgctctacttcaaaaacattttctggtcccatactatctgcatatcatctcacgtgctggaactggacgatttgaaggccgaggtttttacagagatcttgaattatatctacagcagtactgttgtggtcaagcgtcaagagacagtgaccgacctggccgctgccggtaaaaaactggggatatcatttctcgaggacctgactgaccgcaacttctctaatagcccgggaccatacgtgttctgtatcacagagaagggagtggtgaaagaagaaaaaaacgagaaaagacacgaggagcccgcaatcactaatggcccacgaatcacaaacgcgtttagcattattgaaacagagaattccaataacatgtttagtcctttagatctccgagcttcattcaaaaaggtcagtgacagcatgagaacagccagcttgtgtcttgaaagaacagacgtatgccatgaggctgagcctgtgagaactcttgccgaacactcgtacgccgtgtcttccgtagcagaggcctataggtcacagccagttagggagcacgacggctcctcccccggtaacacgggcaaggaaaactgtgaggctctcgccgctaagccgaaaacctgccggaagccgaagacgttcagcattcctcaggactccgactccgctaccgagaacatcccccctccacccgtctcaaatctcgaggttaaccaggagagaagtccacagcccgcagccgtgctgaccagatccaagtccccaaataatgaaggggacgtccatttctcaagagaagacgagaaccagtcgtcagacgtgcccggacctccagctgcagaggtgccccctcttgtgtataattgttcctgttgctctaaagctttcgatagcagtactctcctgagcgcccacatgcagcttcacaagcctactcaggaacctctcgtctgcaaatactgtaataagcagttcaccacattgaacaggcttgatagacatgaacagatctgtatgcggagcagccatatgcctatcccgggtgggaaccagcgatttctggaaaactaccctacaatcggccaaaacggcggtagcttcactggccctgaaccattactatctgagaatagaatcggagagttttcttctaccgggagcactctcccagatacagaccatatggtaaagtttgtcaacggacagatgttgtactcttgtgtcgtgtgcaagcgatcctatgtgaccctgagtagccttcgacgtcatgccaacgtccattcatggcgaagaacttatccttgtcattactgcaataaagtcttcgccctggcagaatacagaacccgacatgaaatttggcacaccggtgaacgtaggtatcagtgcatattctgtttggagacattcatgacctactacatcctgaagaaccaccagaaatccttccatgctattgatcataggttgtccatatccaaaaagacagccaacggcggtctaaaaccatccgtatatccctataaactctatcggctcctgccgatgaaatgtaagcgggcaccctataaatcttaccgcaattcttcgtatgaaaacgccagagagaatagccaaatgaatgagtccgcaccaggcacatacgttgtacaaaatcctcactcctccgagctcccgaccttgaacttccaagataccgttaatacactgaccaattcacccgcaatcccattggagacttccgcctgtcaggatatccccactagcgcgaatgtgcaaaatgccgaggggactaaatggggggaagaggcccttaagatggatttagacaataacttctactctactgaagtgtccgtgagtagtacggagaacgcagtctcctcggacctgcgagccggagacgtcccagtgctttcattgagcaattctagtgaaaatgcagcatctgttatctcttattctggtagtgccccatctgtgatcgtgcatagctcccagttctcctccgtgataatgcacagtaatgctattgccgcaatgaccagcagtaaccatcgtgctttctccgacccggctgtgagccagagtctgaaagacgattccaagcctgaacccgataaagtggggagattcgctagcaggccaaaatcgattaaggagaaaaaaaagactactagtcatactagaggtgaaatcccagaggagtctaattacgttgctgatccaggcggttccctctcgaagacgactaacatagctgaagaaacctcgaaaattgagacttatattgctaagcctgctctacccggtacctccaccaacagtaatgttgcccctctctgtcagatcactgtaaagattgggaacgaggctatagtaaagaggcatatcctcggatccaagttgttctacaaacgcggtcgacgccctaaataccagatgcaagaagaaccactgccccagggcaacgaccccgaaccttcaggagatagcccactgggactctgtcagtcagaatgtatggaaatgtccgaagtcttcgacgacgcgtccgatcaggatagcacagataaaccttggagaccatactacaattacaaacccaagaagaaatcccgccaactgaaaaaaatgagaaaggtgaattggagaaaggagcatggtaatcgtagtccttctcacaaatgtaagtatcctgccgaattggattgtgccgtaggtaaggcacctcaggacaaaccctttgaggaagaggaaacgaaagaaatgcccaaactgcagtgcgagctatgcgatggagataaggccgtgggggcaggaaaccagggcaggcctcatagacacctcaccagcagaccttacgcctgcgagctgtgtgctaaacagttccaatcaccaagcacactgaagatgcatatgcggtgtcacaccggtgagaaaccttatcagtgcaagacctgtggaaggtgttttagcgtgcagggaaatctccagaagcacgagcgcattcacctcggccttaaggagtttgtgtgtcagtactgtaacaaagcctttacattaaacgagactctgaagattcatgagcgaatccatacaggtgagaaaagataccattgccagttttgtttccaacggtttctttacctaagcacaaagcggaatcatgagcaaagacacattcgggagcacaatggaaagggatatgcctgttttcaatgcccaaagatttgtaagaccgccgctgcattgggcatgcaccagaagaagcacttattcaaatcgccaagccagcaagagaaaattggggatgtctgccatgaaaattccaacccactcgagaatcagcacttcataggctctgaggacaacgatcagaaggataatatccaaacaggggttgaaaatgtggtcctttag

SEQ ID NO: 36270 - DNA, 578 bp, Artificial Sequence
  derived and/or modified sequence
gcatttttctacaagcctgccggcaccatttaggattttgaaaaataatctagaaatgctataccctttatcaaaattattttttactttgcaagagcttaacagttttggttttttcttagcaattctataaaattaacatctataaaatgcatcccggaccagatacatactgtattgaaagctttcttcaggaagagaatatgagagtgttctttccagcttattttcttccttagcaaaaggattgtttgattctcagaagcagaaggacacattcattgtggagcagctctgcttaagtttgaaccaagactctgaggctgatatgcaatgtcacttacaacattaatcagatactgcatttaagatcttgatgtggaagaaatggaggactcagaaccaaggatttccaagtgatttcttccaaagcacaggaatctcactctgttaaagctggtctgttctaactgagatgacagtcatgtccctttccagggacctcaaggacgactttcacagtgacacggtactctccatcttaaatgagcagcgcattcggggcattttatgcgatg

SEQ ID NO: 36271 - DNA, 590 bp, Artificial Sequence
  derived and/or modified sequence
agcgctgcggccggactcacgggtccggaagcaccatggacccccggggaaacgcgccggcggcgaaggagccgagccccatcttgatgtggaagaaatggaggactcagaaccaaggatttccaagtgatttcttccaaagcacaggaatctcactctgttaaagctggtctgttctaactgagacggagtttcgctcttgttgcccaggctggagtacaatggcgcaatcttggctcaccacaacctccgcctcccgggttcaagcagttcttctctctcagcctcccgagtagctgggattacagatgacagtcatgtccctttccagggacctcaaggacgactttcacagtgacacggtactctccatcttaaatgagcagcgcattcggggcattttatgcgatgtcactatcattgtggaagataccaaatttaaagcccatagcaatgttctggcagcttcaagcctgtattttaaaaatatcttttggagccatacaatctgtatttccagccacgtcctggagctggacgatctcaaagctgaagtgtttactgaaatacttaattatatctacagttcc

SEQ ID NO: 36272 - DNA, 593 bp, Artificial Sequence
  derived and/or modified sequence
tatttctggagtagttgtgggagagagatgtactccaaagagaagaggactcttgctatggttcagttgaaccaagactctgaggctgatatgcaatgtcacttacaacattaatcagatactgcatttaagatcttgatgtggaagaaatggaggactcagaaccaaggatttccaagtgatttcttccaaagcacaggaatctcactctgttaaagctggtctgttctaactgagatgacagtcatgtccctttccagggacctcaaggacgactttcacagtgacacggtactctccatcttaaatgagcagcgcattcggggcattttatgcgatgtcactatcattgtggaagataccaaatttaaagcccatagcaatgttctggcagcttcaagcctgtattttaaaaatatcttttggagccatacaatctgtatttccagccacgtcctggagctggacgatctcaaagctgaagtgtttactgaaatacttaattatatctacagttccacagtcgttgtcaagagacaggaaacagtcactgatctcgcagctgcaggaaaaaagctgggaatatcgttctt

SEQ ID NO: 36273 - DNA, 855 bp, Artificial Sequence
  derived and/or modified sequence
aggttgtccaagctggcctccctctctgctgagtgcactccagcagcttcccgatgttggcctttagaacagcctgaatttcagttaaaaaataagcttcccctgtcacacgatgccttcttgaatctgatagcttaagtgcagtaaaatctgataaatgtagcttttctgtgcccgtttcaggccacatttagaaggcaacatcaacaggattttccttttcctagacacagctcaactccataaaggacttctgttttgtaatctgttttcgagatctgatgcgtgtgtttctaacaccccgtcacgtgaggaggtctgacgtagtcacccaacatgactttgagaaaatatactgtaaagatgtgtgtgggatggtacagccagctcactgaagcaaaatatcctttgtcggaaaactttccgcagggaataacagacctgcgcagtagatttcactttgatatggcccctgtgctggcccagtatggactgcaggtttgacttttgcaggattccagatgacagtcatgtccctttccagggacctcaaggacgactttcacagtgacacggtactctccatcttaaatgagcagcgcattcggggcattttatgcgatgtcactatcattgtggaagataccaaatttaaagcccatagcaatgttctggcagcttcaagcctgtattttaaaaatatcttttggagccatacaatctgtatttccagccacgtcctggagctggacgatctcaaagctgaagtgtttactgaaatacttaattatatctacagttccacagtcgttgtcaagagacaggaaacagtcactgatctcgcagctgcaggaa

SEQ ID NO: 36274 - DNA, 1434 bp, Artificial Sequence
  derived and/or modified sequence
cacagaagccctctagccaaggcctcgggcagccctaccaaatgaatatgggcacttgagttttctaggagggctttcctgctgccctgggtctcatccaactggtatccatctaaacattcccacccagggttattcatgctagaggaagaagaatgccctttccagagccagttcttggggaaaagaggaactgttgatatagccagagcccgaaaagaagattactctgcaacagctaaagcctcacgaaagattttacttgtagatcaactttcaaaatgtaggaagtcagaatgggtgacatcatcagaaaaatatgtggagctgatcacaagaagtgaagaacccagagcacgaaagcggttgtgactcctgggcccagggagttgacagcgtctgggtttcagaggagccagcgcctccgagttgtcttgaagtgaggctctgctgtagtcctgttcttctggctctaagatctgaatgttgtgaccactaatttgctctttcctggagagtaaccccagtttggtccacaaggcttgctgcccaatctttgccaacagttgaaccaagactctgaggctgatatgcaatgtcacttacaacattaatcagatactgcatttaaggttcacagtgtcttcacctggaatagattccacctcaagaaaccagtttctttgctcatccataagaagcaactcctcatctgatcaagttttataataagattgcagaaattcagtctcatctttaggctccacttctagttcttatgctatttccaccacatctgcagttacttcctccactgaagtcttgaatctctcaaagtcatccatgagggttggaaccaacatcttccaaactcctgatcttgatgtggaagaaatggaggactcagaaccaaggatttccaagtgatttcttccaaagcacaggaatctcactctgttaaagctggtctgttctaactgagatgacagtcatgtccctttccagggacctcaaggacgactttcacagtgacacggtactctccatcttaaatgagcagcgcattcggggcattttatgcgatgtcactatcattgtggaagataccaaatttaaagcccatagcaatgttctggcagcttcaagcctgtattttaaaaatatcttttggagccatacaatctgtatttccagccacgtcctggagctggacgatctcaaagctgaagtgtttactgaaatacttaattatatctacagttccacagtcgttgtcaagagacaggaaacagtcactgatctcgcagctgcaggaaaaaagctgggaatatcgttcttggaagaccttactgatcgcaacttctcaaattccccgggtccctatgtattctgtattactgaaaagggagtggttaaagaagaaaaaaatgaaaa

SEQ ID NO: 36275 - DNA, 2659 bp, Artificial Sequence
  derived and/or modified sequence
gcagtctcagaaaaaccttggatgagaaacttcttttttcaatcctgttttcctgttgataaattcagttctgtgatcacagttcattcaagctgttctgcgtatgatttttgtgtgtatgtgacaattgcatctaaaacttgtgagcaagaagacagagaaatcagttggtctccatcgctttacataaaaatggctgagtgtcttgtcatgctagcactgcattaagtgatgcatacagatcttgatgtggaagaaatggaggactcagaaccaaggatttccaagtgatttcttccaaagcacaggaatctcactctgttaaagctggtctgttctaactgagatgacagtcatgtccctttccagggacctcaaggacgactttcacagtgacacggtactctccatcttaaatgagcagcgcattcggggcattttatgcgatgtcactatcattgtggaagataccaaatttaaagcccatagcaatgttctggcagcttcaagcctgtattttaaaaatatcttttggagccatacaatctgtatttccagccacgtcctggagctggacgatctcaaagctgaagtgtttactgaaatacttaattatatctacagttccacagtcgttgtcaagagacaggaaacagtcactgatctcgcagctgcaggaaaaaagctgggaatatcgttcttggaagaccttactgatcgcaacttctcaaattccccgggtccctatgtattctgtattactgaaaagggagtggttaaagaagaaaaaaatgaaaaaaggcatgaagaaccagccatcactaatgggccaaggatcacaaatgcattttccatcatcgaaacagaaaatagtaataacatgttttccccgctggacttgagggcaagtttcaaaaaggtctccgactccatgagaacagctagcctttgcctggagaggacggacgtctgccacgaggcagagcctgtccgcacacttgccgagcactcatacgctgtttcttccgtagctgaagcttacagaagtcagcctgtacgtgaacatgatggcagttcacctggtaacacagggaaagaaaattgtgaagcccttgcagcgaaaccgaaaacatgccggaagccaaagacattctccataccacaggattcggattcagccacagaaaatataccaccccctccagtatccaacttagaggttaatcaagaaagaagtccacaaccagctgctgttctcactcgttcaaaatctccaaacaatgaaggagatgtccatttttccagggaagatgaaaatcaatcttctgatgttcccgggccgccagccgcagaggttccacctctggtgtacaattgtagctgctgttccaaagcctttgacagcagcactctgctcagtgcccacatgcagcttcacaagccaacccaggagcctttagtgtgcaagtattgcaacaaacaattcaccaccctgaacaggttggatcggcatgaacagatctgcatgaggtcaagccacatgcccattcctggaggaaaccaacgctttttagaaaactatcctaccattggacaaaatggaggttcattcacaggtccagaacctttattatctgaaaataggattggtgaattttccagtaccggaagtactttgccagacacggaccacatggttaaatttgttaatgggcaaatgctctacagttgcgttgtgtgcaaacgtagttatgtgaccttatctagcctccgaagacatgcaaatgttcactcctggagaagaacatatccttgccattactgcaacaaagtatttgcattggctgagtacaggacaaggcatgaaatttggcatacgggagaaagacgatatcagtgcattttctgtcttgaaactttcatgacctactatatactcaaaaatcatcagaagtctttccatgccatcgatcatagactttccatcagtaaaaaaacagcaaatggaggcttgaagcctagtgtctatccgtataaactttataggctactgcctatgaaatgcaagagagccccttataagagctaccgaaattcttcctatgaaaatgcacgagaaaacagtcaaatgaatgagtctgcacctggtacctatgttgttcagaatccacacagctctgaattaccaacgctgaatttccaagatactgtaaacaccctgaccaacagtccagccatcccattggaaacatctgcatgtcaggacatacccacttctgccaatgtacaaaatgcagagggtaccaaatggggagaggaggcattgaaaatggatcttgacaataacttttattcaactgaggtgtcagtttcttccactgaaaatgctgtcagttctgacctccgggcaggggatgtacctgttttatctttgagtaatagcagtgagaatgccgcctctgtgatcagctacagtggctctgcaccctcggtcattgtacacagcagccagttttcatcggtgatcatgcacagcaatgccattgctgccatgaccagcagcaaccacagagccttttcagacccagctgtcagtcagtccctgaaagatgacagtaagcccgagccagataaagtgggtaggtttgcaagcagaccc

SEQ ID NO: 36276 - DNA, 644 bp, Artificial Sequence
  derived and/or modified sequence
attttctgggcggtgctgtgcagcgctgcggccggactcacgggtccggaagcaccatggacccccggggaaacgcgccggcggcgaaggagccgagccccatcttgatgtggaagaaatggaggactcagaaccaaggatttccaagtgatttcttccaaagcacaggaatctcactctgttaaagctggtctgttctaactgagatgacagtcatgtccctttccagggacctcaaggacgactttcacagtgacacggtactctccatcttaaatgagcagcgcattcggggcattttatgcgatgtcactatcattgtggaagataccaaatttaaagcccatagcaatgttctggcagcttcaagcctgtattttaaaaatatcttttggagccatacaatctgtatttccagccacgtcctggagctggacgatctcaaagctgaagtgtttactgaaatacttaattatatctacagttccacagtcgttgtcaagagacaggaaacagtcactgatctcgcagctgcaggaaaaaagctgggaatatcgttcttggaagaccttactgatcgcaacttctcaaattccccgggtccctatgtattctgtattactgaaaagggagtggttaaagaa

SEQ ID NO: 36277 - DNA, 591 bp, Artificial Sequence
  derived and/or modified sequence
aaccaagactctgaggctgatatgcaatgtcacttacaacattaatcagatactgcatttaagatcttgatgtggaagaaatggaggactcagaaccaaggatttccaagtgatttcttccaaagcacaggaatctcactctgttaaagctggtctgttctaactgaggctggagtacaatggcgcaatcttggctcaccacaacctccgcctcccgggttcaagcagttcttctctctcagcctcccgagtagctgggattacagatgacagtcatgtccctttccagggacctcaaggacgactttcacagtgacacggtactctccatcttaaatgagcagcgcattcggggcattttatgcgatgtcactatcattgtggaagataccaaatttaaagcccatagcaatgttctggcagcttcaagcctgtattttaaaaatatcttttggagccatacaatctgtatttccagccacgtcctggagctggacgatctcaaagctgaagtgtttactgaaatacttaattatatctacagttccacagtcgttgtcaagagacaggaaacagtcactgatctcgcag

SEQ ID NO: 36278 - DNA, 649 bp, Artificial Sequence
  derived and/or modified sequence
ctcgagtccagcgggctcgggcactgctttgacagtcacacctcccgtctcctggattgggaatcggaccctagtcctgaccctatgggaacttgatgatttccttgatgcaacaccaagcccctggaattgaaagggacgtgcaaaggcagggacctgcccccaggggtttgcagtctcagccgcctacttctgcagtagtaaggtctgctctgttggtacaacatacaacacaaccgcccgccgttagccactttttttatagggtacatcataaatcacctgagattttagtctgtccgcggttccactttataactcctgcactgcggtagatcttgatgtggaagaaatggaggactcagaaccaaggatttccaagtgatttcttccaaagcacaggaatctcactctgttaaagctggtctgttctaactgagatgacagtcatgtccctttccagggacctcaaggacgactttcacagtgacacggtactctccatcttaaatgagcagcgcattcggggcattttatgcgatgtcactatcattgtggaagataccaaatttaaagcccatagcaatgttctggcagcttcaagcctgtattttaaaaatatcttttggagccatacaatctgtatttc

SEQ ID NO: 36279 - DNA, 7683 bp, Artificial Sequence
  derived and/or modified sequence
agttggtctccatcgctttacataaaaatggctgagtgtcttgtcatgctagcactgcattaagtgatgcatacagatcttgatgtggaagaaatggaggactcagaaccaaggatttccaagtgatttcttccaaagcacaggaatctcactctgttaaagctggtctgttctaactgaggctggagtacaatggcgcaatcttggctcaccacaacctccgcctcccgggttcaagcagttcttctctctcagcctcccgagtagctgggattacagatgacagtcatgtccctttccagggacctcaaggacgactttcacagtgacacggtactctccatcttaaatgagcagcgcattcggggcattttatgcgatgtcactatcattgtggaagataccaaatttaaagcccatagcaatgttctggcagcttcaagcctgtattttaaaaatatcttttggagccatacaatctgtatttccagccacgtcctggagctggacgatctcaaagctgaagtgtttactgaaatacttaattatatctacagttccacagtcgttgtcaagagacaggaaacagtcactgatctcgcagctgcaggaaaaaagctgggaatatcgttcttggaagaccttactgatcgcaacttctcaaattccccgggtccctatgtattctgtattactgaaaagggagtggttaaagaagaaaaaaatgaaaaaaggcatgaagaaccagccatcactaatgggccaaggatcacaaatgcattttccatcatcgaaacagaaaatagtaataacatgttttccccgctggacttgagggcaagtttcaaaaaggtctccgactccatgagaacagctagcctttgcctggagaggacggacgtctgccacgaggcagagcctgtccgcacacttgccgagcactcatacgctgtttcttccgtagctgaagcttacagaagtcagcctgtacgtgaacatgatggcagttcacctggtaacacagggaaagaaaattgtgaagcccttgcagcgaaaccgaaaacatgccggaagccaaagacattctccataccacaggattcggattcagccacagaaaatataccaccccctccagtatccaacttagaggttaatcaagaaagaagtccacaaccagctgctgttctcactcgttcaaaatctccaaacaatgaaggagatgtccatttttccagggaagatgaaaatcaatcttctgatgttcccgggccgccagccgcagaggttccacctctggtgtacaattgtagctgctgttccaaagcctttgacagcagcactctgctcagtgcccacatgcagcttcacaagccaacccaggagcctttagtgtgcaagtattgcaacaaacaattcaccaccctgaacaggttggatcggcatgaacagatctgcatgaggtcaagccacatgcccattcctggaggaaaccaacgctttttagaaaactatcctaccattggacaaaatggaggttcattcacaggtccagaacctttattatctgaaaataggattggtgaattttccagtaccggaagtactttgccagacacggaccacatggttaaatttgttaatgggcaaatgctctacagttgcgttgtgtgcaaacgtagttatgtgaccttatctagcctccgaagacatgcaaatgttcactcctggagaagaacatatccttgccattactgcaacaaagtatttgcattggctgagtacaggacaaggcatgaaatttggcatacgggagaaagacgatatcagtgcattttctgtcttgaaactttcatgacctactatatactcaaaaatcatcagaagtctttccatgccatcgatcatagactttccatcagtaaaaaaacagcaaatggaggcttgaagcctagtgtctatccgtataaactttataggctactgcctatgaaatgcaagagagccccttataagagctaccgaaattcttcctatgaaaatgcacgagaaaacagtcaaatgaatgagtctgcacctggtacctatgttgttcagaatccacacagctctgaattaccaacgctgaatttccaagatactgtaaacaccctgaccaacagtccagccatcccattggaaacatctgcatgtcaggacatacccacttctgccaatgtacaaaatgcagagggtaccaaatggggagaggaggcattgaaaatggatcttgacaataacttttattcaactgaggtgtcagtttcttccactgaaaatgctgtcagttctgacctccgggcaggggatgtacctgttttatctttgagtaatagcagtgagaatgccgcctctgtgatcagctacagtggctctgcaccctcggtcattgtacacagcagccagttttcatcggtgatcatgcacagcaatgccattgctgccatgaccagcagcaaccacagagccttttcagacccagctgtcagtcagtccctgaaagatgacagtaagcccgagccagataaagtgggtaggtttgcaagcagacccaaaagcattaaggagaaaaagaaaactacatcacataccaggggagaaataccggaggagtcaaactatgttgctgatcctggaggatcactgagcaaaaccacaaatattgctgaagaaaccagcaaaattgaaacctacattgcaaaacctgctctgccgggaacctccacaaatagtaatgttgcacccctttgccaaataacagtgaaaattggaaacgaagccattgtgaaaaggcacattctaggatctaaattgttttataaaagagggagaagacccaagtatcagatgcaggaggagcctttgccacaggggaatgacccagaacccagtggagacagcccactcgggctttgccaatccgagtgcatggagatgagtgaagtgttcgatgacgcaagtgaccaggattccactgacaaaccgtggcgcccttactacaactacaaacccaaaaagaaatccagacagttgaaaaaaatgaggaaagtcaactggaggaaggagcacggaaacaggagcccgagccataaatgtaaatacccagcagaactggattgcgccgtggggaaggctcctcaggataaaccctttgaggaagaagaaactaaagagatgcccaagctgcagtgtgaactctgtgatggagacaaagcagtgggggctggaaaccaaggaaggccccaccgacatcttacttctcggccatatgcctgcgagctctgcgccaagcagttccagagcccttccacactcaaaatgcacatgagatgtcacaccggggagaagccataccagtgcaagacctgcggacggtgcttttcggtgcaaggaaacttacagaaacatgaacgcatccacctgggcttgaaggagttcgtctgtcagtattgcaacaaggcattcaccttgaatgagaccctcaaaatccatgaaagaatccatactggagaaaagcgttaccactgtcagttctgctttcagagatttttgtatctctccaccaaaaggaatcacgagcagaggcatattcgggagcataatgggaagggctatgcctgcttccagtgccccaaaatttgcaaaacagctgctgcccttggaatgcaccaaaagaaacacttattcaaaagcccaagtcagcaggagaaaataggtgacgtgtgccacgaaaactcaaatcccttggagaatcaacatttcattggttcagaagacaatgaccaaaaggataacatacaaaccggtgtggaaaatgttgtcctttgagtggcaagaattagaaaaatcttcaaaaatatagttggtggtttttttagttatgatttaagtttagtttcattttgtccatgtgacagtcatgaaggagtgaaattaaaaaaaaaaaaaactcatttgtgaaaattccagaaaaaggatcctaatatctactttgggttttagcattaactttatgcaaagtgcacaaaaacaaaatagctgactcctccaatatcccaagtttcttgtgaaagttaataaaattcttagctgtggtatttctaccagtgaaaaaaggagtttaattttagcctagtttaaaactttctaataattgctaataagaactggctgctgaactgtctttagtcactggagaaaataagggtcagatatcctgaagatggcatcttcgtaaatatgttacgtggtaataagctgtgtgacggtctttattcccatctggcttctgcactattaaaatttgtttaaattaatggatacacatgaaatacttaaacaatataactgaaattatgtgcataatgagtaacctaaagtaggacattcatacattatgtagaactacttttctgcaacacaaaccttgtaaaatacatatataaatcactataacttttaactgtccatatcccctgtagagaattatgaggagcaatagatctgcaaataatgaggactgatgtaaaaatcaatagaaagcattttgaatatgatttaagagcatgtgaatgcttttagatggaatgctgttcccttgaagttatggctgagctgttcttagaactggtctactcaattcacagaaaacataggtcatgccttatctatgggggaacaccctcccagaatttacctgtgattacctgtgctgcatattactttgcaatggcctcatctcagagaatgaaagagggtcacattgttctgaaactctctgcagtcttccaaccaccacaaggccatggatgtgggggtctattccagacagacttaagggctcaagtggaacctgccatctcccattccactgaaggactgtccaagagatttagtgcaaggtacactgcagtagtgaattcccaggcacttgaaagtgactgcctaatccctacaattactagccttgttggagattatgcagcccacaagtacagactagtataaagcaaaaggacaaaggaacccccaccctccaccccacccattaatgacttgagtgggcaagaagaagtgatggccttccttgcctaaaacagtagctttgtttttagggggtgggaaggtaggatgtggagtgacatggttctatcctttacttatgagactcagaaatatatctacaaagccagatgctctgtcttcatatttgcagacatctagaccccttgctaaaaacccactgaagttttttttttatgttctttgacccacaccatcaacactaccctcaaatctaattgccctacagcatattctatcatgtggactaggttcctggaaagccggaactcatgattctttttcaaactgccagaatagaagggagagagaaaacatttctaccctttgatcaccagtgtgaacagaatccggaatgcagtttcagcgtgacctgcagtcattcatgttcattggatttgacagatggaaacccaaggttatcgaagattggaaggttatcattgtgaagaagtagctcaaaggactccggtttctgtctacaagtgtgatgtctccatgaagaagacttagtatggatttgggtgggtaagaaagcatttaaacgcccaggaaaggacatgattaaagttgaccttttaatactgtagtaccttgctgttaagtaaccccactattgtatctgcatttatcttttgttcatctactttcacttacatacagtattatataagtagagaaaaatgggaaaatgcaagcaaattcaactttattttatacattgtatatatgtacaccctacactattcatttgggttttattaaagagatagtcacaaagggcttacgaaaatcatttttgaattgataattagaatattgaataagcaatcctatgatccactaatttgttttatcagttaataatattaatcaaagacatttactgtatattctagtcattttgatttgagttaaccccaaatataaaattacctgtagtgatgtctctctcccagcccttatatgtggatattttttaagtggacttgtatgctgataattctagaccaaagtaaatatggcagaatatttatacatgaaaaaataattttgcaaatattttctataattgtattcatttaaaatgttgatagcttgtgttagtttcagggaggggtgtatattttgataaaaaaatacttgactttgtaattctgtatattctatacaatttatagcagagccgttttaagacagccttgtcacatttttttgttaattgtgaaaattttattgagtgatgtttaagtatgcattgagtacatgaccaactagaattaaagtaagtgtaaacagtgaacatactgtatgctgtacaagatataatgtaacttgctgttttagcatctgtattttggttagaagatattattaaatgcagatgttaaggattggaaaagtctaattttatttttagaaataatggatataaatttgtttttgcttgattaaaatagcttattcctacattaagtctctttttaaatgttttcatgttatttcttttgtgcagctatttcatctgtgtgagtcacagctttgtttccacgtattattcagtttatttctgtttccttacttgtttacattccgtggtacctacttacatgcttaggagtcaaatggattatgacattaggaaaaaagcagaataaaagagattgaagtcttctgatgattgagtgttttggataggcctgatcttataatgataaatcagagaatgaaatgctctccaggaagcattctgctccactcatccgtgggaaacaaattacatttattgagtaccaggcactgggcaatgtctttacataggctatttcattaacacacacgcaccagaattcgacctcattatcctcgttttatagtgactttgagaaggtctcacaaccagacaaagccaggatgctaacctaggtctgcctgactccaaagcccatgtttttgttccttctcaacactgtagagaaaaatcatttatagaaactgaacagagtatgaggaaaggagatatgataaagtaatgcagctttaggatggcagttagtgactgccctggaacaggattaaaggaggctgtgtcaggttcagcttcccctgaattgggcttcccttatatctcaggagattgccctataaaatcagtaaaatttgtgcacttttttaaggatatggagtaaaattgtaatagcattataagctggtaattttcacacaaagaaaaaaatacgttccgtcgtcacagactctactcctaaacttagctaactaactatcttgcaaatgcctgcagtttgtcccagtgggcaatgtgagaggggatgtcggtggctcaggcagcacagtccatcaccaacacagagaaaattactgccaggcctaccggtggctggccagtagcatcaattttgtattggaagggcaatccaaaccagattcaccaaaaatttgataactgttatctgctaaaactaacttcattatgtacaagaacaacagatttaatattgaaagcatctgtaacaattgggaaagtaaaagcataaaacaaaa

SEQ ID NO: 36280 - protein, 691 aa, Artificial Sequence
  derived and/or modified sequence
MALLLTLTSPDLEGTWDTRDKDGFKAQEGPPLAVPEFPVCGLYRIYGVCGSFSSFFIIRCSLCALETLKSPQHDPLEIPEQSLKLIPLVSGKRELTRGQKAGEKPLAAGPGEEELLRGSAPHAQDTQSEELPPSCTISGEKKPPAVSGEATGADAGRLCPPPRSRAPHKDRTLARSRPQTQGEDCSLPVGEVKIGKRSYSPAPGKQKKPNAMGLAPTSSPGAPNSARATHNPVPCGSGRGPCHLANLLSTLAQSNQNRDHKQGPPEVTCQIRKKTRTLYRSDQLEELEKIFQEDHYPDSDKRREIAQTVGVTPQRIMVKGAGSLVAGWSGGGPTIETLELQSERSAVAWVWFQNRRAKWRKMEKLNGKESKDNPAAPGPASSQCSSAAEILPAVPMEPKPDPFPQESPLDTFPEPPMLLTSDQTLAPTQPSEGAQRVVTPPLFSPPPVRRADLPFPLGPVHTPQLMPLLMDVAGSDSSHKDGPCGSWGTSITLPPPCSYLEELEPQDYQQSNQPGPFQFSQAPQPPLFQSPQPKLPYLPTFPFSMPSSLTLPPPEDSLFMFPCGPSGGTSQGYCPGASSGQILMQPPAGNIGTASWSDPCLPELPFPGPFCPQALGHPPGGDGYFPDLFPTPCPQALGRQPSSALSWMPEGARPGTGPLLSKAKEEPPAASLDQPSALEEARGDDKNSHVP

SEQ ID NO: 36281 - DNA, 2076 bp, Artificial Sequence
  derived and/or modified sequence
atggcgcttctgttaaccctcacctcccctgatcttgaaggcacgtgggatacacgagacaaagacggctttaaagcacaggagggccctcctctcgccgtgcctgagttccctgtctgcgggttgtatcggatttacggtgtctgcggctccttctcaagtttcttcatcatcaggtgttccctttgtgcccttgaaactctaaaatctcctcagcacgatccgctggagattcctgagcagtcactgaagctgattcccctggtgagtggtaaaagggaactcaccagagggcagaaggctggcgaaaaaccactggcggccggaccaggggaggaggagttgctgaggggatctgccccccacgcccaggacacacagtctgaagaactcccaccatcatgcaccatcagcggcgagaagaagccccctgccgttagtggcgaggccaccggagcagacgccgggcgtttgtgcccacctcctaggagcagggccccgcacaaagacaggactttggccaggtctaggcctcagacacaaggtgaggactgctcactgcctgtgggagaagttaaaatcgggaagcgtagttactcaccggcccccggtaagcagaagaagccgaatgccatgggcctggcacccacctcctctcccggagccccgaatagtgcgagggcgacacacaatcctgtaccttgcggctcagggcggggaccttgccacctagcaaacctcctctccacattggcacagagcaaccagaacagggaccataagcaaggacctccagaagtcacgtgtcaaatcagaaagaagactcgcacactgtaccgcagtgaccagctggaggagctagaaaaaatttttcaggaagaccattatccagactcagataagcgacgagagatcgcacaaaccgtcggcgtgacacctcagagaattatggttaagggcgcaggaagcctggtcgctggatggtctggcggaggaccaactattgagaccttggagctacagagcgagagatccgccgtggcttgggtctggttccagaacaggagggcaaagtggcgaaaaatggagaaattaaatggtaaggagtctaaggacaaccccgcagcaccaggccccgcttctagtcagtgctcctccgccgccgaaatattaccagcagtgcctatggagcctaaaccagacccctttcctcaggagtctccactcgatactttccccgagcctcctatgctgcttacgtccgaccaaactctggccccaacacaaccaagtgagggcgcccagcgtgtcgtgactccacctttgtttagtcctccgcccgtccgacgagcagacttacccttcccactgggacccgtgcacactccccagttgatgccgttgcttatggacgtcgccggaagcgactcatcgcacaaggatggcccatgtggcagctggggtacatctataaccctcccacccccttgcagctacctcgaggagcttgagccccaggactatcagcaaagcaaccagcccggtccattccaattctcacaagctcctcagccacccctgtttcagagtccccagcccaagctgccttatctcccgacgttccctttctcaatgccctcaagtttgactcttccccctccggaagatagtttgtttatgttcccttgcggccctagcgggggcacttctcaagggtattgtcccggcgcaagctcaggccagattctcatgcagccaccagccggtaacattggaaccgcttcctggagcgacccttgtttgcctgagctgccattcccggggcctttctgtccccaggccctgggtcacccaccgggcggtgacggttactttcccgacctttttccaaccccctgccctcaggctttgggaaggcaacccagctccgccctttcatggatgcccgagggggcaaggccaggcacgggcccgctgctgagcaaagccaaagaggagccccccgcggcatctttggaccagcctagcgctcttgaggaggctcggggtgacgataaaaacagccacgttccatag

SEQ ID NO: 36282 - DNA, 2076 bp, Artificial Sequence
  derived and/or modified sequence
atggccctgctgctgaccctgaccagcccagacctggagggcacctgggacacccgggacaaggatggcttcaaggcccaggagggcccccccctggccgtgcctgagttccctgtgtgtggcctgtaccgcatctacggcgtgtgtggcagcttcagcagcttcttcatcatccgctgcagcctgtgtgccctggagaccctgaagagcccccagcacgaccccctggagatccctgagcagagcctgaagctgatccccctggtgtctgggaagcgggagctgacccggggccagaaggccggggagaagcccctggccgccggccctggagaggaggagctgctgcggggcagcgccccccacgcccaggacacccagagcgaggagctgccccccagctgcaccatcagcggggagaagaagcccccagctgtgtctggagaggccactggagcagatgctggccgcctgtgccccccacccaggagccgggccccccacaaggacaggaccctggcccggagccggccccagacccagggcgaggactgcagcctgcctgtgggggaggtgaagattggcaagaggagctacagccctgcccctgggaagcagaagaagcccaatgccatgggcctggcccccaccagcagccctggggcccccaacagcgcccgggccacccacaaccctgtgccctgtggcagcggccggggcccctgccacctggccaacctgctgagcaccctggcccagagcaaccagaacagagaccacaagcagggccccccagaggtgacctgccagatcaggaagaagaccaggaccctgtacagaagtgaccagctggaggagctggagaagatcttccaggaggaccactacccagacagcgacaagaggcgggagatcgcccagacagtgggcgtgaccccccagaggatcatggtgaagggagctggcagcctggtggccggctggagcggcggcggccccaccatcgagaccctggagctgcagagcgagaggtctgctgtggcctgggtgtggttccagaacagaagagccaagtggaggaagatggagaagctgaatggcaaggagagcaaggacaacccagctgcccctggccctgccagcagccagtgcagcagcgctgctgagatcctgcctgctgtgcccatggagcccaagccagaccccttcccccaggagagccccctggacaccttccctgagccccccatgctgctgaccagtgaccagaccctggcccccacccagcccagcgagggcgcccagagggtggtgaccccacccctcttcagccccccacctgtgagaagagctgacctgcccttccccctgggccctgtgcacaccccccagctgatgcccctgctgatggatgtggccggcagtgacagcagccacaaggatggcccctgtggctcctggggcaccagcatcaccctgcccccaccctgcagctacctggaggagctggagccccaggactaccagcagagcaaccagcccggccccttccagttcagccaggccccccagcccccactcttccagagcccccagcccaagctgccctacctgcccaccttccccttctccatgcccagcagcctgaccctgcccccacctgaggacagcctcttcatgttcccctgtggccccagcggcggcaccagccagggctactgccctggggccagcagcggccagatcctgatgcagcccccagctggcaacattggaacagcctcctggagcgacccctgcctgcctgagctgcccttccctggccccttctgcccccaggccctgggccaccccccaggaggagatggctacttcccagacctcttccccaccccctgcccccaggccctgggccggcagcccagcagcgccctgtcctggatgcctgagggcgcccggcccggcaccggccccctgctgagcaaggccaaggaggagcccccagctgccagcctggaccagcccagcgccctggaggaggcccggggagatgacaagaacagccacgtgccctag

SEQ ID NO: 36283 - DNA, 2076 bp, Artificial Sequence
  derived and/or modified sequence
atggccctgctgctgaccctgaccagccccgacctggagggcacctgggatactagggataaggacggatttaaggctcaggaagggcctcccctggccgtccccgaatttccagtatgcgggctgtacaggatctatggcgtgtgcggatcgttctcaagcttcttcataatcaggtgctctctttgcgccctggaaaccctcaagtctccccaacacgatccattggagatccctgagcaatcactgaagcttattcccctcgtgtctggcaagagagagctgacgcgcgggcagaaggccggcgagaaacccttggctgcaggccccggggaggaagagttgctaaggggcagcgcccctcacgctcaggacacccagagtgaggagctcccccctagctgcactatctctggcgaaaaaaagcctccagcagtctccggagaagctactggggccgatgctggcagactctgtcccccaccaagatcgcgtgcccctcacaaggaccgtactctcgcccgtagcagaccccagacccaaggggaggattgttcactgccagttggtgaggtcaagatcgggaaacgctcctacagtcccgcccccggaaagcaaaagaagcctaacgccatggggctcgcacctacttctagtcccggagcacccaattccgctagagccacacacaacccagtgccgtgcggttccgggaggggtccgtgccacctggcaaaccttctcagtacactggcccagtctaaccaaaacagagaccacaagcagggtccacctgaggtcacgtgtcagattcgaaagaaaacccgcactctctacaggagtgaccagctggaagagctggagaaaatcttccaggaggaccactaccctgactctgacaagcggcgagaaattgcccagacagtaggagttacaccccaacgcattatggtcaagggtgccggctccctcgttgccggctggtccggtgggggacccaccattgaaaccctggagctccagtcagagcgatcagcggtggcatgggtttggttccagaaccggagagcaaagtggaggaagatggaaaagctgaacggaaaggaatctaaggataatcctgccgcacccgggcccgcctcctctcagtgtagcagcgctgccgaaatcctaccggccgttcctatggagccaaagccggaccctttcccgcaagaatccccactcgacacatttcccgagccccccatgttactgactagcgatcaaactctggccccaacacaaccgagcgagggggcacagcgagttgtaacaccaccacttttctctcctcctcccgtgcgcagagcagatttgccctttcctctgggtcccgtccataccccacagcttatgcctctgctgatggacgtcgccggtagtgacagctcacacaaggacggtccttgcggttcgtggggaaccagcattacgctgcccccaccatgcagttatcttgaggagctcgagccgcaggactaccaacagtcaaaccaacccgggcccttccagttctcacaggcaccacaaccccctctctttcaatccccccagccaaagttaccttacctgcctacattcccattcagcatgccttcctccttgaccctgccccccccagaagacagcctcttcatgtttccctgcggccctagtggcggcacaagtcagggttactgccctggtgcatcctccggacagatcctgatgcagcctccagcggggaatatagggacggccagctggtcagatccatgcctaccggagctccccttcccaggaccattctgcccacaggccctgggtcacccacccggcggtgacggatacttcccagatctgtttcccaccccatgtccccaggcactgggaaggcagccctccagtgcgctctcctggatgccagagggcgctcgccctggcactgggcctcttctttccaaagcgaaggaggagcctccagctgcatccctggaccagccatccgccttggaggaggcccgaggtgacgataaaaattcccatgtcccttag

SEQ ID NO: 36284 - DNA, 2076 bp, Artificial Sequence
  derived and/or modified sequence
atggctctccttttgacactaacatcaccagacctggagggtacctgggacaccagagacaaggatggcttcaaagcccaggaggggccgcccctggctgtacctgaatttcctgtgtgtggactgtaccggatctacggagtctgtggctctttcagctccttcttcatcatccggtgcagcctttgtgctctggagaccctcaaatcaccccaacatgatcccttagagatacctgaacagtccctcaaactcatacccctggtgtctgggaaaagggaactcacaaggggccagaaagctggagagaagcccctggctgcaggacccggggaggaggaactgctccggggctcagcccctcatgctcaggacactcagagtgaggaactgccaccctcctgcaccatctcaggagagaagaagccgccagcagtctctggagaagccaccggggctgatgctgggagactgtgcccgcccccccgctccagggctccccacaaagacagaactctagcccgctccaggccccagactcagggggaagattgttccctcccagtgggagaggtgaagataggaaagaggtcctattctccagcccccgggaagcagaaaaagcctaatgccatgggtctggccccaacatcatctccgggtgcccctaactcagcccgtgccacacacaacccagtgccctgtgggtcaggccgggggccctgccacctggccaatctcctcagtacattggcgcagagcaaccaaaacagagaccacaagcaggggcccccggaagtgacctgccaaattaggaaaaagacacgaaccctataccgctcagatcagctggaggagctagagaagatattccaagaagaccactatcctgacagtgataaacgccgagagattgcccagacggtgggggtgaccccccagcgcatcatggtaaagggggccggctcactggtggcagggtggagtggcggagggcccaccattgaaacactcgaattgcagagtgagcgctcagcggtagcctgggtgtggttccagaatcgccgggccaagtggcgaaaaatggagaaactgaatgggaaagaaagcaaggacaatcctgcagcccctggccctgccagcagtcaatgcagctctgcagctgagatcctacctgctgtgcccatggagccaaagcctgaccctttccctcaggagtcccctctggatacctttccagagccccccatgctgctgacttctgaccagactttggcccccacccaacccagtgagggtgctcagagggtggtgacccccccactcttcagccccccacctgtgcgaagggccgatcttcctttcccccttggccctgtccacaccccccaactgatgccactgctgatggatgttgctggcagtgacagcagccacaaggacggcccctgtgggtcctgggggacaagcatcaccctgccacccccctgttcatatttggaggagctggagccccaggattaccaacagagcaaccagccaggacccttccagttctcccaggctccacagcccccgcttttccagtcccctcagcccaagttgccctacctccccactttccccttctccatgcccagttcactgacgcttccaccgcccgaagactctctctttatgtttccctgtggccccagcgggggcacatcgcagggctattgcccaggtgcctcctcaggacagatcctgatgcaaccacctgctgggaatataggtacagcctcctggagtgacccctgtttgccagagctgcccttccctggtccgttctgcccacaagctctggggcatcccccaggaggggatggctactttcctgatctatttccaactccctgcccccaggctctgggcaggcagccttcgtcagctctctcatggatgcctgaaggggccagaccagggactgggcccttactcagcaaggcaaaagaggaaccaccagctgcttccctggatcagccctcagcactggaggaggccagaggggatgacaagaatagccatgtcccctag

SEQ ID NO: 36285 - DNA, 2076 bp, Artificial Sequence
  derived and/or modified sequence
atggcactgttgctgacactgacctccccagacctggaaggcacctgggacactagggacaaagatggcttcaaagcccaggagggtccacctctggccgtgcccgaattcccagtctgtgggctgtacaggatctatggcgtttgtgggtcattctcaagctttttcatcatccgatgtagcctctgcgcactggagacattaaaatctcctcaacatgacccactcgagatccccgaacagtcgctgaagctgatcccattagtaagtggtaagcgtgagctgacccggggtcaaaaagctggcgagaaaccgttagccgctggacccggagaagaggaactgctcagaggctccgcccctcatgctcaggacacccagagtgaagagctcccaccaagttgcaccatttctggggagaagaagcctcccgcagtgtccggggaagcaacaggggcagacgcagggagactctgccctccaccccgatccagggctccacataaggacagaaccctggcgagatcaaggccgcagactcagggggaagattgctctctacctgtgggtgaagtaaaaatcgggaagcgatcatactcaccagctcccggtaaacaaaaaaagccaaacgcaatgggactggcccctacttccagccccggagcacccaattctgctagggccacgcacaaccccgttccttgtggcagcgggaggggcccatgtcatctggccaatctgctgagcacactggcccagtccaaccagaacagggaccataagcagggacccccagaggtgacatgccagatcaggaagaaaacgaggaccctttaccggtccgatcaactggaggaattagagaagatttttcaggaagaccattaccctgactcggataagagaagggagatagctcaaaccgttggagtgaccccccaacgaatcatggtgaagggcgcagggtcgctcgttgccggttggagcggagggggacccactatagagacgctcgagcttcagagcgaaaggtccgctgtggcctgggtgtggtttcagaaccggagggcaaagtggcgcaaaatggagaaacttaacggtaaagagtcaaaagacaaccccgcagcgccaggacctgctagtagccagtgttcctccgccgcagagattctgccagctgtgcctatggagcctaagcctgacccgtttcctcaggagagcccactggacacatttcccgaaccacccatgctgcttacttcagatcagaccctggcaccaactcagccatcagagggtgcacagcgtgtggtgaccccaccactgttcagtcctccgccagttcggcgagccgacctgccatttccgttaggacctgtacacacaccacaactaatgcccctacttatggacgttgctggcagtgactccagccacaaggatggtccatgcggatcatggggcacatccataacattaccccctccatgtagttacctggaagagctggaaccacaggactaccagcagagtaaccagcccggaccatttcaattttctcaggcccctcaacccccactatttcagagcccgcagccgaagcttccttatctcccaacttttccttttagtatgccgtcttctctcacccttcccccaccggaggactcattgttcatgttcccgtgtggcccatccggcggaactagccaggggtactgcccgggtgcttcttctggccaaatcctgatgcagccccctgcaggtaacatagggacggcttcctggtccgatccctgtctgccagagctgcccttccccggacccttctgcccccaggcactcggccacccccctggaggtgatggctatttccccgatttgttcccgacaccttgtcctcaggcccttggcaggcagccatcctcagcgcttagttggatgccagagggggctcgcccaggaactggtcccctcctatctaaggccaaagaagagcctcctgccgcttccttagatcagcccagcgccctagaggaagctcgcggtgacgacaagaatagccacgtcccgtag

SEQ ID NO: 36286 - DNA, 2076 bp, Artificial Sequence
  derived and/or modified sequence
atggccctgctgctgaccctgaccagccccgacctggagggcacctgggacaccagagacaaggacggcttcaaggcccaggagggcccccccctggccgtgcccgagttccccgtgtgcggcctgtacagaatctacggcgtgtgcggcagcttcagcagcttcttcatcatcagatgcagcctgtgcgccctggagaccctgaagagcccccagcacgaccccctggagatccccgagcagagcctgaagctgatccccctggtgagcggcaagagagagctgaccagaggccagaaggccggcgagaagcccctggccgccggccccggcgaggaggagctgctgagaggcagcgccccccacgcccaggacacccagagcgaggagctgccccccagctgcaccatcagcggcgagaagaagccccccgccgtgagcggcgaggccaccggcgccgacgccggcagactgtgccccccccccagaagcagagccccccacaaggacagaaccctggccagaagcagaccccagacccagggcgaggactgcagcctgcccgtgggcgaggtgaagatcggcaagagaagctacagccccgcccccggcaagcagaagaagcccaacgccatgggcctggcccccaccagcagccccggcgcccccaacagcgccagagccacccacaaccccgtgccctgcggcagcggcagaggcccctgccacctggccaacctgctgagcaccctggcccagagcaaccagaacagagaccacaagcagggcccccccgaggtgacctgccagatcagaaagaagaccagaaccctgtacagaagcgaccagctggaggagctggagaagatcttccaggaggaccactaccccgacagcgacaagagaagagagatcgcccagaccgtgggcgtgaccccccagagaatcatggtgaagggcgccggcagcctggtggccggctggagcggcggcggccccaccatcgagaccctggagctgcagagcgagagaagcgccgtggcctgggtgtggttccagaacagaagagccaagtggagaaagatggagaagctgaacggcaaggagagcaaggacaaccccgccgcccccggccccgccagcagccagtgcagcagcgccgccgagatcctgcccgccgtgcccatggagcccaagcccgaccccttcccccaggagagccccctggacaccttccccgagccccccatgctgctgaccagcgaccagaccctggcccccacccagcccagcgagggcgcccagagagtggtgaccccccccctgttcagccccccccccgtgagaagagccgacctgcccttccccctgggccccgtgcacaccccccagctgatgcccctgctgatggacgtggccggcagcgacagcagccacaaggacggcccctgcggcagctggggcaccagcatcaccctgccccccccctgcagctacctggaggagctggagccccaggactaccagcagagcaaccagcccggccccttccagttcagccaggccccccagccccccctgttccagagcccccagcccaagctgccctacctgcccaccttccccttcagcatgcccagcagcctgaccctgcccccccccgaggacagcctgttcatgttcccctgcggccccagcggcggcaccagccagggctactgccccggcgccagcagcggccagatcctgatgcagccccccgccggcaacatcggcaccgccagctggagcgacccctgcctgcccgagctgcccttccccggccccttctgcccccaggccctgggccacccccccggcggcgacggctacttccccgacctgttccccaccccctgcccccaggccctgggcagacagcccagcagcgccctgagctggatgcccgagggcgccagacccggcaccggccccctgctgagcaaggccaaggaggagccccccgccgccagcctggaccagcccagcgccctggaggaggccagaggcgacgacaagaacagccacgtgccctag

SEQ ID NO: 36287 - protein, 552 aa, Artificial Sequence
  derived and/or modified sequence
MSVLSPGDLKPKRGSPHRGSLDRTDASTDLAMRSWPSELGSRTCSTSATTTAPSNSTPIARHPGRTKGYNSDDNLCEPSLEFEVPNHRQYVSRPSSLESSRNTSSNSSPLNLKGSSEQLHGRSESFSSEDLIPSRDLATLPREASTPGRNALGRHEYPLPRNGPLPQEGAQKRGTAPPYVGVRPCSASPSSEMVTLEEFLEESNRSSPTHDTPSCRDDLLSDYFRKASDPPAIGGQPGPPAKKEGAKMPTNFVAPTVKMAAPTSEGRPLKPGQYVKPNFRLTEAEAPPSVAPRQAQPPQSLSLGRPRQAPVPPASHAPASRSASLSRAFSLASADLLRASGPEACKQESPQKLGAPEALGGRETGSHTLQSPAPPSSHSLARERTPLVGKAGSSCQGPGPRSRPLDTRRFSLAPPKEERLAPLHQSATAPAIATAGAGAAAAGSGSNSQLLHFSPAAAPAARTKPKAPPRSGEVATITPVRAGLSLSEGDGVPGQGCSEGLPAKSPGRSPDLAPHLGRALEDCSRGSVSKSSPASPEPGGDPQTVWYEYGCV

SEQ ID NO: 36288 - protein, 2028 aa, Artificial Sequence
  derived and/or modified sequence
MDVTVSELLELFLQSPLVTWVKTFGPFGSGSQDNLTMYMDLVDGIFLNQIMLQIDPRPTNQRINKHVNNDVNLRIQNLTILVRNIKTYYQEVLQQLIVMNLPNVLMIGRDPLSGKSMEEIKKVLLLVLGCAVQCERKEEFIERIKQLDIETQAGIVAHIQEVTHNQENVFDLQWLELPDVAPEELEALSRSMVLHLRRLIDQRDECTELIVDLTQERDYLQAQHPPSPIKSSSADSTPSPTSSLSSEDKQHLAVELADTKARLRRVRQELEDKTEQLVDTRHEVDQLVLELQKVKQENIQLAADARSARAYRDELDSLREKANRVERLELELTRCKEKLHDVDFYKARMEELREDNIILIETKAMLEEQLTAARARGDKVHELEKENLQLKSKLHDLELDRDTDKKRIEELLEENMVLEIAQKQSMNESAHLGWELEQLSKNADLSDASRKSFVFELNECASSRILKLEKENQSLQSTIQGLRDASLVLEESGLKCGELEKENHQLSKKIEKLQTQLEREKQSNQDLETLSEELIREKEQLQSDMETLKADKARQIKDLEQEKDHLNRAMWSLRERSQVSSEARMKDVEKENKALHQTVTEANGKLSQLEFEKRQLHRDLEQAKEKGERAEKLERELQRLQEENGRLARKVTSLETATEKVEALEHESQGLQLENRTLRKSLDTLQNVSLQLEGLERDNKQLDAENLELRRLVETMRFTSTKLAQMERENQQLEREKEELRKNVDLLKALGKKSERLELSYQSVSAENLRLQQSLESSSHKTQTLESELGELEAERQALRRDLEALRLANAQLEGAEKDRKALEQEVAQLEKDKKLLEKEAKRLWQQVELKDAVLDDSTAKLSAVEKESRALDKELARCRDAAGKLKELEKDNRDLTKQVTVHARTLTTLREDLVLEKLKSQQLSSELDKLSQELEKVGLNRELLLQEDDSGSDTKYKILEGRNESALKTTLAMKEEKIVLLEAQMEEKASLNRQLESELQMLKKECETLRQNQGEGQHLQNSFKHPAGKTAASHQGKEAWGPGHKEATMELLRVKDRAIELERNNAALQAEKQLLKEQLQHLETQNVTFSSQILTLQKQSAFLQEHNTTLQTQTAKLQVENSTLSSQSAALTAQYTLLQNHHTAKETENESLQRQQEQLTAAYEALLQDHEHLGTLHERQSAEYEALIRQHSCLKTLHRNLELEHKELGERHGDMLKRKAELEEREKVLTTEREALQQEQRTNALAMGENQRLRGELDRVNFLHHQLKGEYEELHAHTKELKTSLNNAQLELNRWQARFDELKEQHQTMDISLTKLDNHCELLSRLKGNLEEENHHLLSQIQLLSQQNQMLLEQNMENKEQYHEEQKQYIDKLNALRRHKEKLEEKIMDQYKFYDPPPKKKNHWIGAKALVKLIKPKKEGSRERLKSTVDSPPWQLESSDPASPAASQPLRSQAENPDTPALGSNCAEERDAHNGSVGKGPGDLKPKRGSPHRGSLDRTDASTDLAMRSWPSELGSRTCSTSATTTAPSNSTPIARHPGRTKGYNSDDNLCEPSLEFEVPNHRQYVSRPSSLESSRNTSSNSSPLNLKGSSEQLHGRSESFSSEDLIPSRDLATLPREASTPGRNALGRHEYPLPRNGPLPQEGAQKRGTAPPYVGVRPCSASPSSEMVTLEEFLEESNRSSPTHDTPSCRDDLLSDYFRKASDPPAIGGQPGPPAKKEGAKMPTNFVAPTVKMAAPTSEGRPLKPGQYVKPNFRLTEAEAPPSVAPRQAQPPQSLSLGRPRQAPVPPASHAPASRSASLSRAFSLASADLLRASGPEACKQESPQKLGAPEALGGRETGSHTLQSPAPPSSHSLARERTPLVGKAGSSCQGPGPRSRPLDTRRFSLAPPKEERLAPLHQSATAPAIATAGAGAAAAGSGSNSQLLHFSPAAAPAARTKPKAPPRSGEVATITPVRAGLSLSEGDGVPGQGCSEGLPAKSPGRSPDLAPHLGRALEDCSRGSVSKSSPASPEPGGDPQTVWYEYGCV

SEQ ID NO: 36289 - DNA, 6087 bp, Artificial Sequence
  derived and/or modified sequence
atggacgtgaccgtgagcgagctgctggagctgttcctgcagagccccctggtgacctgggtgaagaccttcggccccttcggcagcggcagccaggacaacctgaccatgtacatggacctggtggacggcatcttcctgaaccagatcatgctgcagatcgaccccagacccaccaaccagagaatcaacaagcacgtgaacaacgacgtgaacctgagaatccagaacctgaccatcctggtgagaaacatcaagacctactaccaggaggtgctgcagcagctgatcgtgatgaacctgcccaacgtgctgatgatcggcagagaccccctgagcggcaagagcatggaggagatcaagaaggtgctgctgctggtgctgggctgcgccgtgcagtgcgagagaaaggaggagttcatcgagagaatcaagcagctggacatcgagacccaggccggcatcgtggcccacatccaggaggtgacccacaaccaggagaacgtgttcgacctgcagtggctggagctgcccgacgtggcccccgaggagctggaggccctgagcagaagcatggtgctgcacctgagaagactgatcgaccagagagacgagtgcaccgagctgatcgtggacctgacccaggagagagactacctgcaggcccagcacccccccagccccatcaagagcagcagcgccgacagcacccccagccccaccagcagcctgagcagcgaggacaagcagcacctggccgtggagctggccgacaccaaggccagactgagaagagtgagacaggagctggaggacaagaccgagcagctggtggacaccagacacgaggtggaccagctggtgctggagctgcagaaggtgaagcaggagaacatccagctggccgccgacgccagaagcgccagagcctacagagacgagctggacagcctgagagagaaggccaacagagtggagagactggagctggagctgaccagatgcaaggagaagctgcacgacgtggacttctacaaggccagaatggaggagctgagagaggacaacatcatcctgatcgagaccaaggccatgctggaggagcagctgaccgccgccagagccagaggcgacaaggtgcacgagctggagaaggagaacctgcagctgaagagcaagctgcacgacctggagctggacagagacaccgacaagaagagaatcgaggagctgctggaggagaacatggtgctggagatcgcccagaagcagagcatgaacgagagcgcccacctgggctgggagctggagcagctgagcaagaacgccgacctgagcgacgccagcagaaagagcttcgtgttcgagctgaacgagtgcgccagcagcagaatcctgaagctggagaaggagaaccagagcctgcagagcaccatccagggcctgagagacgccagcctggtgctggaggagagcggcctgaagtgcggcgagctggagaaggagaaccaccagctgagcaagaagatcgagaagctgcagacccagctggagagagagaagcagagcaaccaggacctggagaccctgagcgaggagctgatcagagagaaggagcagctgcagagcgacatggagaccctgaaggccgacaaggccagacagatcaaggacctggagcaggagaaggaccacctgaacagagccatgtggagcctgagagagagaagccaggtgagcagcgaggccagaatgaaggacgtggagaaggagaacaaggccctgcaccagaccgtgaccgaggccaacggcaagctgagccagctggagttcgagaagagacagctgcacagagacctggagcaggccaaggagaagggcgagagagccgagaagctggagagagagctgcagagactgcaggaggagaacggcagactggccagaaaggtgaccagcctggagaccgccaccgagaaggtggaggccctggagcacgagagccagggcctgcagctggagaacagaaccctgagaaagagcctggacaccctgcagaacgtgagcctgcagctggagggcctggagagagacaacaagcagctggacgccgagaacctggagctgagaagactggtggagaccatgagattcaccagcaccaagctggcccagatggagagagagaaccagcagctggagagagagaaggaggagctgagaaagaacgtggacctgctgaaggccctgggcaagaagagcgagagactggagctgagctaccagagcgtgagcgccgagaacctgagactgcagcagagcctggagagcagcagccacaagacccagaccctggagagcgagctgggcgagctggaggccgagagacaggccctgagaagagacctggaggccctgagactggccaacgcccagctggagggcgccgagaaggacagaaaggccctggagcaggaggtggcccagctggagaaggacaagaagctgctggagaaggaggccaagagactgtggcagcaggtggagctgaaggacgccgtgctggacgacagcaccgccaagctgagcgccgtggagaaggagagcagagccctggacaaggagctggccagatgcagagacgccgccggcaagctgaaggagctggagaaggacaacagagacctgaccaagcaggtgaccgtgcacgccagaaccctgaccaccctgagagaggacctggtgctggagaagctgaagagccagcagctgagcagcgagctggacaagctgagccaggagctggagaaggtgggcctgaacagagagctgctgctgcaggaggacgacagcggcagcgacaccaagtacaagatcctggagggcagaaacgagagcgccctgaagaccaccctggccatgaaggaggagaagatcgtgctgctggaggcccagatggaggagaaggccagcctgaacagacagctggagagcgagctgcagatgctgaagaaggagtgcgagaccctgagacagaaccagggcgagggccagcacctgcagaacagcttcaagcaccccgccggcaagaccgccgccagccaccagggcaaggaggcctggggccccggccacaaggaggccaccatggagctgctgagagtgaaggacagagccatcgagctggagagaaacaacgccgccctgcaggccgagaagcagctgctgaaggagcagctgcagcacctggagacccagaacgtgaccttcagcagccagatcctgaccctgcagaagcagagcgccttcctgcaggagcacaacaccaccctgcagacccagaccgccaagctgcaggtggagaacagcaccctgagcagccagagcgccgccctgaccgcccagtacaccctgctgcagaaccaccacaccgccaaggagaccgagaacgagagcctgcagagacagcaggagcagctgaccgccgcctacgaggccctgctgcaggaccacgagcacctgggcaccctgcacgagagacagagcgccgagtacgaggccctgatcagacagcacagctgcctgaagaccctgcacagaaacctggagctggagcacaaggagctgggcgagagacacggcgacatgctgaagagaaaggccgagctggaggagagagagaaggtgctgaccaccgagagagaggccctgcagcaggagcagagaaccaacgccctggccatgggcgagaaccagagactgagaggcgagctggacagagtgaacttcctgcaccaccagctgaagggcgagtacgaggagctgcacgcccacaccaaggagctgaagaccagcctgaacaacgcccagctggagctgaacagatggcaggccagattcgacgagctgaaggagcagcaccagaccatggacatcagcctgaccaagctggacaaccactgcgagctgctgagcagactgaagggcaacctggaggaggagaaccaccacctgctgagccagatccagctgctgagccagcagaaccagatgctgctggagcagaacatggagaacaaggagcagtaccacgaggagcagaagcagtacatcgacaagctgaacgccctgagaagacacaaggagaagctggaggagaagatcatggaccagtacaagttctacgaccccccccccaagaagaagaaccactggatcggcgccaaggccctggtgaagctgatcaagcccaagaaggagggcagcagagagagactgaagagcaccgtggacagccccccctggcagctggagagcagcgaccccgccagccccgccgccagccagcccctgagaagccaggccgagaaccccgacacccccgccctgggcagcaactgcgccgaggagagagacgcccacaacggcagcgtgggcaagggccccggcgacctgaagcccaagagaggcagcccccacagaggcagcctggacagaaccgacgccagcaccgacctggccatgagaagctggcccagcgagctgggcagcagaacctgcagcaccagcgccaccaccaccgcccccagcaacagcacccccatcgccagacaccccggcagaaccaagggctacaacagcgacgacaacctgtgcgagcccagcctggagttcgaggtgcccaaccacagacagtacgtgagcagacccagcagcctggagagcagcagaaacaccagcagcaacagcagccccctgaacctgaagggcagcagcgagcagctgcacggcagaagcgagagcttcagcagcgaggacctgatccccagcagagacctggccaccctgcccagagaggccagcacccccggcagaaacgccctgggcagacacgagtaccccctgcccagaaacggccccctgccccaggagggcgcccagaagagaggcaccgcccccccctacgtgggcgtgagaccctgcagcgccagccccagcagcgagatggtgaccctggaggagttcctggaggagagcaacagaagcagccccacccacgacacccccagctgcagagacgacctgctgagcgactacttcagaaaggccagcgacccccccgccatcggcggccagcccggcccccccgccaagaaggagggcgccaagatgcccaccaacttcgtggcccccaccgtgaagatggccgcccccaccagcgagggcagacccctgaagcccggccagtacgtgaagcccaacttcagactgaccgaggccgaggccccccccagcgtggcccccagacaggcccagcccccccagagcctgagcctgggcagacccagacaggcccccgtgccccccgccagccacgcccccgccagcagaagcgccagcctgagcagagccttcagcctggccagcgccgacctgctgagagccagcggccccgaggcctgcaagcaggagagcccccagaagctgggcgcccccgaggccctgggcggcagagagaccggcagccacaccctgcagagccccgccccccccagcagccacagcctggccagagagagaacccccctggtgggcaaggccggcagcagctgccagggccccggccccagaagcagacccctggacaccagaagattcagcctggccccccccaaggaggagagactggcccccctgcaccagagcgccaccgcccccgccatcgccaccgccggcgccggcgccgccgccgccggcagcggcagcaacagccagctgctgcacttcagccccgccgccgcccccgccgccagaaccaagcccaaggccccccccagaagcggcgaggtggccaccatcacccccgtgagagccggcctgagcctgagcgagggcgacggcgtgcccggccagggctgcagcgagggcctgcccgccaagagccccggcagaagccccgacctggccccccacctgggcagagccctggaggactgcagcagaggcagcgtgagcaagagcagccccgccagccccgagcccggcggcgacccccagaccgtgtggtacgagtacggctgcgtgtag

SEQ ID NO: 36290 - DNA, 6087 bp, Artificial Sequence
  derived and/or modified sequence
atggatgtaaccgtgtccgaactcctggaactgttcctgcaatcccccttggttacatgggttaaaacctttggaccctttggcagtggtagccaggacaacctgacaatgtacatggacctggtggatggcatttttctgaatcagatcatgctgcagattgatcccaggcccacaaatcagcgaattaacaagcatgtgaataatgacgtcaacctgcgaattcaaaacttgaccatactggtaagaaacatcaaaacttactatcaggaagtgttgcagcagctcattgtgatgaacttgccaaacgtgctaatgatcgggcgagacccgttaagtggcaagtcaatggaagaaatcaaaaaggttttactgcttgtgttaggatgtgccgttcagtgtgaaaggaaagaggagttcattgaaagaattaaacaactggatatcgagacacaggcaggtatagttgctcacattcaggaagtcacccacaatcaggaaaatgttttcgatcttcagtggctggagctccctgatgtggccccagaggagctggaggccttgtcccggtccatggtgttgcacttaaggaggctaatagaccaaagagacgaatgtaccgagcttattgttgatttaacgcaggaaagggattatctgcaggctcaacatcctcctagcccaatcaaaagttcctccgccgactcaacaccgagccccacctctagcctgtcttcagaagataaacaacatcttgccgtagaactggcggacactaaagcccgcctgaggcgagttcggcaggagttagaggataagactgagcagctggtggacaccaggcatgaagtggaccagctggttctggagcttcagaaagtcaagcaggagaatatacagctcgccgctgacgctcgctctgccagagcttaccgggatgaactcgatagtctgagagagaaggctaaccgtgtggagcgactcgagctcgagctgacccgttgcaaggaaaagctccatgacgtggacttttataaagccaggatggaagagctgagagaggacaacatcattctgatcgagacaaaagcaatgctggaggaacaattgaccgccgccagggctcggggagataaggtccacgaattagagaaggagaacttgcaactcaaaagcaaactgcacgatctcgagctggaccgggatacggataagaagaggatcgaggaactcctggaagaaaacatggtcttagagatcgcccaaaaacagagtatgaatgagtctgcccatctggggtgggagctcgaacagctgtcaaagaatgctgatttgtctgacgcctcacgcaaaagtttcgtgttcgagttgaacgaatgtgccagttccagaattttaaaacttgaaaaagagaatcagagtctccaatccacaatacaaggactaagagacgcctctctggtgctggaagagtccggacttaaatgtggagaactcgaaaaagagaaccatcagttatccaaaaagatcgagaaattgcagacccaacttgaacgggagaaacagagtaatcaagacttggagaccttatccgaagagctgattagagagaaggaacagctccagtcagatatggagactctgaaggcagacaaggccaggcaaataaaggatctggagcaggagaaggatcacttgaatagagccatgtggagcctgcgcgagcgttcccaggtctcctcagaggctcggatgaaggatgtcgaaaaggaaaataaggctctgcaccaaaccgtaactgaggccaatgggaagttgagtcaactggaattcgagaagaggcagttacacagagaccttgaacaagcaaaggagaagggtgagagagccgagaaactcgagagggaattacaacgcctccaggaggagaatggtcgcctggctaggaaagtgacatccttggaaacagcaacagagaaagtggaggcccttgagcatgagtctcagggcctgcagttggagaataggacgctgaggaagagcctggacaccctccagaatgttagtctgcagctcgagggcctcgagagggataataagcagttagatgcagaaaacctcgaactgagaagactggttgagaccatgcgattcacgtccaccaaactggcccaaatggagcgggagaatcaacaactggagagggaaaaggaggagctaaggaaaaatgtagacctgctgaaagcccttggcaaaaagtccgagagattagaactctcctaccagtccgtgtcagcagagaacttgcgcctgcagcagtccctcgaatcttcaagtcacaagacacagacccttgagtccgagcttggagagctcgaggccgagcgacaggcgctccggcgggacctagaagcgctgcggctcgccaatgcacagctagaaggcgctgagaaggacaggaaggcccttgaacaggaagtggcccagttagaaaaggacaagaagctgctcgaaaaagaggcgaaaaggctgtggcagcaggttgagctgaaagatgcagtcctagatgattcaaccgccaaactgtccgctgtcgaaaaggagtccagggcattggataaggaacttgccaggtgcagagacgcagctgggaagctaaaagagctggagaaggataaccgagatttgaccaagcaggtcaccgttcacgcacgcacgctcaccaccctgcgcgaagatctcgtgcttgagaagctcaaatcccagcaactgagttccgaactagacaaacttagccaggagctcgaaaaggtaggcctcaatcgtgagctcttacttcaggaagatgactccggttccgatacaaaatacaaaatattggagggcagaaatgaatccgccctgaaaaccaccctggcgatgaaggaagagaagattgtgttgctggaggctcagatggaggaaaaggccagcttgaacagacagctggaatccgaactccagatgctgaaaaaggaatgcgaaaccctcaggcagaaccagggggagggccagcacttgcagaattcttttaagcatcctgcagggaagacagccgcaagtcaccaaggtaaagaggcatggggacccggacataaggaagctactatggagcttctgagggtaaaagacagagccatcgaattggaaagaaataacgccgccctccaggcagagaaacagctgctcaaagaacagttgcaacacctggagacccagaatgtcaccttctcatcgcaaatcctcacgctgcaaaaacagtccgccttcttacaggagcacaatacaaccctgcaaacacagacagccaagcttcaagtcgagaactcaactctgtccagccagagcgccgctctgacagcccagtacacactcctgcagaatcatcacacagctaaggagactgagaacgagagcctccaaaggcagcaggagcagctgacggccgcttatgaagcactgctccaggatcacgagcatctgggaaccttacatgaaaggcagtcagctgagtatgaggccctcattcgccagcatagctgtcttaagaccttacacaggaatcttgagttggaacataaggagctcggagaaaggcacggggatatgctcaaacgaaaggccgagctcgaggagagagagaaggtgctcaccaccgagcgcgaagcactccaacaggaacagagaacaaacgcactggccatgggggaaaaccagcgtctccgcggtgagttagatcgcgttaatttcctgcatcaccagttgaaaggcgaatacgaggagctgcatgctcacacaaaggaacttaaaactagcttaaacaacgctcaactcgagctaaacagatggcaggccagattcgatgagttgaaagagcagcaccagaccatggacatttccctgaccaaactcgacaaccactgcgagctattatcgcggttgaagggcaacctcgaggaagaaaaccaccatttgctgtcccaaatacagctgctttcacagcagaaccagatgctacttgagcagaacatggagaacaaggagcagtaccatgaggagcagaagcagtacatcgacaaactcaacgctttgcgcagacacaaagagaagcttgaggagaaaatcatggatcagtacaagttctatgatccaccacctaagaagaagaaccattggataggcgcgaaggccctggtgaagctgatcaaaccaaagaaggagggctcacgagaaagattgaagagcacagtagatagcccaccctggcaactggaatcttcggaccctgcatctcctgccgcctcacagcctctgcgctctcaggcagagaacccggacactcccgcccttggctctaattgcgcggaagagcgggatgcccacaatggatcagtcggcaaggggcccggcgacttgaaacctaagcggggttcccctcacagaggcagtctggatagaaccgatgcttccacagatctcgcaatgcgctcttggccttccgagctcggctcaaggacgtgtagtaccagtgccaccacaactgcaccgtcaaacagtaccccaattgccaggcacccaggtcgtactaaggggtacaattccgacgacaacttgtgtgaaccatctctggagtttgaggttccgaaccatcgccagtatgtatctaggcccagttcactggagtcttcacgcaacacttcatcgaattcaagcccgttgaacctgaaaggcagctcggagcaactccacggtaggagcgagtcattttcttctgaggatttgattcctagccgggatctggccaccctccccagagaggcaagcactcctggtcggaatgcactcgggaggcacgagtacccactgcccagaaatggccctctgccccaagagggcgctcagaaaaggggaacagccccgccttacgtcggcgtgcgcccatgctcagccagcccatcttcggaaatggttacattggaggagttcctggaagaatccaacagatcctcgccaacacatgacaccccctcatgtcgcgatgatctgttaagtgattattttcggaaagctagtgaccccccagcaatcggaggccagccaggacctcccgctaagaaggagggcgccaaaatgcctacaaatttcgtggctcccaccgtgaagatggcagctcctacaagtgaaggaagaccactaaaaccggggcagtatgtcaaaccgaatttcagactgacagaggccgaggccccacctagcgtggctcctcgacaagctcagcctccacagtcattgtcgctgggaaggccccgacaagcccccgtcccgccagcatcccatgctcccgcctccagaagcgcgagtctctcacgtgccttcagcctcgcaagcgcagacttgctgcgggctagcggacctgaggcatgcaaacaggaatcgcctcagaaactaggcgcacccgaggctctggggggacgggaaacaggatctcacaccctgcagagccccgcacctcccagttcccacagcctcgcccgagaaagaacccccttagtgggaaaagctgggtctagctgccagggtccgggcccgcggagtaggccactggacacacgacgcttcagtttagcgcccccaaaagaggaaaggctggcgcccctgcaccagagcgccacagcccctgcgattgcgactgcaggcgcaggtgcggccgctgcaggaagcggcagcaacagccagctgctccactttagtcccgctgctgccccagcggcaaggaccaaaccaaaagcaccaccccgatccggtgaggtggctaccataacccccgtccgcgcggggctgtccctaagtgaaggagatggcgtaccaggccaaggctgtagcgaaggcctgcctgcaaaatcacccggtaggtcacctgatcttgccccccacctcggaagagctctggaggactgttccagaggctctgtcagtaagtcaagccccgccagccccgagcctggcggcgatcctcaaaccgtctggtatgagtacggatgtgtatag

SEQ ID NO: 36291 - DNA, 6087 bp, Artificial Sequence
  derived and/or modified sequence
atggatgtgacagtgtctgagctgctggagctgttcctgcagagccccctggtgacctgggtgaagaccttcggcccctttggaagtggcagccaggacaacctgaccatgtacatggacctggtggatggcatcttcctgaaccagatcatgctgcagattgacccccggcccaccaaccagaggatcaacaagcacgtgaacaatgatgtgaacctgcgcatccagaacctgaccatcctggtgaggaacatcaagacctactaccaggaggtgctgcagcagctgattgtgatgaacctgcccaacgtgctgatgattggccgggaccccctgagcggcaagtccatggaggagatcaagaaggtgctgctgctggtgctgggctgtgctgtgcagtgtgagaggaaggaggagttcatcgagcgcatcaagcagctggacatcgagacccaggccggcatcgtggcccacatccaggaggtgacccacaaccaggagaatgtgtttgacctgcagtggctggagctgcctgatgtggcccctgaggagctggaggccctgagccgctccatggtgctgcacctgcggcggctgattgaccagagagatgaatgtacagagctgattgtggacctgacccaggagcgggactacctgcaggcccagcacccccccagccccatcaagagcagcagcgctgacagcacccccagccccaccagcagcctgagcagcgaggacaagcagcacctggccgtggagctggccgacaccaaggcccggctgcggcgggtgcggcaggagctggaggacaagacagagcagctggtggacaccaggcatgaggtggaccagctggtgctggagctgcagaaggtgaagcaggagaacatccagctggccgcagatgcccggagcgcccgggcctacagagatgagctggacagcctgcgggagaaggccaacagagtggagcggctggagctggagctgacccgctgcaaggagaagctgcatgatgtggacttctacaaggccaggatggaggagctgcgggaggacaacatcatcctgattgagaccaaggccatgctggaggagcagctgacagctgcccgggcccggggggacaaggtgcatgagctggagaaggagaacctgcagctgaagagcaagctgcatgacctggagctggaccgggacacagacaagaagagaattgaggagctgctggaggagaacatggtgctggagatcgcccagaagcagagcatgaatgaaagtgcccacctgggctgggagctggagcagctgagcaagaatgctgacctgagtgatgccagcaggaagagctttgtgtttgagctgaatgaatgtgccagcagccgcatcctgaagctggagaaggagaaccagagcctgcagagcaccatccagggcctgagagatgccagcctggtgctggaggagagcggcctgaagtgtggggagctggagaaggagaaccaccagctgagcaagaagattgagaagctgcagacccagctggagcgggagaagcagagcaaccaggacctggagaccctgtctgaggagctgatccgggagaaggagcagctgcagagcgacatggagaccctgaaggctgacaaggcccggcagatcaaggacctggagcaggagaaggaccacctgaacagagccatgtggagcctgcgggagaggagccaggtgtcctctgaggccaggatgaaggatgtggagaaggagaacaaggccctgcaccagacagtgacagaggccaacgggaagctgagccagctggagtttgagaagaggcagctgcaccgggacctggagcaggccaaggagaagggggagcgggcagagaagctggagcgggagctgcagaggctgcaggaggagaatggccgcctggccaggaaggtgaccagcctggagacagccacagagaaggtggaggccctggagcacgagagccagggcctgcagctggagaacagaaccctgaggaagagcctggacaccctgcagaatgtgtccctgcagctggagggcctggagcgggacaacaagcagctggatgctgagaacctggagctgcggcggctggtggagaccatgaggttcaccagcaccaagctggcccagatggagcgggagaaccagcagctggagcgggagaaggaggagctgaggaagaatgtggacctgctgaaggccctgggcaagaagtctgagcggctggagctgagctaccagagcgtgtctgctgagaacctgcggctgcagcagagcctggagagcagcagccacaagacccagaccctggagagcgagctgggggagctggaggccgagcggcaggccctgcggcgggacctggaggccctgcggctggccaatgcccagctggagggcgctgagaaggacaggaaggccctggagcaggaggtggcccagctggagaaggacaagaagctgctggagaaggaggccaagaggctgtggcagcaggtggagctgaaggatgctgtgctggatgacagcacagccaagctgtctgctgtggagaaggagagccgggccctggacaaggagctggcccgctgcagagatgctgctgggaagctgaaggagctggagaaggacaacagagacctgaccaagcaggtgacagtgcacgcccggaccctgaccaccctgcgggaggacctggtgctggagaagctgaagagccagcagctgagcagcgagctggacaagctgagccaggagctggagaaggtgggcctgaaccgggagctgctgctgcaggaggatgattctggcagtgacaccaagtacaagatcctggagggcagaaatgaaagtgccctgaagaccaccctggccatgaaggaggagaagatcgtgctgctggaggcccagatggaggagaaggccagcctgaaccggcagctggagagcgagctgcagatgctgaagaaggaatgtgagaccctgcggcagaaccagggcgagggccagcacctgcagaacagcttcaagcaccctgctgggaagacagctgccagccaccagggcaaggaggcctggggccctggccacaaggaggccaccatggagctgctgcgggtgaaggaccgggccatcgagctggagaggaacaatgctgccctgcaggccgagaagcagctgctgaaggagcagctgcagcacctggagacccagaatgtgaccttcagcagccagatcctgaccctgcagaagcagagcgccttcctgcaggagcacaacaccaccctgcagacccagacagccaagctgcaggtggagaacagcaccctgagcagccagagcgctgccctgacagcccagtacaccctgctgcagaaccaccacacagccaaggagacagaaaatgaaagcctgcagaggcagcaggagcagctgacagctgcctatgaggccctgctgcaggaccacgagcacctgggcaccctgcacgagcggcagagcgcagaatatgaggccctgatccggcagcacagctgcctgaagaccctgcacaggaacctggagctggagcacaaggagctgggggagagacatggagacatgctgaagaggaaggccgagctggaggagcgggagaaggtgctgaccacagagcgggaggccctgcagcaggagcagaggaccaatgccctggccatgggagagaaccagaggctgcggggggagctggacagagtgaacttcctgcaccaccagctgaagggggagtatgaggagctgcacgcccacaccaaggagctgaagaccagcctgaacaatgcccagctggagctgaaccgctggcaggccaggtttgatgagctgaaggagcagcaccagaccatggacatcagcctgaccaagctggacaaccactgtgagctgctgagccggctgaagggcaacctggaggaggagaaccaccacctgctgagccagatccagctgctgagccagcagaaccagatgctgctggagcagaacatggagaacaaggagcagtaccacgaggagcagaagcagtacatcgacaagctgaatgccctgcggcggcacaaggagaagctggaggagaagatcatggaccagtacaagttctatgaccccccacccaagaagaagaaccactggattggagccaaggccctggtgaagctgatcaagcccaagaaggagggcagccgggagcggctgaagagcacagtggacagccccccctggcagctggagagcagtgaccctgccagccctgctgccagccagcccctgcggagccaggccgagaacccagacaccccagccctgggcagcaactgtgccgaggagagagatgcccacaatggatctgtgggcaagggccctggggacctgaagcccaagaggggcagcccccaccggggcagcctggacagaacagatgccagcacagacctggccatgaggtcctggcccagcgagctgggcagcaggacctgcagcaccagcgccaccaccacagcccccagcaacagcacccccatcgcccggcaccctggccgcaccaagggctacaacagtgatgacaacctgtgtgagcccagcctggagtttgaggtgcccaaccaccggcagtatgtgtcccggcccagcagcctggagagcagcaggaacaccagcagcaacagcagccccctgaacctgaagggcagcagcgagcagctgcacggccgctctgagagcttcagcagtgaagatctcatccccagccgggacctggccaccctgccccgggaggccagcaccccaggaagaaatgccctgggcagacatgagtaccccctgcccagaaatggccccctgccccaggagggcgcccagaagaggggcacagccccaccctacgtgggcgtgcggccctgcagcgccagccccagcagcgagatggtgaccctggaggagttcctggaggagagcaacagaagcagccccacccatgacacccccagctgcagagatgacctgctgagtgactacttcaggaaggccagtgaccccccagccatcggcggccagcccggccccccagccaagaaggagggcgccaagatgcccaccaactttgtggcccccaccgtgaagatggccgcccccaccagcgagggccggcccctgaagccaggccagtatgtgaagcccaacttccggctgacagaggccgaggcccctccttctgtggccccccggcaggcccagcccccccagagcctgagcctgggccggccccggcaggcccctgtgcccccagccagccacgccccagccagccgcagcgccagcctgagccgggccttcagcctggccagcgctgacctgctgcgggccagcggccctgaggcctgcaagcaggagagcccccagaagctgggcgcccctgaggccctgggcggccgggagaccggcagccacaccctgcagagccctgccccacccagcagccacagcctggcccgggagaggacccccctggtgggcaaggccggcagcagctgccagggccctggccccaggagccggcccctggacacccggcgcttcagcctggccccacccaaggaggagcggctggcccccctgcaccagagcgccacagccccagccatcgccacagctggagctggagctgctgctgctggcagcggcagcaacagccagctgctgcacttctccccagctgctgccccagctgcccggaccaagcccaaggccccacccaggtctggagaggtggccaccatcacccctgtgcgggccggcctgagcctgtctgaaggagatggagtgcccggccagggctgcagcgagggcctgcctgccaagagccctggccgcagcccagacctggccccccacctgggccgggccctggaggactgcagccggggctctgtgtccaagagcagccctgccagccctgagcccggcggggacccccagacagtgtggtatgaatatggctgtgtgtag

SEQ ID NO: 36292 - DNA, 7474 bp, Artificial Sequence
  derived and/or modified sequence
tgctcgctgcggagccgttttgtgccgcggcgcgggggaacggggacgcggggcggggggcgcggagccggcgggcgcagcctcagcatggacgtgacagtctcggagctcctggagctcttcctgcagagcccgctggtgacctgggtgaaaacttttggcccgtttggaagcggcagccaggacaacctgactatgtacatggatttagtggacggcatctttttgaaccaaattatgctgcaaatagatcccaggcccacaaatcaacgcatcaataagcacgtcaacaatgatgtgaaccttcgcattcagaatttgaccatcttggtgagaaacattaagacctactaccaggaagttctccagcagctgattgtaatgaatttgcccaatgttttgatgattggcagagacccactgtctgggaagagcatggaggaaatcaagaaggtgctgctgctggtgctgggctgtgctgtccagtgtgagaggaaagaggagttcattgaaagaatcaaacagctggacattgagacccaggctggcatcgtggcccatatccaggaggtgactcacaaccaagagaacgtgtttgacctgcagtggctggagctgcccgacgtggctccggaggagctggaggccctgtcgaggagcatggtgctccacctgcggaggctcatcgaccagcgggacgagtgcaccgagctgatcgtggacctcactcaggaacgggactacctgcaggcacagcatccacccagccccatcaagtcctccagcgccgactccactcccagccccaccagcagcctctctagcgaagacaagcagcacctggccgtagagctggccgacaccaaggccaggctgcggcgcgtcaggcaggagctggaggataagacagagcagcttgtggacaccagacatgaggtggaccagctggtgctggaactgcagaaagttaagcaggagaacatccagctagcggcagacgcccggtctgctcgtgcctatcgagacgagctggattccctgcgggagaaggcgaaccgcgtggagaggctggagctggagctgacccgctgcaaggagaagctgcacgacgtggacttctacaaggcccgcatggaggagctgagagaagataatatcattttaattgaaaccaaggccatgctggaggaacagctgactgctgctcgggcccggggcgataaagtccatgagctggaaaaggagaacctgcagctgaaatccaagcttcacgacctggaattggaccgggacacagataagaaacgaattgaggagctgctggaagaaaacatggtccttgagattgcacagaagcagagcatgaacgaatctgcccaccttggctgggagctggagcagctgtccaagaacgcagacttgtcagacgcctccaggaagtcgtttgtgtttgagctgaacgaatgtgcgtccagccgcatcctgaagctggagaaggagaatcagagcctccagagcaccatccaggggctgcgggacgcgtccctggtgttggaggagagcggcctcaagtgcggggagctggagaaggagaaccaccagctcagcaagaagattgaaaagttacaaacccagctggagagagaaaagcagagcaaccaagatctggagaccctcagtgaggagctgatcagagagaaggagcagctgcagagtgacatggagaccctgaaggctgacaaagccaggcagatcaaggaccttgagcaggaaaaggaccacctcaaccgagccatgtggtcgctgcgggagaggtcgcaggtcagcagtgaggcccgcatgaaagacgtggagaaggagaacaaagccctccaccagacggtgacggaggccaatggcaagctcagccagttggagtttgagaagcggcagctgcacagggacttggagcaggccaaggagaagggggagcgggcagagaagctggagagggagctacagcgactccaggaggagaacgggaggctggccaggaaggtgacctccctggagacagccaccgagaaagtcgaggccctggagcatgagagccagggcctgcagctggagaaccggactctgaggaagtctctggacaccttgcagaacgtgtccctgcagcttgagggcctggagcgtgacaacaagcagctggacgcagagaacctggagctgcgcaggctggtggagaccatgcgcttcaccagcaccaagctggcacagatggagagggagaaccagcagctggagcgtgagaaggaggagctgaggaagaacgtggatctgctcaaggcgctgggcaagaagtcagagcgcctggagctcagctaccagagcgtgagcgctgagaacctccggctgcagcagagcctggagagcagcagccacaagacgcagaccttggagagtgagctgggcgagctggaggctgagcgccaggcgctgcggcgggacctggaggccctccggctggccaatgcacagttggagggggccgagaaggacaggaaggccctggagcaggaggtggcccagctcgagaaggataagaagctgctggagaaggaggccaagcggctgtggcagcaggtggagctcaaggatgcagtcttggacgatagcactgccaaactgtccgccgttgagaaggagagccgcgcgctggacaaggagctggcccgctgcagggacgcagccggcaagctgaaggagctggagaaggacaaccgggacctcaccaagcaagtcaccgtgcatgcaaggacactgacaactctgagggaggacctggtgctcgagaagctgaagagccagcagctcagcagtgagctggacaagctgagccaggaactggagaaggtcggcctcaacagggagctgctgttgcaggaggacgacagcggcagtgacacaaaatacaagattttggagggcagaaatgaatcagcattaaaaacaacactagccatgaaagaagaaaagattgtgctcttagaagcacagatggaagagaaagcgagcctaaatcgccagttagagagtgagctgcagatgctaaagaaggagtgtgagaccctcaggcagaaccagggagaggggcagcacttgcagaactctttcaagcaccctgcggggaagacagccgccagtcaccaggggaaggaggcctgggggcccggccataaggaagccaccatggagcttctccgagtgaaggaccgggccatcgagctggagcggaataatgcagctctgcaggctgagaagcagctgctaaaggaacagctgcagcacctggagacccagaacgtgaccttcagcagccagatcttgacactgcagaaacagagcgccttcctgcaggagcacaacaccacactgcagacccagaccgccaagctgcaggtggagaactccacgctgagttcccagagcgcagcgctcaccgcgcagtacacgctgctgcagaaccaccacacggccaaggagacggagaacgaaagcctgcagaggcagcaggagcaacttacagcggcctacgaggccctgctgcaggaccacgagcacctgggcacgctgcacgagcggcaatcggccgagtacgaggccctcatccgccagcacagctgcctaaagacactgcatcggaatctggagctggagcacaaggagctcggggagaggcacggtgacatgctgaagcgcaaggcggagctggaggagcgggagaaggtcttgaccactgagcgagaggcgctgcagcaggagcagaggacaaacgccctcgccatgggcgagaaccagaggctgcggggcgagctggacagggtcaatttcctgcaccaccagctgaagggggagtacgaggagctgcacgcccacaccaaggagctgaaaacctcactgaacaacgcgcagctggagctcaaccgctggcaggcccgcttcgacgagctgaaggagcagcaccagaccatggacatctcgctgaccaagctggacaaccactgtgagctgctctcccgtctcaaggggaacttggaggaagaaaatcatcacctcctgagccagatccagctgttgagccagcagaaccagatgcttctggagcagaacatggagaacaaggagcagtaccatgaggagcagaagcagtacatagacaaattaaatgccttacgaagacataaggaaaagctggaagaaaaaatcatggatcaatacaagttctatgatcctcctccaaagaagaagaaccactggattggagccaaagccttagtcaaactcatcaaaccaaagaaagagggttcgagggaacgcttaaaatccaccgtggacagccctccctggcagctggagtcctcagaccccgcctcgccggcggcctctcagccgctcagatcacaggccgagaaccccgacacccccgcactgggctccaactgtgcagaagagcgcgacgcccacaacgggtctgtggggaaaggccctggggatctaaaaccaaagcgaggctccccacacagaggcagccttgaccgcacagatgcctccaccgatctggccatgaggtcctggccctcggagctgggctcccggacttgctcaacttcagccaccactacagccccttccaactccacccccatcgcccggcacccaggccgcaccaaaggctataactcagatgacaacctctgtgagccatccctggagtttgaggtccccaaccacaggcagtacgtgtcgcggccaagtagcttagagagcagtagaaacacatccagcaacagctcacctcttaacctaaaaggctcctccgagcagctccatggccggtctgagagcttcagcagcgaagacctgatccccagcagggacctggccactttgccccgggaagccagcacaccgggacgcaacgccctcggccgccacgagtaccccttgcctcggaacgggcctctcccacaggagggtgcccagaagaggggcacagcccctccctacgtcggagtgcggccctgctcggcctcccccagcagtgagatggtcaccttggaggagttcctggaggagagcaaccgcagctcccccacccatgacactcccagttgccgggatgacctgctgagtgactacttccgaaaggccagcgatcccccagccatcggaggccaaccaggaccacctgccaagaaagaaggggccaagatgcccaccaactttgtggcccccaccgtcaaaatggccgcccccacctcggaggggaggccgctgaagcccgggcagtacgtaaagccaaacttcagactgactgaggccgaggccccacccagcgtggccccgagacaggcccagcctccccagagcctgtctctgggcagaccccggcaggctccggtgcccccagcttcccatgcacctgccagccgcagtgcctccttgagccgggccttcagcctggcctcagctgaccttctccgggccagcgggccagaggcctgcaaacaggagtcccctcagaagctgggggctcctgaggccttagggggcagagagacaggcagccacaccctgcaaagccccgcaccccccagctcccatagcctggcccgggagcggaccccacttgtgggaaaggctggcagctcctgtcagggcccaggtccccgcagccggccgctggacacgaggcgcttctccctggctcccccaaaggaggagaggctggcccccctgcatcagtctgccacagcccccgccattgccactgcaggtgctggtgctgctgctgctggcagtggcagcaactcccagctcctgcacttctcacctgctgcagccccggctgccaggaccaagcccaaggcgcccccacgctcaggggaggtggccaccatcacccctgtccgggcagggctcagcctctcagagggagacggggtcccggggcagggctgcagtgaggggcttccggccaagagcccaggtcggtctcccgatttggctccccacctcggccgggccctggaggactgcagtcgagggagcgtctcaaagagcagtccggcctccccggagcccggcggggatccgcagaccgtgtggtatgagtacggctgtgtgtgactgtctcgtggttgagctcgcaaacctgaaaactactgacgcgccttccgactctcacggccttttctcttgcttgcctgcggtgccaggagagggtttggaatgaggaaaggggttcccacgcatttctgctgtttgttctgtgaatggaaacactgtgccaagccccaagaggattacgcttccaggtgtgtaacgtgttttctgtgtctgccgcttccagcagctgatatctttggaacaaataatccacgtcagcatggggaccaattaggatgcaatgacaaactgacttcccccaaagcagacactactccagtatgtcccagtagaacactcatttgcaatgtgttgagctccgttaagcacacacacactcacacaacaggcttacgaggctcaggcctggcgggtcagaaagcccactccctctcccaaggccactggatcccaggagaagcccagactggcgatactacaaaggtctccagggcctggcagaccccagagtcaggcctgctgttaaaaagtgagagtgctgctgttccattcctggggtcccaagcacttccctttaccccaggacccagggcagcctgcagggcagctggcggtggccttggccatttgcccccagcctccagctggctcctgagctctgcaccagggggtttggggaccacacaggcacctgccttcctagatttccctggctcacttttctgcaaacactggatctgccaggcctggggattggggggcaggaaagaggcccccatccagccccctccaggccagtgtgcacagtgcaccgaggggtcatccgcacagagcgaggtgcaagctcgatgtgtaacctggctgcggcacccgacatccccggtctcggggtgttgatttatttctgaataactttttgggtatagaaaccaattttttttaatatatgacatgtatatgtacacactcatgtgaaatatgtatactttggggggatctatttatgttccagtgggagtcactctcttctgtcgggaatcttatctgctgctttgtgtctttggtcagattcctgacaatttagtttcctgttgtaaaggtgcttttcctggggtgaactaaacctattgattttttttttttaagatttttttttccttttgatttaatatactgagaaagaaatgggagacttttgaatgttaacaagatccattttaggagtgtttggggttgtgtattaaatagccattcattctggaactcaaggacaggactgtaataaaatggaatggaaccg

SEQ ID NO: 36293 - DNA, 6087 bp, Artificial Sequence
  derived and/or modified sequence
atggacgtgaccgtgagcgagctgctggagctgttcctgcagagcccacttgtcacttgggtaaaaacatttgggcccttcggcagcggaagccaagacaacctgacaatgtacatggacctcgtcgatggcatatttctcaaccagatcatgctgcagattgaccctagacccactaaccaacgcataaacaagcatgtgaacaatgacgtgaacctcagaattcagaatcttacaatcctcgtgaggaacattaaaacctactaccaggaggtgctgcaacaactgattgttatgaatttaccaaacgtgttgatgatcggaagagaccctttgtctggaaaaagtatggaggaaatcaagaaggtgctactcctggtgctcggctgtgctgtgcagtgtgagcggaaggaggaattcatagagcgtataaagcagcttgatatcgaaacccaggccggcatagttgcccatattcaggaagtgacccataaccaggaaaacgtttttgacctacaatggctcgagctacctgatgttgccccagaggagcttgaagccttgtcacggagcatggtgctccatctcagacgcttgattgatcagagagatgagtgtacggagttgatagtggacttgacccaggaaagggattaccttcaagctcagcatccaccatctccaatcaagtcttcgtccgcagactccacgcctagtcctactagcagccttagcagcgaagataagcagcatctggccgttgagttagccgatacaaaggctagacttcgccgcgtgcggcaagaactggaggacaaaacagagcagctggtcgacacacgccacgaagtggatcagctggtgctggaactgcagaaggttaagcaggaaaatattcaactcgctgccgacgctaggtcagccagagcttaccgagacgaactggattcacttcgagaaaaggcaaatagagtggaaaggttggagctggagctgaccaggtgtaaagaaaagctccatgatgttgatttttataaggctagaatggaggagctcagagaggacaatattatactcattgagactaaagccatgttggaagagcagctgactgccgcacgtgctcggggagataaagtccatgagctcgaaaaagagaatctgcaactgaagtccaaactccatgaccttgagttggatagggacactgacaaaaagcgaatcgaggagcttctggaggagaatatggttctcgagattgcccagaagcagagtatgaatgaaagcgcccacctcggatgggaactggagcaattgtcgaaaaatgccgatttgtccgatgccagtagaaagagcttcgttttcgaattgaatgaatgcgctagctccaggattctaaagctagaaaaggagaatcagtccctgcagagcaccattcagggtctcagagacgcctctttggtgttagaggaaagcgggttgaagtgcggcgagctggaaaaagaaaaccatcagctgtcgaaaaaaatcgagaaactgcaaacccaacttgagcgcgaaaaacagtccaaccaggacttagagacactgtcggaggagttgatccgtgagaaagaacagctgcagtccgacatggagacattgaaggccgataaggcccggcagattaaagatctggagcaggaaaaagatcacctcaatagagcaatgtggagcctacgagaacgctcgcaagtgagctcagaggccaggatgaaggatgtagaaaaggaaaacaaagcactgcatcagacagtcaccgaagctaatgggaagttgtcgcagctcgagttcgagaagcgccagctgcatcgcgacctggaacaggccaaagaaaaaggggaacgagcggaaaaactcgagcgggagttgcaacgcctccaggaggagaacggtagactggctcggaaagtcaccagtctcgagaccgcgaccgagaaggttgaggccctggagcatgagtcccagggccttcagctcgaaaacagaacccttcggaagtccctggatacacttcagaatgttagtttacaactggagggactggagcgcgataacaagcagctcgacgccgagaacctggaactgagaaggctggtagagacaatgagatttactagtaccaaattagctcagatggagagagaaaatcaacagcttgagcgagaaaaagaggagctgagaaagaacgtggacctccttaaagcgctggggaagaaaagcgagcgccttgaactcagctaccaaagcgttagcgctgagaacctgagacttcagcagtctctggagtcctcgagccacaaaactcagactctcgagtcggagttaggagagttggaggccgaaaggcaggccctgcgtcgggatcttgaagctctgcgcctagccaacgcccagctcgaaggagccgagaaagaccgcaaagctctcgaacaagaagtggcacaactcgagaaggacaagaaactgctagagaaggaggctaagcggttatggcagcaggtggagcttaaagatgccgtgcttgacgatagcacggcaaaattatcggccgtagaaaaggaaagccgggctctggacaaagagctggcccgctgccgggacgctgccggtaaactgaaagaactggagaaagataatcgcgacttgactaaacaggtgaccgtgcacgcccggaccctgacaaccctgcgggaagatctcgtgctggagaaactgaaatctcagcaattgagttctgagctcgacaaactttcacaagagctggaaaaggtgggtctaaaccgtgagctcttactgcaggaagacgacagtggctccgatacgaagtacaagatactggaaggccgaaatgaaagcgccctgaagacaacgctggccatgaaggaggagaaaatcgttctgctcgaagcacagatggaggaaaaagctagcctgaatcgccaactagaatcagaacttcaaatgctgaaaaaagagtgcgaaactctgagacagaatcagggtgaggggcaacacctgcagaatagctttaaacatcctgctgggaagacagcggcttcacaccaagggaaggaggcatgggggccgggacataaagaggcaactatggagttgctcagggtgaaagatcgcgccatcgagctggagcgcaacaacgctgcgctgcaggcagagaagcagctgttaaaggagcaattacaacacctggaaacacagaacgtcacctttagctctcaaatcctcaccctgcaaaagcaaagcgcatttcttcaggaacacaacacaacccttcagacgcagactgctaaactccaggtcgagaattctacactttccagccagtccgctgctctgaccgctcaatacaccttgcttcagaaccatcacaccgccaaggagaccgaaaatgagagcttacaacgccagcaggagcaacttacagccgcctacgaagcactgctccaggatcatgagcatctcggaacactgcacgagaggcagtctgccgaatatgaggctttaatccgccagcactcatgccttaagaccttacataggaatttagagctggagcacaaggaactcggtgagaggcatggtgatatgcttaaacgcaaggctgagctggaggagcgcgagaaggtgctgactaccgagagagaagctctgcagcaggagcagcgcacgaatgccctagccatgggtgagaaccagcggcttagaggcgagttagacagagtcaattttcttcaccaccagttgaagggtgaatacgaggaactccatgcgcatacgaaggaactgaagacctccctaaacaacgctcagttggagctgaaccgatggcaggccagattcgacgaactcaaagaacagcatcagactatggacatcagtttgactaagcttgataatcattgcgaattgctgagccgcctaaaaggcaatctggaggaggaaaatcaccatctccttagccagattcaactgctgtcacagcagaatcaaatgttgctggagcaaaacatggagaacaaagaacaataccacgaagagcaaaaacagtatatcgacaagctgaacgctttacgccggcacaaggagaaactcgaagaaaagataatggaccagtacaagttctacgaccctcccccgaagaagaagaaccactggatcggagctaaggcgctagtgaagctcattaagcctaaaaaagagggatctagggagcgtttaaagtctactgtggatagccctccctggcagctggaatccagcgatccagcatcgcccgcagcttctcagccactgcgctcacaggccgaaaacccagatactcccgcattagggtcaaactgcgctgaggagcgtgacgcccacaacggatcggtcggcaagggccctggggacctcaaaccgaagcgcggaagcccgcacagaggttccttagatagaacggacgcaagcactgatctggccatgcgcagttggccttccgagctgggaagccggacctgctctacctcagccactaccacagccccatctaattccacccccatcgccagacatcccgggaggacaaagggttataattcggatgacaacctgtgcgagccgagcctggagttcgaggttcccaaccaccggcaatacgtgagcaggccttcttccctggaaagttcaaggaacacaagctccaattcatcacctctcaacctcaaaggatcatctgagcagctgcacggtcgctctgagagtttctcctcggaggatcttatacccagccgggacttagctaccttacccagggaggcttcaacgcccggcagaaatgcactgggtcggcacgagtacccactgccgcggaatggacccctgccacaagagggtgcacagaaacgagggactgcccccccctacgttggcgtgcgtccctgtagcgcaagcccctcttccgagatggtcaccctagaggaatttttggaggagagtaacaggagctcacccacccatgacacgccctcatgtcgggatgatctgctgtctgactacttccgaaaggccagcgacccaccagcaattggtggccagcccggcccccccgccaagaaagaaggggctaagatgccaacgaacttcgtcgctcctactgtcaagatggcagccccaacctcagaagggcgacctctgaagcccggtcaatacgttaagcctaattttcgcctgaccgaggccgaggctcctcctagcgtagcacctaggcaggcccagccaccacagtctctctcacttggtcgccccagacaggcccctgtgccgcccgcgagccatgcaccagcttctcgttccgcgtcgctgagtcgcgctttcagtctcgcatcagccgacttgctccgcgcttcaggacccgaggcatgtaagcaggagagtccacagaagctcggagcaccggaggccctgggcggtcgcgagactggctcccatacactgcagtcacctgcccctcccagcagccatagcctcgcaagagagagaacaccattagtgggtaaagctgggagttcctgtcaagggccagggccccgttcccggcctctggataccagacgctttagtctggctcccccaaaagaggagcggctcgctcccctgcatcagtcagcaacagcccctgctattgcgacagctggagcaggagcagccgccgcggggagcggctctaattctcagctccttcatttttcccccgctgcggctccagctgctagaaccaagcctaaagcccccccccgttcaggcgaggtagcaacaatcacaccggtgcgggctggactatctctgtctgagggggatggagttcctggacaaggttgcagtgaaggattgcctgccaagagtccgggccgcagccccgatctcgcgcctcatcttggccgcgctctggaggactgttccagggggagcgtgtctaaatccagccccgcttctccagaacccggcggcgaccctcaaactgtttggtacgagtacggctgcgtgtag

SEQ ID NO: 36294 - DNA, 6086 bp, Artificial Sequence
  derived and/or modified sequence
atggatgtgaccgtgtcagaactgcttgagctcttcctccagagtccactagtgacatgggtcaaaacttttggcccttttggctcagggagccaggacaacttaaccatgtacatggacttagtggatggcatcttcctgaaccaaattatgttacagatcgatccccgtcctacgaaccagagaatcaataaacacgtgaacaacgacgtcaacctccggatacagaatctcaccatcctggtacggaacataaaaacctactatcaggaggtcctccagcagcttatcgtgatgaacctcccgaatgttctgatgattgggagggaccccttgtctggcaagtcaatggaagagatcaagaaagtgcttctccttgttctcggatgcgccgtgcagtgtgagcgcaaggaggagtttattgaacgaattaagcagttggacattgagacacaagccggaatcgtcgctcatatccaagaggtgacacataatcaggagaatgtattcgatctccagtggttggagctccctgatgtggctcccgaggaattagaggccttgagccggtctatggttttgcatctgaggcggcttatcgatcagcgcgacgagtgcactgagctgatcgtggacttaacccaggagcgtgactatcttcaagcgcagcatccgccatccccgattaagtcctcatccgcagacagcacccccagtcctacctcaagtcttagctcggaggataagcagcaccttgccgtcgagcttgccgatacaaaagccagactccgtcgtgtcaggcaggagttggaagataagacggagcagctagtggatactcgacatgaggttgatcagctggtgctggaactgcaaaaagtgaagcaggagaacatccagttggcggctgacgcacggagcgccagagcctacagagatgagctggatagcttgagggagaaagccaacagagtggagcgacttgaactggagcttactcggtgcaaggaaaagctgcatgatgtggatttctacaaagccaggatggaagagctgagagaagataatatcattttgattgagacaaaggccatgctggaagaacagctcacggctgctcgagctcgcggagacaaagtgcatgagctggagaaagagaatctccagctgaaaagtaagttgcacgacttggaactggatagagacactgacaagaagaggatcgaggagctgttagaggaaaatatggttctggaaatcgctcagaaacagagcatgaatgagtctgcccatttaggctgggagctggagcagttatctaaaaacgccgatctctccgatgcttctaggaagtcctttgtctttgagcttaatgagtgtgcgtcctctcgtatccttaaactcgaaaaggaaaatcagtccctgcagtcaactattcagggacttagggatgcctcactggtgctcgaagagagcggcctgaagtgcggcgagctggaaaaagagaaccaccaactgagtaaaaaaatagagaagttgcaaacacaactcgagagagagaagcagtcaaatcaagaccttgaaacattatctgaggagctcatcagagagaaggaacagctccagtctgatatggagaccctgaaagccgacaaagcacggcagatcaaagatctggagcaggagaaagaccatctcaaccgcgcaatgtggtctctgagagagagaagccaggtgtccagtgaagctaggatgaaggacgtggaaaaggaaaacaaggccctgcatcagactgttacggaggccaacggaaagctgtctcagcttgaattcgaaaagcgccagctgcaccgtgacctggagcaggccaaagagaagggggaaagagcagagaagctggagagagagttgcaacgcttacaggaagaaaacggcagactcgctagaaaagtgacatctctggagaccgcaaccgaaaaagtggaagccctggaacacgaaagtcagggtctgcagttggagaatcgaactctgcgcaagtccctcgacaccctccagaacgtatcactccagctcgagggtttagagcgcgataacaagcagctggacgcagaaaatctggaactcaggaggctcgtcgagacaatgcgcttcacctcaacaaaattagcacagatggagagggaaaaccagcagttagagcgagaaaaggaggaactgcgcaagaatgtggacctgctgaaagccttgggtaaaaaatccgaaagactcgagctttcctatcagagtgtgtccgccgaaaatctgaggctccagcagtcattggagagcagttctcacaaaacccagacactggagagcgagctgggagagctggaagccgagcgccaggctctgcgcagagatctggaggccctgagactagcaaatgcccagctggagggggcagaaaaggaccgcaaggctctggagcaggaagtagcgcagttagagaaagataaaaaattgctggagaaagaggccaagaggctctggcagcaggttgagctaaaagatgcagtgctggatgactctaccgccaaactgtcggccgtagaaaaggaaagtagagccctggacaaggagctcgcgagatgcagggatgctgctggcaaattgaaagagctcgagaaagacaaccgggatctaaccaagcaagtgactgtccacgccaggaccctcaccacactgcgcgaggatttagtgctcgagaaactgaagtcccagcagctctcaagcgagttggacaagctctcccaggagctggaaaaggtcggcctgaacagagagttgttgctccaggaagacgacagtggttctgataccaagtacaagattctggaaggtaggaatgagagcgccctgaaaacgacacttgcaatgaaggaggagaaaatagtcctcctcgaagcccagatggaagagaaagcttctctgaatcgccagctagaatcagagctacagatgctcaaaaaggagtgcgagaccttgcgccagaatcagggtgagggtcagcatctgcagaacagtttcaagcaccctgctggcaaaacggccgcaagccaccagggcaaggaggcctggggccctgggcataaggaagctaccatggagctcctgcgggtgaaagatagagctattgagcttgaacgtaataatgctgccctgcaagccgaaaagcaactgctcaaggaacagctgcagcacctggagacgcaaaacgtgactttttcttctcagattctcactctgcagaaacagtcagcattcctgcaggaacacaacacaaccctgcagacgcagaccgctaagctgcaagtagagaacagcaccctgagcagccagagtgctgctttgacagcccaatataccttgttgcagaatcaccacaccgccaaggagacagaaaatgagagcttgcagcgccaacaggagcaactgactgccgcttacgaggccctgttgcaagaccatgagcaccttgggacccttcatgagaggcaatctgcggagtatgaggcgctaatccgtcaacatagttgtctgaaaactctgcataggaacctcgagctagagcacaaggaattgggcgagcgccacggtgacatgttgaagcgcaaggccgagctggaagagagggagaaagtgctgacgacagagcgggaggccctgcaacaagagcaacgtactaatgcgcttgccatgggagagaaccaacgcctcaggggggaactcgaccgcgtgaacttcctgcaccaccagctcaaaggtgagtatgaggagttgcacgcccacactaaggagctcaaaacttcattgaataatgctcaactggagctgaataggtggcaggccaggttcgatgagctgaaggagcagcaccagaccatggatatttctctgacgaagttagacaaccactgtgagctgctgagtcggctgaaagggaacttggaggaggaaaatcatcacctgttaagtcagattcagctattatcccagcagaaccagatgctgctagaacagaacatggaaaacaaggaacagtaccatgaagagcagaagcagtatatcgacaagctgaacgccctgcgacgacataaagaaaaactggaagagaagataatggatcaatacaagttttatgaccccccacccaaaaagaaaaatcattggatcggtgcaaaagcccttgtcaaactcattaagcccaagaaggaagggtcgagagaaagattaaagagtactgtggacagccccccatggcagttggagagttctgaccccgcaagcccagctgcctctcagccactccggtctcaggctgaaaaccccgacaccccggctctggggtcaaattgcgctgaagaacgcgatgctcataacggcagcgtcgggaaagggcctggagatctcaaacctaaacgtggtagtccgcatcggggttctctggatcgtaccgatgctagcacagacctcgcaatgagatcctggcctagtgagctgggctcgaggacctgttccacgagcgccacaactacggccccttcgaattctactcctattgctcggcatccgggaaggacaaaaggttacaacagtgatgataacctgtgcgaaccatctctggagttcgaggttcctaatcatcggcagtatgtgtcacgcccaagcagcctggagagctccagaaatacttcctccaatagctctccgcttaacctgaaaggctcttccgagcagctgcatggccgttccgagagttttagcagcgaggacctgatcccatctcgtgatcttgctacacttccaagggaggcctccacacccggacgcaacgcactgggacgacacgaataccctctgccacgaaatggaccgctgccacaggaaggcgctcaaaaacgcggaacagctccaccctacgtgggcgtgcgcccatgtagcgcatccccatcgagtgaaatggtgaccctagaggaattcctggaggagagcaacaggagcagtcccacacacgatacgccctcttgtcgggatgatctgctgagtgactatttcagaaaagcgagtgacccgccagcaattgggggacagcctggaccgccagctaaaaaggaaggcgctaaaatgcccaccaactttgtggcccctacggtgaagatggcggcaccaacctcagaggggaggccactcaagcctggacagtacgtgaagccgaatttccggcttacggaggcggaggcgcctccctcagtcgctccacggcaggctcagcctccccagagcctgagtctgggacggccacggcaggcacctgtacccccagcctcacacgcccctgcaagcagaagtgcctccctgagccgagccttctcattggcctctgcagacctacttcgggcatcaggccctgaggcctgtaaacaggaaagcccgcagaagttgggcgctccggaggcactgggcggtcgtgagactggatcccacactctccagtcccccgctcccccaagcagtcactcactggccagagagcggacaccccttgtcggcaaggcaggctccagctgtcagggtcccggtccccgaagccgacccctggatactcgacggtttagtctcgctccaccaaaggaggaacgactggctcccctgcaccaaagcgctaccgctccagccatcgctactgccggagccggagctgctgctgcaggcagtggttccaatagccagctcctccacttttccccggcagccgctcctgcagcccgtacaaaacccaaggcaccacccaggtcaggggaagtcgccacaattacccctgtccgggctggtctgagcctgtccgagggcgatggcgttccaggccagggatgttccgaaggcctgcctgccaaatcacctggcagaagtcccgatctggctccgcatttgggtcgggcactggaagactgctctcgtgggtcggtctctaaatcatccccagcgtccccagagccgggaggagatccccagactgtctggtacgagtatggctgcgtgta

SEQ ID NO: 36295 - protein, 752 aa, Artificial Sequence
  derived and/or modified sequence
MAKRSRSEDEDDDLQYADHDYEVPQQKGLKKLWNRVKWTRDEDDKLKKLVEQHGTDDWTLIASHLQNRSDFQCQHRWQKVLNPELIKGPWTKEEDQRVIELVQKYGPKRWSLIAKHLKGRIGKQCRERWHNHLNPEVKKSSWTEEEDRIIYEAHKRLGNRWAEIAKLLPGRTDNSIKNHWNSTMRRKVEQEGYLQDGIKSERSSSKLQHKPCAAMDHMQTQNQFYIPVQIPGYQYVSPEGNCIEHVQPTSAFIQQPFIDEDPDKEKKIKELEMLLMSAENEVRRKRIPSQPGSFSSWSGSFLMDDNMSNTLNSLDEHTSEFYSMDENQPVSAQQNSPTKFLAVEANAVLSSLQTIPEFAETLELIESDPVAWSDVTSFDISDAAASPIKSTPVKLMRIQHNEGAMECQFNVSLVLEGKKNTCNGGNSEAVPLTSPNIAKFSTPPAILRKKRKMRVGHSPGSELRDGSLNDGGNMALKHTPLKTLPFSPSQFFNTCPGNEQLNIENPSFTSTPICGQKALITTPLHKETTPKDQKENVGFRTPTIRRSILGTTPRTPTPFKNALAAQEKKYGPLKIVSQPLAFLEEDIREVLKEETGTDLFLKEEDEPAYKSCKQENTASGKKVRKSLVLDNWEKEESGTQLLTEDISDMQSENRFTTSLLMIPLLEIHDNRCNLIPEKQDINSTNKTYTLTKKKPNPNTSKVVKLEKNLQSNCEWETVVYGKTEDQLIMTEQARRYLSTYTATSSTSRALIL

SEQ ID NO: 36296 - DNA, 3587 bp, Artificial Sequence
  derived and/or modified sequence
gaattcagcacaatgaaggagccatggaatgccaatttaacgtcagtcttgtacttgaagggaaaaaaaacacttgtaatggtggcaacagtgaagctgttcctttaacatccccaaatatagccaagtttagcactccaccagccatcctcagaaagaagagaaaaatgcgagtgggtcattccccaggcagcgaacttagggatggctcattgaacgatggtggtaatatggcgctaaaacatacaccactgaaaacactaccattttctccttcacagtttttcaacacatgtcctggtaatgaacaacttaatatagaaaatccttcatttacatcaacccctatttgtgggcagaaagctctcattacaactcctcttcataaggaaacaactcccaaagatcaaaaggaaaatgtagggtttagaacacctactattagaagatctatactgggtaccacaccaagaactcctactccttttaagaatgcgcttgctgctcaggagaaaaaatatggacctcttaaaattgtgtcccagccacttgctttcttggaagaagatattcgggaagttttaaaagaagaaactggaacagacctattcctcaaagaggaagatgaacctgcttacaaaagctgcaaacaagagaataccgcttctgggaagaaagtcagaaaatcactagtcttagataattgggaaaaagaagaatcaggcactcaactgttgactgaagacatttcagacatgcagtcagaaaatagatttactacatccttattaatgataccattattggaaatacatgacaataggtgcaacttgattcctgaaaaacaagatataaattcaaccaacaaaacatatacacttactaaaaagaaaccaaaccctaacacttccaaagttgtcaaattggaaaagaatcttcagtcaaattgtgaatgggaaacagtggtttatgggaagacagaagaccaacttattatgactgaacaagcaagaagatatctgagtacttacacagctaccagtagtacttcaagagctctcatactgtaattgttattaaaattgatgaaatgccccactcccttactgcagtctctactaaattaggttgcagtgaaatttttctcaattagttgtttttaaagttgtaagatacccttttaatacagcatcttttttctattctatatagtaggcagaaagctagtaagtcacttaaggggtagatagtttcatagtttattttttaagagatgagatttttaaaaattgtttttaaagaacaagatgggaaaataatagaatgttcatggatttctaaaagtaaattctcatatattttcttcacaagatatatgttgctactctcttgatgctgcagttttgttatagataggtgtatgagtatatatgatttctgaaattagtctatgtatggaaagcacacatgattttatgaaggtacttttgcccatgtgctgatttacttaggctaccatttacaaagaaacacattgaaaaggaatttaaaggaaggatagaaagttgcactactaattttttgttttttttttcagaagcagtaaaattaactacagtgttaaatgtatttatttgagcatagtactgaaaacaaaaagcattcaaaaaagagttttttctttattagtaaatagtattttcttaatctcagaggagctgagagttttgttgaatgtattgtacagtatgtaggagcaggagaactttgtaaattggaaagaagtctgtttttataatttatttttatttttaaagcttaaatgtagatatttatagtatacagggagcctagaagccaatgttgtttcctgttattacagctaacacagtaaagaataattttgactttaagtatgaaacagtagtaagttatagctgcaaagaatacaatatctatactgtatgtcacatctacctaaatgttgcactatgccctttaaatcatgctggttataaagtagttctaaaaatgtactaaataataatttaatattttctttttaaattatatcgggggtggtcatatacattaatctggtgatttgtatatgtgtttgaaattttttgcttttgtttaaaaaaaaataatatggtaccttggtccctaaaaacagtctgcacttagaagttatatttactcagtgtttcagaagtggagaacttatcttttatttataaaaatattttgtccttttttaaatgttttgtgtttctctacaggttacaacagttgcttcagttgcctgttttaggtgtttgcacttattttatttcttcttgaaagaatttttatttgcttttgtggtagagattatatgtaattttttttcagtcatataatggtgtgctgtcaacttaaacactgacaggtaaatagaattgtacactgtagtttgaattatttataattgacacactctctccctctccactcctgaagtatgctgctatagaaaatagcagaatcggcttgctgctacgagagaaggaaagagcgaccaccacttgcactgtgtgaaaagataaaaaacaaatgatggcaagttctcaagttaactaaatggaatcaaccattaccaggcaaattcttgcaaataccaaaatactactatgccttataaaacaaaatgaaagcaggttaagattttctgctctgtttgtatgttaatagaaatggaaatactaagtattttaatgcttagctattgaacagtagacctaaaagggttttaagctatttaaatctacttgctagtttttgcatattttatatatatatatatttatatatatatatagtgagaagtgaagaaaatgtatggtactaagattatgccttattgataaatagataaaccaatttgaatcctcttagcatgtttaagtatgttgattgctttctaattaatgaacttctcacagaaatttcacttagtgaaaccaatgattgtagcaaactcatactggatcatttcagttaccttgaactaatagcacataatggttttttgttgttgttgtttttaatgtagcccttacctggatatacatagtctgcaatcaccaaagtataatatcttgtaaggctatattttttaaagcatattttttcttgagcattaaattatcctaaatggtaatatattgtggataagtctgggcttattggacataatacatatttgggttggtactggttgaatccttcagttaactgctttgttgctttttgcaagattttttatcttaaacatgtcaggcatcttaagtcacctttatactgttttgttcctctgagtttctttcagtatgttatacaaatgccagacataacatgtagcagccatacttgcatggaaactgactacacatacataatactgcattttattgtaaggttttcacattaatacagcaattaccctgactaaattgagttttgtgatatatggaaaacttcattgtaagagaatcttgcatacaatgttgactattaacatccaaaataaagcatctgtgtacaag

SEQ ID NO: 36297 - DNA, 1233 bp, Artificial Sequence
  derived and/or modified sequence
atggccaagagaagcagaagcgaggacgaggacgacgacctgcagtacgccgaccacgactacgaggtgccccagcagaagggcctgaagaagctgtggaacagagtgaagtggaccagagacgaggacgacaagctgaagaagctggtggagcagcacggcaccgacgactggaccctgatcgccagccacctgcagaacagaagcgacttccagtgccagcacagatggcagaaggtgctgaaccccgagctgatcaagggcccctggaccaaggaggaggaccagagagtgatcgagctggtgcagaagtacggcaagaagagaaagatgagagtgggccacagccccggcagcgagctgagagacggcagcctgaacgacggcggcaacatggccctgaagcacacccccctgaagaccctgcccttcagccccagccagttcttcaacacctgccccggcaacgagcagctgaacatcgagaaccccagcttcaccagcacccccatctgcggccagaaggccctgatcaccacccccctgcacaaggagaccacccccaaggaccagaaggagaacgtgggcttcagaacccccaccatcagaagaagcatcctgggcaccacccccagaacccccacccccttcaagaacgccctggccgcccaggagaagaagtacggccccctgaagatcgtgagccagcccctggccttcctggaggaggacatcagagaggtgctgaaggaggagaccggcaccgacctgttcctgaaggaggaggacgagcccgcctacaagagctgcaagcaggagaacaccgccagcggcaagaaggtgagaaagagcctggtgctggacaactgggagaaggaggagagcggcacccagctgctgaccgaggacatcagcgacatgcagagcgagaacagattcaccaccagcctgctgatgatccccctgctggagatccacgacaacagatgcaacctgatccccgagaagcaggacatcaacagcaccaacaagacctacaccctgaccaagaagaagcccaaccccaacaccagcaaggtggtgaagctggagaagaacctgcagagcaactgcgagtgggagaccgtggtgtacggcaagaccgaggaccagctgatcatgaccgagcaggccagaagatacctgagcacctacaccgccaccagcagcaccagcagagccctgatcctgtag

SEQ ID NO: 36298 - DNA, 2259 bp, Artificial Sequence
  derived and/or modified sequence
atggccaagagaagcagaagcgaggacgaggacgacgacctgcagtacgccgaccacgactacgaggtgccccagcagaagggcctgaagaagctgtggaacagagtgaagtggaccagagacgaggacgacaagctgaagaagctggtggagcagcacggcaccgacgactggaccctgatcgccagccacctgcagaacagaagcgacttccagtgccagcacagatggcagaaggtgctgaaccccgagctgatcaagggcccctggaccaaggaggaggaccagagagtgatcgagctggtgcagaagtacggccccaagagatggagcctgatcgccaagcacctgaagggcagaatcggcaagcagtgcagagagagatggcacaaccacctgaaccccgaggtgaagaagagcagctggaccgaggaggaggacagaatcatctacgaggcccacaagagactgggcaacagatgggccgagatcgccaagctgctgcccggcagaaccgacaacagcatcaagaaccactggaacagcaccatgagaagaaaggtggagcaggagggctacctgcaggacggcatcaagagcgagagaagcagcagcaagctgcagcacaagccctgcgccgccatggaccacatgcagacccagaaccagttctacatccccgtgcagatccccggctaccagtacgtgagccccgagggcaactgcatcgagcacgtgcagcccaccagcgccttcatccagcagcccttcatcgacgaggaccccgacaaggagaagaagatcaaggagctggagatgctgctgatgagcgccgagaacgaggtgagaagaaagagaatccccagccagcccggcagcttcagcagctggagcggcagcttcctgatggacgacaacatgagcaacaccctgaacagcctggacgagcacaccagcgagttctacagcatggacgagaaccagcccgtgagcgcccagcagaacagccccaccaagttcctggccgtggaggccaacgccgtgctgagcagcctgcagaccatccccgagttcgccgagaccctggagctgatcgagagcgaccccgtggcctggagcgacgtgaccagcttcgacatcagcgacgccgccgccagccccatcaagagcacccccgtgaagctgatgagaatccagcacaacgagggcgccatggagtgccagttcaacgtgagcctggtgctggagggcaagaagaacacctgcaacggcggcaacagcgaggccgtgcccctgaccagccccaacatcgccaagttcagcaccccccccgccatcctgagaaagaagagaaagatgagagtgggccacagccccggcagcgagctgagagacggcagcctgaacgacggcggcaacatggccctgaagcacacccccctgaagaccctgcccttcagccccagccagttcttcaacacctgccccggcaacgagcagctgaacatcgagaaccccagcttcaccagcacccccatctgcggccagaaggccctgatcaccacccccctgcacaaggagaccacccccaaggaccagaaggagaacgtgggcttcagaacccccaccatcagaagaagcatcctgggcaccacccccagaacccccacccccttcaagaacgccctggccgcccaggagaagaagtacggccccctgaagatcgtgagccagcccctggccttcctggaggaggacatcagagaggtgctgaaggaggagaccggcaccgacctgttcctgaaggaggaggacgagcccgcctacaagagctgcaagcaggagaacaccgccagcggcaagaaggtgagaaagagcctggtgctggacaactgggagaaggaggagagcggcacccagctgctgaccgaggacatcagcgacatgcagagcgagaacagattcaccaccagcctgctgatgatccccctgctggagatccacgacaacagatgcaacctgatccccgagaagcaggacatcaacagcaccaacaagacctacaccctgaccaagaagaagcccaaccccaacaccagcaaggtggtgaagctggagaagaacctgcagagcaactgcgagtgggagaccgtggtgtacggcaagaccgaggaccagctgatcatgaccgagcaggccagaagatacctgagcacctacaccgccaccagcagcaccagcagagccctgatcctgtag

SEQ ID NO: 36299 - DNA, 1233 bp, Artificial Sequence
  derived and/or modified sequence
atggcgaaacgatctcgcagcgaggatgaagatgatgacctacaatacgcggatcacgattatgaggtcccccagcaaaagggtctgaagaagctctggaatagggtcaagtggactcgtgacgaggatgacaagctcaaaaagctcgtcgaacagcatgggacagatgattggacactgatagcctcacatttgcaaaaccggtcggacttccagtgccaacatcgttggcagaaggttttgaaccccgaattgatcaagggcccttggaccaaggaggaggatcagagggtcatcgaacttgttcagaagtatggaaaaaaacgcaagatgcgcgtggggcacagcccagggtcagaactgagggatgggagcctgaatgatggaggcaatatggcgctgaaacacactccgctcaaaacattaccctttagtccctcccagttttttaatacgtgcccaggaaacgagcagctgaacattgaaaatccaagctttacctccacaccaatatgcggccaaaaggccctaatcaccaccccccttcacaaagagacaacgccaaaggaccagaaggagaacgtaggttttcggacacctacaatccggaggagcattcttggcactaccccacgcacacccactccttttaaaaatgcgttggccgcccaagagaaaaagtacggaccccttaagatagtaagtcagccacttgcattcctggaagaagacatccgtgaagtgctgaaggaagagacagggacagatctgtttctgaaagaagaggacgagccagcttacaagtcctgtaaacaagagaacacagcgtccggtaagaaggtgcgaaagagcttggtgctggacaattgggagaaagaagagtctggcacacagctgctgactgaagatatctccgatatgcagagcgagaaccgcttcactacctcactgctgatgatcccccttctggaaatccacgacaatcgttgtaatctgatccccgagaagcaggacattaattcgaccaataaaacctacaccctcacaaagaaaaaaccgaacccaaatacctccaaagtggttaaactcgagaagaacctgcagtcaaactgcgaatgggagaccgtggtttacggaaaaacagaggaccagctcattatgacggaacaagccaggcgttatcttagtacatacaccgcgaccagcagcaccagccgagcgcttatcctgtag

SEQ ID NO: 36300 - DNA, 2259 bp, Artificial Sequence
  derived and/or modified sequence
atggccaagcgtagcagatcggaagacgaggacgacgacctccagtatgcggatcatgactacgaagtaccccagcaaaagggtctcaagaagctctggaacagagttaaatggactagagatgaggacgataaactgaaaaaactggttgagcagcacggaaccgatgattggacactcatcgctagccacctgcagaacagaagtgattttcagtgtcagcaccgctggcagaaggtgctcaatcctgagttgattaaaggtccttggactaaagaggaggaccagcgtgtcatcgagctagttcagaaatatggaccaaagaggtggtccctgattgccaagcatcttaaaggtagaatcgggaaacagtgtagagagaggtggcataatcatctgaaccctgaggtaaaaaagtcaagctggactgaggaggaggacagaattatttacgaagcccacaaacgcctggggaaccgatgggccgagatcgctaaacttctcccaggacggacggataattccattaaaaaccattggaatagcaccatgaggcgaaaggtggaacaagagggttatctgcaagacggtatcaagagtgagcgaagttcctcgaagttacagcataagccctgtgccgctatggatcacatgcagacacagaatcagttttacattccagttcagattccgggctaccagtacgtgagtccagaagggaattgtatcgaacacgtgcaaccgacgtccgctttcatccagcagccttttatcgacgaagaccccgacaaggaaaaaaagattaaagagctagaaatgttgctcatgtctgctgaaaacgaggtgagacggaagcggattccatcccagcctggctcatttagcagctggagcggatctttcttaatggatgataacatgagcaacaccttgaactccctggatgaacacactagcgagttctattctatggatgagaatcaacctgtgagcgcacagcagaacagccccacaaagttcctggctgtggaagcgaacgcagttctctcgagtctgcaaactataccagagtttgccgaaacattagaactaatcgagtcagaccctgtggcctggagcgatgttacaagcttcgacataagcgacgcggccgcatcccccattaagagcacacccgttaaactgatgagaatccagcacaatgagggcgctatggagtgtcagttcaacgtgtccctcgtgcttgaagggaagaaaaatacctgtaacggaggaaactctgaggcagtaccgctgacttcacccaatatcgccaaattttcaacaccgcctgcaattcttcgcaagaagaggaagatgcgggtgggacactctccaggatctgaattgcgagatggaagtcttaacgacggcggcaacatggcgctgaaacacacgccgctgaagactctgcccttcagcccgtcacagttttttaacacatgtccgggcaacgaacagctgaacattgaaaaccccagtttcacatccacaccgatttgcggccagaaagcactgattaccactccgctccataaagagacgaccccaaaggaccagaaagaaaacgtcggatttaggacccccactattagacgaagtatactgggcacaaccccgcgcactcctacccccttcaaaaatgccttggcagcccaagagaagaagtatggaccactgaagatcgtgtctcaacccctggctttccttgaagaagatatacgagaagtgctgaaagaggaaactggcacagatctctttctgaaggaagaagacgagcctgcatacaagtcatgtaaacaggaaaacactgcttctggaaaaaaggtgagaaaatctttagtactggataattgggaaaaggaggaaagtggaacccagttgctaactgaggacatatcagatatgcaaagcgaaaaccggtttaccactagcctgctcatgattcccctgctcgagattcatgataatcgctgcaatcttatccctgagaagcaggatatcaactctacaaacaagacctacactctcaccaagaagaaacctaatcccaacacgtccaaagtggttaagcttgaaaagaatctgcagtcgaattgtgaatgggagacggtagtttatggcaagaccgaggaccagctcatcatgaccgagcaggctaggagatacctttctacctacacagctacaagttccacaagccgggccttaatcctgtag

SEQ ID NO: 36301 - DNA, 1233 bp, Artificial Sequence
  derived and/or modified sequence
atggccaagaggagccgctcagaagatgaagatgatgacctgcagtatgctgaccatgactatgaggtgccccagcagaagggcctgaagaagctgtggaacagagtgaagtggaccagagatgaagatgacaagctgaagaagctggtggagcagcacggcacagatgactggaccctgattgccagccacctgcagaacagaagtgacttccagtgccagcaccgctggcagaaggtgctgaaccctgagctgatcaagggcccctggaccaaggaggaggaccagagggtgattgagctggtgcagaagtatggcaagaagaggaagatgagggtgggccacagccctggcagcgagctgagagatggcagcctgaatgatggcggcaacatggccctgaagcacacccccctgaagaccctgcccttcagccccagccagttcttcaacacctgccctggaaatgagcagctgaacatcgagaaccccagcttcaccagcacccccatctgtggccagaaggccctgatcaccacccccctgcacaaggagaccacccccaaggaccagaaggaaaatgtgggcttccgcacccccaccatcagaagaagcatcctgggcaccacccccaggacccccacccccttcaagaatgccctggccgcccaggagaagaagtatggccccctgaagatcgtgtcccagcccctggccttcctggaggaggacatccgggaggtgctgaaggaggagactggaacagacctcttcctgaaggaggaggatgagcccgcctacaagagctgcaagcaggagaacacagccagcggcaagaaggtgaggaagagcctggtgctggacaactgggagaaggaggagagcggcacccagctgctgacagaggacatcagtgacatgcagagcgagaaccgcttcaccaccagcctgctgatgatccccctgctggagatccatgacaaccgctgcaacctgatccctgagaagcaggacatcaacagcaccaacaagacctacaccctgaccaagaagaagcccaaccccaacaccagcaaggtggtgaagctggagaagaacctgcagagcaactgtgagtgggagaccgtggtgtatggcaagacagaggaccagctgatcatgacagagcaggcccggcgctacctgagcacctacacagccaccagcagcaccagccgggccctgatcctgtag

SEQ ID NO: 36302 - DNA, 2259 bp, Artificial Sequence
  derived and/or modified sequence
atggccaagaggagccgctcagaagatgaagatgatgacctgcagtatgctgaccatgactatgaggtgccccagcagaagggcctgaagaagctgtggaacagagtgaagtggaccagagatgaagatgacaagctgaagaagctggtggagcagcacggcacagatgactggaccctgattgccagccacctgcagaacagaagtgacttccagtgccagcaccgctggcagaaggtgctgaaccctgagctgatcaagggcccctggaccaaggaggaggaccagagggtgattgagctggtgcagaagtatggccccaagcgctggagcctgattgccaagcacctgaagggcagaattggcaagcagtgccgggagcgctggcacaaccacctgaaccctgaggtgaagaagagctcctggacagaggaggaggaccgcatcatctatgaggcccacaagaggctgggcaaccgctgggccgagatcgccaagctgctgcccggccgcacagacaacagcatcaagaaccactggaacagcaccatgaggaggaaggtggagcaggagggctacctgcaggacggcatcaagtctgagaggagcagcagcaagctgcagcacaagccctgtgccgccatggaccacatgcagacccagaaccagttctacatccctgtgcagatccctggctaccagtatgtgtccccagagggcaactgcattgaacatgtgcagcccaccagcgccttcatccagcagcccttcattgatgaggaccctgacaaggagaagaagatcaaggagctggagatgctgctgatgtctgcagaaaatgaggtgcggaggaagaggatccccagccagcccggcagcttcagctcctggagcggcagcttcctgatggatgacaacatgagcaacaccctgaacagcctggatgagcacaccagcgagttctacagcatggatgagaaccagcctgtgtctgcccagcagaacagccccaccaagttcctggccgtggaggccaatgctgtgctgagcagcctgcagaccatccctgagtttgctgagaccctggagctgattgaaagtgaccctgtggcctggagcgatgtgaccagctttgacatcagtgatgctgctgccagccccatcaagagcacccctgtgaagctgatgaggatccagcacaatgaaggagccatggagtgccagttcaacgtgtccctggtgctggagggcaagaagaacacctgcaatggaggcaacagcgaggccgtgcccctgaccagccccaacatcgccaagttcagcaccccaccagccatcctgaggaagaagaggaagatgagggtgggccacagccctggcagcgagctgagagatggcagcctgaatgatggcggcaacatggccctgaagcacacccccctgaagaccctgcccttcagccccagccagttcttcaacacctgccctggaaatgagcagctgaacatcgagaaccccagcttcaccagcacccccatctgtggccagaaggccctgatcaccacccccctgcacaaggagaccacccccaaggaccagaaggaaaatgtgggcttccgcacccccaccatcagaagaagcatcctgggcaccacccccaggacccccacccccttcaagaatgccctggccgcccaggagaagaagtatggccccctgaagatcgtgtcccagcccctggccttcctggaggaggacatccgggaggtgctgaaggaggagactggaacagacctcttcctgaaggaggaggatgagcccgcctacaagagctgcaagcaggagaacacagccagcggcaagaaggtgaggaagagcctggtgctggacaactgggagaaggaggagagcggcacccagctgctgacagaggacatcagtgacatgcagagcgagaaccgcttcaccaccagcctgctgatgatccccctgctggagatccatgacaaccgctgcaacctgatccctgagaagcaggacatcaacagcaccaacaagacctacaccctgaccaagaagaagcccaaccccaacaccagcaaggtggtgaagctggagaagaacctgcagagcaactgtgagtgggagaccgtggtgtatggcaagacagaggaccagctgatcatgacagagcaggcccggcgctacctgagcacctacacagccaccagcagcaccagccgggccctgatcctgtag

SEQ ID NO: 36303 - DNA, 1233 bp, Artificial Sequence
  derived and/or modified sequence
atggccaagcggagccggagcgaggacgaggacgacgacctgcagtacgccgatcacgactacgaagttccacagcaaaagggcctgaaaaaattgtggaatcgggtgaagtggacacgggatgaggatgataagctcaagaaactggttgagcagcacggaacagacgactggaccctcatcgcctcccatctacagaatcgtagtgattttcagtgccaacatcgctggcaaaaggtgctaaatcctgaactgatcaagggtccttggactaaagaagaagaccagcgagtcatcgagcttgtccagaagtatggcaagaagagaaagatgcgcgtgggtcacagtccagggagcgaattaagggacgggagcctaaatgacggtggcaacatggctctcaaacatacacctctcaaaacactgcccttttcacctagccaattttttaacacatgtccgggaaacgagcagctgaacatagagaatccatctttcacttctactcctatctgtggacagaaggcactgataactactcctctccataaagagaccactcccaaggaccagaaggagaatgtcgggttcaggacacccacaattagacggtctatactgggcacgacaccccgcacccccactccattcaaaaacgcactggccgctcaggaaaaaaagtatggccccttaaagatcgtcagccagccacttgcattcctggaggaggatattcgggaggtgctgaaggaagaaacaggcaccgacctgttcttgaaagaggaggacgagcccgcctacaagtcttgtaaacaagagaatacggctagtggcaaaaaggttaggaagtctttggtgctcgataactgggagaaagaagagtctggcactcagctgcttaccgaagatatttcagatatgcagtctgaaaatcgttttactacgagccttctgatgatccctttgcttgagatccatgacaataggtgcaatttgattcctgagaaacaggatataaatagcacgaacaagacctatacgctcaccaagaagaagccgaaccccaatacgtctaaggtggtaaaactggagaagaatttacagtcaaactgcgaatgggagacagtcgtgtacggcaaaaccgaggaccagctgatcatgactgagcaggccagaaggtatctctccacatacactgctacaagtagcaccagtcgggcacttatactgtag

SEQ ID NO: 36304 - DNA, 2259 bp, Artificial Sequence
  derived and/or modified sequence
atggccaagcggagccggagcgaggacgaggacgacgacctgcagtacgctgatcacgattatgaagttccccagcagaagggtctaaaaaagttatggaacagagtgaaatggaccagagacgaagacgataaactcaaaaaattggtcgagcagcatggaactgatgattggactctaattgcatctcacctacagaatcggtctgattttcagtgtcagcatagatggcagaaggtcctgaaccccgagctgatcaaaggtccttggacaaaggaggaagatcagagagtgatcgaactggtgcagaagtacgggccaaagcggtggtctttaatcgctaagcacttaaagggtaggattggcaagcagtgtagggaacggtggcacaatcatctcaatcccgaagtcaaaaagagctcgtggactgaggaggaggatcgcattatctatgaagcccacaaaagactggggaataggtgggctgagatcgctaagctactgcccggaaggactgataactctattaagaaccattggaacagtacaatgcgccggaaagtggagcaagaagggtacttgcaggacggtataaagtcagaacgatcaagttccaagcttcagcataagccctgcgctgcaatggatcatatgcagactcaaaaccaattttatatccccgttcagatcccaggctatcagtatgtatcaccagagggcaattgcatagaacacgtccagcccacaagtgcgttcatccagcagcccttcatagatgaggatcccgataaggaaaaaaagatcaaggagctggagatgctgctaatgtcagccgaaaatgaggtgcgcagaaagcgcattccctctcagcccggatcatttagcagctggtccgggtcatttctcatggatgataatatgagcaatacacttaacagtctcgatgagcatacatccgagttctatagcatggacgagaaccagcccgttagtgcacagcagaatagtccgaccaagttcctggccgtcgaggcgaatgccgtgctgagctcactgcagacaattccggagttcgcagagaccctggagctgatcgaatccgacccggtcgcgtggtccgatgtcacatcattcgacataagcgatgcggctgcttctcccattaagtctacccccgtaaaattgatgcggatacagcacaatgaaggggccatggaatgccaatttaacgtctctttggtgcttgagggcaagaagaacacctgcaacggtggaaacagtgaagcagtaccactgaccagtcccaacatagccaagttctctacccctcccgctattctgcggaagaaaaggaaaatgagggttggacattccccgggatctgagctgagagacggctccttaaatgacggcggcaacatggctcttaaacatactcccctcaaaactttacccttctcccctagccagttctttaacacttgccctggcaacgaacagctgaatatcgaaaatccgtcctttactagcactccaatatgtggtcagaaagcgctaattacaacccccctacacaaggaaacgacgccgaaagaccagaaggagaatgtggggttccggactcctacaatcaggagatctatcttaggcacaacacctcgcacaccaacccctttcaagaatgcattggccgcgcaggagaaaaaatatggcccactaaagattgtgtctcaaccgctcgcgtttctggaagaagacatcagggaggtgctcaaagaggagacgggaacagatctctttttgaaggaggaagacgagcccgcctacaagagctgtaaacaggaaaataccgccagtgggaaaaaagtccggaaatccttggtgcttgataactgggagaaggaggaaagtgggacgcagctcctaaccgaggatattagtgatatgcaatccgaaaataggtttactacgtcactactgatgatccctctgctggaaattcatgacaatcggtgcaatttgataccggagaagcaagacatcaactccactaacaagacctatacactaaccaaaaaaaagcctaaccccaatacttcgaaagtggtgaagctcgagaaaaacctgcaaagtaattgtgaatgggaaactgtggtgtacgggaagactgaggatcagttgattatgacagagcaggcacgcaggtacctcagcacttacacagccacgtctagcacctcacgcgcactgatcctgtag

SEQ ID NO: 36305 - DNA, 1233 bp, Artificial Sequence
  derived and/or modified sequence
atggctaaacggagcagaagtgaggacgaggacgacgatcttcagtatgcagatcatgattacgaggtgcctcaacagaaaggccttaagaagttgtggaatagagttaaatggacccgcgatgaggacgataagcttaaaaagctggtcgagcaacacggcactgatgactggaccctgatcgcgagccatctccagaatcgatccgatttccagtgccagcatagatggcaaaaggtgctaaatccggagctgatcaaggggccttggactaaagaggaagaccagcgcgttatcgaactcgtgcaaaaatatggaaaaaagagaaagatgcgggtaggccactctcccggtagtgagctgagagatggctctctgaatgatggcggtaacatggccctcaagcatacaccgctcaagaccctgcctttcagcccctcccagttttttaatacatgccccggtaatgagcagcttaatattgaaaatccatctttcacgtccacccccatctgtgggcagaaagccctaataactacacctttacataaggagactacaccgaaggatcagaaggagaacgtcggatttcgcacccctaccatccggcgaagtatcctgggaaccacaccacgcacgcctacgccgtttaagaacgccctagctgcccaggagaagaagtacgggcctctcaagatcgtatctcagcccttggctttcttggaggaggatattagagaagtactcaaagaagagactggcactgacctgtttttaaaagaggaggacgaacccgcatacaagagctgcaagcaagagaataccgcctccgggaaaaaggtaagaaagtccctagtgctggacaattgggagaaggaagagagcggtacccagctgttgacggaggacatctccgacatgcaatctgagaaccggtttacaacctctctgcttatgattccccttctcgagatccacgataatcgatgtaatctaatcccagagaaacaggacatcaactctacaaacaagacatacaccctgacgaagaagaagcccaatccaaatacgagcaaggtggttaagctcgaaaagaatctacagtcaaattgtgagtgggagaccgtggtttatgggaaaaccgaggatcaacttataatgaccgagcaagcacgacgctatctgtccacttatactgcaacttccagcaccagcagggccttgatcctatag

SEQ ID NO: 36306 - DNA, 2259 bp, Artificial Sequence
  derived and/or modified sequence
atggctaaaaggagtcggtccgaagatgaggatgatgatctacagtacgcagatcacgactacgaagtccctcagcagaaaggcctaaaaaaactgtggaatagggttaagtggacccgcgacgaagatgataagctgaaaaaactggtggaacagcacggcactgacgattggaccttaattgcgtctcacctccagaacagatctgatttccagtgtcagcatcgctggcaaaaggtgttaaaccccgagctaataaagggaccttggactaaggaggaagaccagcgggtgatcgaattggtgcaaaagtatgggccaaaacggtggagcctgattgccaagcacctcaagggacgtatcggaaaacagtgcagggagagatggcacaatcatctcaaccccgaagttaaaaaaagcagctggacagaggaagaggaccgcatcatatatgaggcacacaagcggcttgggaaccgctgggccgagatagccaaactcctgcctggtagaaccgacaactctattaagaaccactggaatagtacgatgcggcgaaaggtcgaacaagagggctacttgcaagacggcattaaaagcgaaagatcatcctccaagctccagcataagccttgtgccgctatggatcacatgcagacccaaaaccagttttatattccagtgcagatccccggataccagtacgttagccctgaagggaactgcattgaacacgtgcagccaaccagtgccttcattcagcaaccattcatcgatgaggaccctgacaaagaaaagaaaatcaaggagttggagatgttgctcatgagcgctgagaacgaagtgagacggaaaagaataccctcccaaccgggaagcttctccagttggtccggcagcttccttatggatgataatatgtctaacacccttaattcactagatgagcatacttctgaattttactccatggatgaaaatcagccagtgtccgctcagcagaacagcccaacaaaattccttgccgtcgaggctaatgccgtgctatcgagtctgcagactattccggagttcgcagaaaccctggagctcatcgaaagcgaccctgtagcctggtcggatgttacctccttcgatattagtgatgccgcagcgagtcccattaaatctactccagtcaagcttatgaggatccagcataacgagggtgccatggagtgtcagttcaatgtgagtctggtgctcgagggcaaaaaaaatacgtgtaacgggggtaatagtgaagccgtgcctctgacatcgccgaacattgccaagttctccacccctcccgctatacttaggaagaaaagaaaaatgcgggtcggtcattctccagggtctgaacttcgagatggcagcctgaacgatgggggaaacatggcgttgaagcacacgcccttaaagaccttgcctttctctccctcacagtttttcaatacctgtccaggaaacgaacagttgaatatcgaaaatccatcattcacctcaacacccatctgtggccagaaggctctgataacaacaccactgcacaaggagacaacacccaaggaccagaaggagaatgtgggatttaggacccccacaattcgtagatctatcctgggcacaaccccaaggacccctactcctttcaaaaatgcgctcgccgctcaagagaagaagtacggtcctttaaagatcgtgtctcaaccattagccttcctggaagaggacatacgggaagttttgaaggaggagacaggaacggacctgttcctgaaagaagaagatgagcctgcttacaagagctgcaaacaagagaatacagcgtccgggaagaaagtgcgcaaatccctcgtgttagataattgggagaaagaggaaagcggcacgcagctcctgaccgaggacataagtgacatgcagtcagagaatcggtttacaaccagcctcctcatgatcccgctgctagagatccatgacaaccgctgtaatttgattccagagaagcaggacattaatagtactaataagacttatacattgaccaaaaaaaagccaaatcccaacaccagcaaagtcgtcaaactggaaaagaatctccagagtaactgcgaatgggaaaccgtggtttacggaaagacagaggaccagctcatcatgacagagcaagcacgcaggtatctctcgacatacaccgcaaccagctctacctcccgtgctctcatcctctag

SEQ ID NO: 36307 - DNA, 1714 bp, Artificial Sequence
  derived and/or modified sequence
aaacggcggctcttgagggaggctgggcgcgagattcggcggtgcggacaaaaccctgcaggagactgcgagccctgcagaactgctagctgcgggggagagggcaggggtcgggcgcctgtggcggagccgggctggggccagggcagggaggctgacaagcggcgggagaagccggcggagggcgggatcgcgcctcctgacatgttgggggtatccctggccgggccgggccggggctaagagcggcgctgcgggccggggtcggggtcgggtcgcggtccgcccccgctgtccctccgtcctgccctgtcgaggacgtgcgttccgcactcggccgcctccagagggagcgagggaagcggctagaggatcggggagaaggagcattcgccggaggctggaggaggctgacccgcgtccccgcccagcctgctcctatgcggtacttgaaggatggcgaagaggtcgcgcagtgaggatgaggatgatgaccttcagtatgccgatcatgattatgaagtaccacaacaaaaaggactgaagaaactctggaacagagtaaaatggacaagggacgaggatgataaattaaagaagttggttgaacaacatggaactgatgattggactctaattgctagtcatcttcaaaatcgctctgattttcagtgccagcatcgatggcagaaagttttaaatcctgaattgataaagggtccttggactaaagaagaagatcagagggttattgaattagttcagaaatatggaaagaagagaaaaatgcgagtgggtcattccccaggcagcgaacttagggatggctcattgaacgatggtggtaatatggcgctaaaacatacaccactgaaaacactaccattttctccttcacagtttttcaacacatgtcctggtaatgaacaacttaatatagaaaatccttcatttacatcaacccctatttgtgggcagaaagctctcattacaactcctcttcataaggaaacaactcccaaagatcaaaaggaaaatgtagggtttagaacacctactattagaagatctatactgggtaccacaccaagaactcctactccttttaagaatgcgcttgctgctcaggagaaaaaatatggacctcttaaaattgtgtcccagccacttgctttcttggaagaagatattcgggaagttttaaaagaagaaactggaacagacctattcctcaaagaggaagatgaacctgcttacaaaagctgcaaacaagagaataccgcttctgggaagaaagtcagaaaatcactagtcttagataattgggaaaaagaagaatcaggcactcaactgttgactgaagacatttcagacatgcagtcagaaaatagatttactacatccttattaatgataccattattggaaatacatgacaataggtgcaacttgattcctgaaaaacaagatataaattcaaccaacaaaacatatacacttactaaaaagaaaccaaaccctaacacttccaaagttgtcaaattggaaaagaatcttcagtcaaattgtgaatgggaaacagtggtttatgggaagacagaagaccaacttattatgactgaacaagcaagaagatatctgagtacttacacagctaccagtagtacttcaagagctctcatactgtaattgttattaaaattgatgaaatgcc

SEQ ID NO: 36308 - DNA, 5188 bp, Artificial Sequence
  derived and/or modified sequence
ggacaaaaccctgcaggagactgcgagccctgcagaactgctagctgcgggggagagggcaggggtcgggcgcctgtggcggagccgggctggggccagggcagggaggctgacaagcggcgggagaagccggcggagggcgggatcgcgcctcctgacatgttgggggtatccctggccgggccgggccggggctaagagcggcgctgcgggccggggtcggggtcgggtcgcggtccgcccccgctgtccctccgtcctgccctgtcgaggacgtgcgttccgcactcggccgcctccagagggagcgagggaagcggctagaggatcggggagaaggagcattcgccggaggctggaggaggctgacccgcgtccccgcccagcctgctcctatgcggtacttgaaggatggcgaagaggtcgcgcagtgaggatgaggatgatgaccttcagtatgccgatcatgattatgaagtaccacaacaaaaaggactgaagaaactctggaacagagtaaaatggacaagggacgaggatgataaattaaagaagttggttgaacaacatggaactgatgattggactctaattgctagtcatcttcaaaatcgctctgattttcagtgccagcatcgatggcagaaagttttaaatcctgaattgataaagggtccttggactaaagaagaagatcagagggttattgaattagttcagaaatatgggccaaaaagatggtctttaattgcaaaacatttaaaaggaagaataggcaagcagtgtagagaaagatggcataatcatctgaatcctgaggtaaagaaatcttcctggacagaagaggaggacaggatcatctatgaagcacataagcggttgggaaatcgttgggcagaaattgccaaactacttccaggaaggactgataattctatcaaaaatcattggaattctactatgcgaagaaaagtggaacaggagggctatttacaagatggaataaaatcagaacgatcttcatctaaacttcaacacaaaccttgtgcagctatggatcatatgcaaacccagaatcagttttacatacctgttcagatccctgggtatcagtatgtgtcacctgaaggcaattgtatagaacatgttcagcctacttctgcctttattcagcaacccttcattgatgaagatcctgataaggaaaagaaaataaaggaacttgagatgcttcttatgtcagctgagaatgaagttagaagaaagcgaattccatcacagcctggaagtttttctagctggtctggtagtttcctcatggatgataacatgtctaatactctaaatagccttgacgagcacactagtgagttttacagtatggatgaaaatcagcctgtgtctgctcagcagaattcacccacaaagttcctggccgtggaggcaaacgctgtgttatcctctttgcagaccatcccagaatttgcagagactctagaacttattgaatctgatcctgtagcatggagtgacgttaccagttttgatatttctgatgctgctgcttctcctatcaaatccaccccagttaaattaatgagaattcagcacaatgaaggagccatggaatgccaatttaacgtcagtcttgtacttgaagggaaaaaaaacacttgtaatggtggcaacagtgaagctgttcctttaacatccccaaatatagccaagtttagcactccaccagccatcctcagaaagaagagaaaaatgcgagtgggtcattccccaggcagcgaacttagggatggctcattgaacgatggtggtaatatggcgctaaaacatacaccactgaaaacactaccattttctccttcacagtttttcaacacatgtcctggtaatgaacaacttaatatagaaaatccttcatttacatcaacccctatttgtgggcagaaagctctcattacaactcctcttcataaggaaacaactcccaaagatcaaaaggaaaatgtagggtttagaacacctactattagaagatctatactgggtaccacaccaagaactcctactccttttaagaatgcgcttgctgctcaggagaaaaaatatggacctcttaaaattgtgtcccagccacttgctttcttggaagaagatattcgggaagttttaaaagaagaaactggaacagacctattcctcaaagaggaagatgaacctgcttacaaaagctgcaaacaagagaataccgcttctgggaagaaagtcagaaaatcactagtcttagataattgggaaaaagaagaatcaggcactcaactgttgactgaagacatttcagacatgcagtcagaaaatagatttactacatccttattaatgataccattattggaaatacatgacaataggtgcaacttgattcctgaaaaacaagatataaattcaaccaacaaaacatatacacttactaaaaagaaaccaaaccctaacacttccaaagttgtcaaattggaaaagaatcttcagtcaaattgtgaatgggaaacagtggtttatgggaagacagaagaccaacttattatgactgaacaagcaagaagatatctgagtacttacacagctaccagtagtacttcaagagctctcatactgtaattgttattaaaattgatgaaatgccccactcccttactgcagtctctactaaattaggttgcagtgaaatttttctcaattagttgtttttaaagttgtaagatagcccttttaatacagcatcttttttctattctatatagtaggcagaaagctagtaagtcacttaaggggtagatagtttcatagtttattttttaagagatgagatttttaaaaattgtttttaaagaacaagatgggaaaataatagaatgttcatggatttctaaaagtaaattctcatatattttcttcacaagatatatgttgctactctcttgatgctgcagttttgttatagataggtgtatgagtatatatgatttctgaaattagtctatgtatggaaagcacacatgattttatgaagtacttttgcccatgtgctgatttacttaggctaccatttacaaagaaacacattgaaaaggaatttaaaggaaggatagaaagttgcactactaattttttgttttttttttcagaagcagtaaaattaactacagtgttaaatgtatttatttgagcatagtactgaaaacaaaaagcattcaaaaaagagttttttctttattagtaaatagtattttcttaatctcagaggagctgagagttttgttgaatgtattgtacagtatgtaggagcaggagaactttgtaaattggaaagaagtctgtttttataatttatttttatttttaaagcttaaatgtagatatttatacgtatacagggtgcctagaagccaatgttgtttcctgttattacagctaacacagtaaagaataattttgactttaagtatgaaacagtagtaagttatagctgcaaagaatacaatatctatactgtatgtcacatctacctaaatgttgcactatgccctttaaatcatgctggttataaagtagttctaaaaatgtactaaataataatttaatattttctttttaaattatatcgggggtggtcatatacattaatctggtgatttgtatatgtgtttgaaatttttgcattttgtttaaaaaataatatggtaccttggtccctaaaaacagtctgcacttagaagtttatatttactcagtgtttcagaagtggagaacattatcttttatttataaaaatattttgtccttttttaaatgttttgtgtttctctacaggttacaacagttgcttcagttgcctgttttaggtgtttgcacttattttatttcttcttgaaagaatttttatttgcttttgtggtagagattatatgtaattttttttcagtcatataatggtgtgctgtcaacttaaacactgacaggtaaatagaattgtacactgtagtttgaattatttataattgacacactctctccctctccactcctgaagtatgctgctatagaaaatagcagaatcggcttgctgctacgagagaaggaaagagcgaccaccacttgcactgtgtgaaaagataaaaaacaaatgatggcaagttctcaagttaactaaatggaatcaaccattaccaggcaaattcttgcaaataccaaaatactactatgccttataaaacaaaatgaaagcaggttaagattttctgctctgtttgtatgttaatagaaatggaaatactaagtattttaatgcttagctcttgaacagtagacctaaaagggttttaagctatttaaatctacttgctagtttttgcatattttatatatatatatatttatatatatatatagtgagaagtgaagaaaatgtatggtactaagattatgccttattgataaatagataaaccaatttgaatcctcttagcatgtttaagtatgttgattgctttctaattaatgaacttctcacagaaatttcacttagtgaaaccaatgattgtagcaaactcatactggatcatttcagttaccttgaactaatagcacataatggttttttgttgttgttgtttttaatgtagcccttacctggatatacatagtctgcaatcaccaaagtataatatcttgtaaggctatattttttaaagcatattttttcttgagcattaaattatcctaaatggtaatatattgtggataagtctgggcttattggacataatacatatttgggttggtactggttgaatccttcagttaactgctttgttgctttttgcaagattttttatcttaaacatgtcaggcatcttaagtcacctttatactgttttgttcctctgagtttctttcagtatgttatacaaatgccagacataacatgtagcagccatacttgcatggaaactgactacacatacataatactgcattttattgtaaggttttcacattaatacagcaattaccctgactaaattgagttttgtgatatatggaaaacttcattgtaagagaatcttgcatacaatgttgacatattaacatccaaaataaagcatctgtgtacaag

SEQ ID NO: 36309 - protein, 869 aa, Artificial Sequence
  derived and/or modified sequence
MEPETALWGPDLQGPEQSPNDAHRGAESENEEESPRQESSGEEIIMGDPAQSPESKDSTEMSLERSSQDPSVPQNPPTPLGHSNPLDHQIPLDPPAPEVVPTPSDWTKACEASWQWGALTTWNSPPVVPANEPSLRELVQGRPAGAEKPYICNECGKSFSQWSKLLRHQRIHTGERPNTCSECGKSFTQSSHLVQHQRTHTGEKPYKCPDCGKCFSWSSNLVQHQRTHTGEKPYKCTECEKAFTQSTNLIKHQRSHTGEKPYKCGECRRAFYRSSDLIQHQATHTGEKPYKCPECGKRFGQNHNLLKHQKIHAGEKPYRCTECGKSFIQSSELTQHQRTHTGEKPYECLECGKSFGHSSTLIKHQRTHLREDPFKCPVCGKTFTLSATLLRHQRTHTGERPYKCPECGKSFSVSSNLINHQRIHRGERPYICADCGKSFIMSSTLIRHQRIHTGEKPYKCSDCGKSFIRSSHLIQHRRTHTGEKPYKCPECGKSFSQSSNLITHVRTHMDENLFVCSDCGKAFLEAHELEQHRVIHERGKTPARRAQGDSLLGLGDPSLLTPPPGAKPHKCLVCGKGFNDEGIFMQHQRIHIGENPYKNADGLIAHAAPKPPQLRSPRLPFRGNSYPGAAEGRAEAPGQPLKPPEGQEGFSQRRGLLSSKTYICSHCGESFLDRSVLLQHQLTHGNEKPFLFPDYRIGLGEGAGPSPFLSGKPFKCPECKQSFGLSSELLLHQKVHAGGKSSQKSPELGKSSSVLLEHLRSPLGARPYRCSDCRASFLDRVALTRHQETHTQEKPPNPEDPPPEAVTLSTDQEGEGETPTPTESSSHGEGQNPKTLVEEKPYLCPECGAGFTEVAALLLHRSCHPGVSL

SEQ ID NO: 36310 - DNA, 2610 bp, Artificial Sequence
  derived and/or modified sequence
atggagcccgagaccgccctgtggggccccgacctgcagggccccgagcagagccccaacgacgcccacagaggcgccgagagcgagaacgaggaggagagccccagacaggagagcagcggcgaggagatcatcatgggcgaccccgcccagagccccgagagcaaggacagcaccgagatgagcctggagagaagcagccaggaccccagcgtgccccagaacccccccacccccctgggccacagcaaccccctggaccaccagatccccctggacccccccgcccccgaggtggtgcccacccccagcgactggaccaaggcctgcgaggccagctggcagtggggcgccctgaccacctggaacagcccccccgtggtgcccgccaacgagcccagcctgagagagctggtgcagggcagacccgccggcgccgagaagccctacatctgcaacgagtgcggcaagagcttcagccagtggagcaagctgctgagacaccagagaatccacaccggcgagagacccaacacctgcagcgagtgcggcaagagcttcacccagagcagccacctggtgcagcaccagagaacccacaccggcgagaagccctacaagtgccccgactgcggcaagtgcttcagctggagcagcaacctggtgcagcaccagagaacccacaccggcgagaagccctacaagtgcaccgagtgcgagaaggccttcacccagagcaccaacctgatcaagcaccagagaagccacaccggcgagaagccctacaagtgcggcgagtgcagaagagccttctacagaagcagcgacctgatccagcaccaggccacccacaccggcgagaagccctacaagtgccccgagtgcggcaagagattcggccagaaccacaacctgctgaagcaccagaagatccacgccggcgagaagccctacagatgcaccgagtgcggcaagagcttcatccagagcagcgagctgacccagcaccagagaacccacaccggcgagaagccctacgagtgcctggagtgcggcaagagcttcggccacagcagcaccctgatcaagcaccagagaacccacctgagagaggaccccttcaagtgccccgtgtgcggcaagaccttcaccctgagcgccaccctgctgagacaccagagaacccacaccggcgagagaccctacaagtgccccgagtgcggcaagagcttcagcgtgagcagcaacctgatcaaccaccagagaatccacagaggcgagagaccctacatctgcgccgactgcggcaagagcttcatcatgagcagcaccctgatcagacaccagagaatccacaccggcgagaagccctacaagtgcagcgactgcggcaagagcttcatcagaagcagccacctgatccagcacagaagaacccacaccggcgagaagccctacaagtgccccgagtgcggcaagagcttcagccagagcagcaacctgatcacccacgtgagaacccacatggacgagaacctgttcgtgtgcagcgactgcggcaaggccttcctggaggcccacgagctggagcagcacagagtgatccacgagagaggcaagacccccgccagaagagcccagggcgacagcctgctgggcctgggcgaccccagcctgctgacccccccccccggcgccaagccccacaagtgcctggtgtgcggcaagggcttcaacgacgagggcatcttcatgcagcaccagagaatccacatcggcgagaacccctacaagaacgccgacggcctgatcgcccacgccgcccccaagcccccccagctgagaagccccagactgcccttcagaggcaacagctaccccggcgccgccgagggcagagccgaggcccccggccagcccctgaagccccccgagggccaggagggcttcagccagagaagaggcctgctgagcagcaagacctacatctgcagccactgcggcgagagcttcctggacagaagcgtgctgctgcagcaccagctgacccacggcaacgagaagcccttcctgttccccgactacagaatcggcctgggcgagggcgccggccccagccccttcctgagcggcaagcccttcaagtgccccgagtgcaagcagagcttcggcctgagcagcgagctgctgctgcaccagaaggtgcacgccggcggcaagagcagccagaagagccccgagctgggcaagagcagcagcgtgctgctggagcacctgagaagccccctgggcgccagaccctacagatgcagcgactgcagagccagcttcctggacagagtggccctgaccagacaccaggagacccacacccaggagaagccccccaaccccgaggaccccccccccgaggccgtgaccctgagcaccgaccaggagggcgagggcgagacccccacccccaccgagagcagcagccacggcgagggccagaaccccaagaccctggtggaggagaagccctacctgtgccccgagtgcggcgccggcttcaccgaggtggccgccctgctgctgcacagaagctgccaccccggcgtgagcctgtag

SEQ ID NO: 36311 - DNA, 2610 bp, Artificial Sequence
  derived and/or modified sequence
atggagcccgagacggctctttggggccctgatctacagggcccagaacagtctccaaacgatgcccataggggcgcagaatccgagaatgaagaagagagtcccagacaggaaagcagcggggaggagatcatcatgggtgaccccgctcagagccctgagagtaaggatagtaccgagatgtctcttgaacgcagtagccaggaccctagtgtgcctcagaacccccctaccccactggggcattctaatcccctcgatcaccagattcccctcgaccccccggcacctgaagtggtgccaaccccctctgactggaccaaagcctgtgaagctagctggcaatggggagcccttacaacctggaatagtcccccggttgttccggccaacgaaccgtccctgagggagctagttcaggggaggcccgctggcgctgaaaagccatacatctgtaacgagtgcggaaaatccttctcccagtggagtaaacttctcagacatcagcgcatacatacgggtgaaagaccaaacacatgtagtgaatgcgggaaatcatttacccaatcaagccaccttgttcagcaccagaggactcacacaggtgagaagccttataaatgcccagattgcgggaaatgtttttcttggagctctaacttggtccagcaccagcggacccacacgggtgagaaaccatataaatgtactgagtgcgaaaaagccttcacccaatccaccaatctcattaagcaccagaggtcccacactggagagaaaccatacaaatgcggagagtgtaggagggccttctaccggtcttccgatctgattcaacaccaagcgacacatacgggggaaaaaccctacaaatgtccagaatgcggcaagagattcgggcagaaccacaatctcctcaaacatcaaaagatccacgccggagagaagccgtataggtgcaccgaatgtgggaagtcgttcatccagtctagtgagcttacccagcatcaacgcacccacactggcgaaaagccgtacgagtgcctagaatgcggcaagtcatttggccacagtagcacgctcataaaacatcaaagaacacatctgcgagaagaccccttcaaatgtcccgtttgtggcaaaacgttcactctgtcagccacccttctgaggcaccagagaactcatactggcgagcgcccctacaagtgtcccgaatgtggcaagagcttttctgtatccagtaatttgataaatcatcagcgaatacaccggggtgagcgcccttacatatgcgctgactgtggaaaatctttcataatgagtagcactctgattaggcaccagcgcattcatacaggtgagaaaccgtacaaatgtagcgattgtgggaaatcattcataagatcttcgcacctcatccagcacagacggacccacacaggggaaaagccatataagtgtccggagtgtggcaaatccttctcgcaaagtagtaacctgattacccatgtccggactcacatggatgagaacctctttgtgtgttctgattgcggcaaggcctttctcgaagctcacgagttggagcaacacagggtcattcatgagaggggaaagacccccgcccggcgggctcaaggggacagcctgcttggactgggagacccctcactgctgactccccccccaggcgcgaaacctcacaagtgtctggtgtgcgggaaaggctttaacgacgaaggcattttcatgcagcatcagcggattcacatcggggagaacccatataaaaacgcagacggtctgatagctcatgctgcacccaaacccccacaactcagaagccctaggctgccatttaggggtaacagttacccaggagccgccgaaggccgcgccgaggccccagggcagccactgaagccccccgaggggcaggagggtttttcccaacgcagagggctgctctcctccaagacctacatctgctcccactgcggtgagtccttcttagacagaagcgtgttgcttcagcatcagctaacccacgggaacgaaaagccgtttctcttcccggactacagaatcgggttgggagagggagccgggccttcaccatttctatccggtaagccatttaaatgccctgaatgtaaacagtcattcgggcttagtagtgagttgctcctccatcagaaagtgcacgccggaggcaagtcttcgcaaaagtctcccgagcttggcaagtcctccagtgtgcttctcgagcatttacggagcccactcggtgcccggccgtatcggtgctctgattgtcgagcttcttttctggatcgagtggcattgacacggcaccaggagactcatacgcaggagaagcctcccaaccccgaggatccaccacccgaggccgtgacattaagcacagaccaggaaggagagggggagaccccgacgcctaccgagagttcttcccatggcgagggccaaaatccaaagactttagttgaggagaagccatatctgtgcccagagtgtggggctggatttaccgaagttgccgccttgttgcttcaccggtcatgccatccgggggtgtctctgtag

SEQ ID NO: 36312 - DNA, 2610 bp, Artificial Sequence
  derived and/or modified sequence
atggagcctgagacagccctgtggggccctgacctgcagggccctgagcagagccccaatgatgcccacagaggagctgagagtgaaaatgaggaggagagcccccggcaggagagcagcggggaggagatcatcatgggagaccctgcccagagccctgagagcaaggacagcacagagatgagcctggagaggagcagccaggaccccagcgtgccccagaacccccccacccccctgggccacagcaaccccctggaccaccagatccccctggaccccccagcccctgaggtggtgcccacccccagcgactggaccaaggcctgtgaggcctcctggcagtggggcgccctgaccacctggaacagcccccctgtggtgcctgccaatgagcccagcctgcgggagctggtgcagggccggcctgctggagctgagaagccctacatctgcaatgaatgtgggaagagcttcagccagtggagcaagctgctgcggcaccagaggatccacactggagagcggcccaacacctgcagtgaatgtgggaagagcttcacccagagcagccacctggtgcagcaccagaggacccacactggagagaagccctacaagtgcccagactgtgggaagtgcttctcctggagcagcaacctggtgcagcaccagaggacccacactggagagaagccctacaagtgcacagaatgtgagaaggccttcacccagagcaccaacctgatcaagcaccagaggagccacactggagagaagccctacaagtgtggggagtgccggcgggccttctaccgcagcagtgacctgatccagcaccaggccacccacactggagagaagccctacaagtgcccagaatgtgggaagagatttggccagaaccacaacctgctgaagcaccagaagatccatgctggggagaagccctaccgctgcacagaatgtgggaagagcttcatccagagcagcgagctgacccagcaccagaggacccacactggagagaagccctatgaatgtctggagtgtgggaagagctttggccacagcagcaccctcatcaagcaccagaggacccacctgcgggaggaccccttcaagtgccctgtgtgtgggaagaccttcaccctgagcgccaccctgctgcggcaccagaggacccacactggagagcggccctacaagtgcccagaatgtgggaagagcttctctgtgagcagcaacctgatcaaccaccagaggatccacagaggagagcggccctacatctgtgccgactgtgggaagagcttcatcatgagcagcaccctcatccgccaccagaggatccacactggagagaagccctacaagtgcagcgactgtgggaagagcttcatccgcagcagccacctgatccagcacaggaggacccacactggagagaagccctacaagtgcccagaatgtgggaagagcttcagccagagcagcaacctgatcacccacgtgaggacccacatggatgagaacctgtttgtgtgcagcgactgtgggaaggccttcctggaggcccacgagctggagcagcacagggtcatccacgagcggggcaagaccccagcccggcgggcccagggcgacagcctgctgggcctgggggaccccagcctgctgaccccacctcctggggccaagccccacaagtgcctggtgtgtgggaagggcttcaatgatgagggcatcttcatgcagcaccagaggatccacatcggggagaacccctacaagaatgctgatggcctcatcgcccatgctgcccccaagccaccccagctgcggagcccccggctgcccttccggggcaacagctacccaggagctgctgagggccgggcagaggcccctggccagcccctgaagcccccagagggccaggagggcttcagccagaggcggggcctgctgagcagcaagacctacatctgcagccactgtggggagagcttcctggacagatctgtgctgctgcagcaccagctgacccacggcaatgagaagcccttcctgttcccagactacagaattggcctgggggagggcgccggccccagccccttcctgagcggcaagcccttcaagtgcccagagtgcaagcagagctttggcctgagcagcgagctgctgctgcaccagaaggtgcatgctgggggcaagagcagccagaagagccctgagctgggcaagagcagctctgtgctgctggagcacctgcggagccccctgggcgcccggccctaccgctgcagcgactgccgggccagcttcctggacagagtggccctgaccaggcaccaggagacccacacccaggagaagccacccaacccagaagatcctcctcctgaggccgtgaccctgagcacagaccaggagggggagggggagacccccacccccacagagagcagcagccatggagagggccagaaccccaagaccctggtggaggagaagccctacctgtgcccagaatgtggggccggcttcacagaggtggccgccctgctgctgcacaggagctgccaccctggggtgtccctgtag

SEQ ID NO: 36313 - DNA, 2610 bp, Artificial Sequence
  derived and/or modified sequence
atggagcccgagaccgccctgtggggccccgacctgcagggccccgagcagagccctaatgacgcacacagaggggccgagtccgaaaatgaagaggaatcgccccgccaggagagctctggcgaagagatcattatgggggatccagcacagtcccctgagtccaaggactctactgaaatgtcactggaaagatctagccaagacccttctgttccgcagaacccacccacgccgttgggacacagcaatccattagaccatcaaattcccctggatccccctgccccagaagttgtgcccactccatctgattggaccaaagcctgtgaagcctcatggcagtggggagctctgaccacatggaactccccacctgtggtgccagccaatgagcctagtctgcgagaactggttcaagggcgccccgcgggggccgagaaaccatacatctgtaatgagtgtgggaagagtttctcccagtggtcaaaattgcttaggcatcagcgcatccacactggtgagaggccgaatacgtgtagtgagtgtggcaaatcattcacgcagagctcccaccttgtccaacaccagagaacacataccggcgaaaagccttacaagtgcccggactgtggtaaatgtttttcttggtcttctaatttggtgcagcaccagaggacacacacaggcgaaaaaccctataaatgcaccgagtgcgagaaggccttcacacaatcaaccaatttgattaaacatcagcggtcccacacaggtgaaaagccttacaagtgtggcgagtgtcgccgcgccttctataggtcatctgacttgatccagcatcaggccacacacactggggagaagccctataagtgccctgagtgtggaaaacggttcggtcaaaatcataacctcctaaaacaccaaaagattcatgccggggagaagccttaccggtgtaccgagtgcggcaagtcattcatccagtcttccgagctaacgcaacatcagcgaacacataccggtgagaagccctatgagtgcctcgaatgcggtaaaagttttgggcacagcagcacgctaattaaacatcaacgaactcacctgcgcgaagaccccttcaagtgcccagtttgcggcaagactttcactctgtccgctacactactccgacaccagcgcacccatacaggtgaacggccatacaaatgccccgagtgcggtaaatcctttagcgtgtcttcaaacctgatcaaccaccagcgaattcaccgcggagagcgcccatacatttgcgcggattgtggaaagtccttcataatgagttctactctaatacgccatcagagaatccacaccggagaaaagccctacaaatgctctgactgcggcaaatcctttatccgctctagccaccttattcagcacagaaggacccacacaggagagaaaccctacaaatgcccagaatgtggcaagagttttagccaatccagcaacctgatcacccacgtgcgaacacatatggacgaaaacttgttcgtctgttctgactgcgggaaagcctttctggaagcccatgagttagagcaacatcgcgttattcatgagagaggaaagactccagcgaggagagctcaaggcgatagcttgctcgggctgggggatccctccttgctgaccccaccaccaggagccaagccccataagtgtttggtgtgcggcaaaggctttaacgatgaaggcatcttcatgcagcaccagcggattcatatcggcgaaaacccctataaaaacgccgatggcctcatcgctcacgcagctcccaagccacctcagctgcggtcccctaggctaccttttcgggggaattcctatcccggggccgcggaaggccgcgctgaagctccgggccagccactgaaaccgccggagggacaagaggggttctctcagcgacggggccttctgagcagtaaaacatacatatgtagtcactgtggagaatcatttctcgatcgcagtgtgctactgcagcatcagttgactcatggaaatgaaaagccatttctgtttcctgattacaggatcggcctcggagaaggcgcaggtccaagcccattcttgagcggaaaaccgttcaaatgccctgaatgcaaacaatcattcgggctcagttccgagctgctgttacatcagaaggttcatgccggtgggaaatccagccagaaatcacccgagcttggtaaatcatccagcgtccttctggaacacttgcgctcacccctgggagcccgaccctatcggtgtagcgattgtcgagcctcctttctggacagggtcgcgctcaccaggcaccaggaaactcacactcaggagaaaccccctaaccctgaagacccgcctcccgaagccgtgactttgtctaccgaccaggaaggagagggggaaacaccaacaccaactgagtctagctcccacggggaaggccaaaaccccaaaactctggtggaggagaagccgtatctgtgtccggagtgcggcgcaggatttacagaggtggccgcactcctattgcaccgcagctgccatccaggcgtgagtctgtag

SEQ ID NO: 36314 - DNA, 2610 bp, Artificial Sequence
  derived and/or modified sequence
atggaaccagagactgccctgtggggacctgatttacagggccctgagcagtccccaaatgacgcccaccgtggggcagagtccgagaatgaagaagagagtcctcggcaggagtccagcggggaggaaatcatcatgggagacccagctcagtcacctgagtctaaagacagcacagagatgtccctagagcgaagtagtcaggacccaagcgtgcctcagaatccacccacaccactgggccactctaaccctcttgaccaccaaataccccttgacccccctgctcccgaagtggttcctaccccttcagattggacaaaggcctgcgaggcctcctggcaatggggggctttgaccacctggaactctcccccagtggtgccggcaaacgagccgagtctgcgcgaacttgttcaggggaggccagctggagcggagaagccttacatctgcaatgagtgtggcaagtctttctcccagtggtcgaagcttcttaggcaccaacgtatacatactggagagcgccctaatacttgttctgagtgtggaaaatcttttacccagtcctctcaccttgttcagcaccagcgcacccacaccggagaaaagccttataagtgccctgactgcggcaagtgcttttcctggtcttcgaacctggtgcagcaccagcgcactcacactggagagaaaccgtataagtgcactgagtgtgagaaggctttcacccagtctacaaatttgatcaagcatcagcgaagccatactggagaaaagccttataaatgtggagagtgcaggagggcattttacaggagtagtgacctgatccagcatcaagccacgcataccggggaaaagccctataagtgtcctgagtgtgggaagcggtttggtcaaaaccataacttactgaagcaccagaaaattcatgccggagaaaaaccctaccggtgtaccgaatgtggtaagtctttcattcagtcaagcgaactcacccaacaccaacgcacccacacaggcgagaaaccatacgagtgcttggagtgcgggaagagtttcgggcactcatctactctgatcaagcatcagcgcactcatctgcgggaggacccttttaagtgcccagtgtgtggaaagacttttactctttccgctacccttctccgtcaccagcgcacgcacacaggtgaacggccttacaaatgccctgaatgtgggaaaagtttctcagtgtcttcaaaccttatcaatcaccaacgcatccatcgcggagagaggccttacatttgcgcagattgtggcaaaagcttcatcatgtcgagcaccctgatcaggcaccagcgtattcatacgggagagaagccatacaagtgctcagattgcggcaaatcattcatacggagcagtcacctcatacagcacaggcggactcacacaggtgagaagccctacaagtgtcccgaatgtgggaaatcgttctctcaaagtagcaaccttatcacccatgtcagaactcatatggacgagaatttattcgtgtgcagtgattgcgggaaagctttcctggaggcacacgagttggaacagcacagggtaattcatgaacggggaaagaccccagccaggagggctcagggcgacagtcttttgggtcttggcgaccccagcctactgacgcccccacccggagcaaaaccccacaaatgcctggtttgtggcaagggcttcaatgacgagggaatctttatgcagcaccagcgcatccatatcggcgagaacccttacaaaaatgcagatggtctcatcgcccatgctgctccaaaaccaccccaactgaggagccctagactgccttttaggggtaatagctaccccggagccgctgaggggcgagccgaagctcccggtcaacctctcaaaccaccggaaggacaagagggctttagccagcgtcgaggtctcctgtctagcaaaacatacatttgcagccattgtggcgagtcctttctcgatcggtcagtactgttacagcatcagcttacgcacggcaacgaaaaacctttcctcttccccgactatcgcattgggctgggagaaggcgctggacccagcccattcctgagtggcaagccattcaaatgtccagaatgcaaacagtcattcgggctcagttccgaattgctgctgcaccagaaagtacacgccggaggcaagagcagccaaaagtcccctgaactggggaagtcttcctccgtgcttttagagcatctgcggtcgcccctgggggctcggccatacaggtgctcagattgccgggcaagcttcctcgatcgtgtggccttgaccaggcatcaggagacacacacccaggagaagcctcctaatcctgaggatccacctcccgaagcagtgaccctgagtaccgaccaggaaggagagggcgaaacgccgaccccgacagagtcgtcctctcacggggaggggcagaaccctaaaaccctggttgaggagaagccatacctgtgtcctgagtgcggtgccggtttcactgaggtggccgcattgttgctgcatcggtcctgccaccctggtgtaagcctatag

SEQ ID NO: 36315 - DNA, 6087 bp, Artificial Sequence
  derived and/or modified sequence
tcctgctccgtcccagtcaccctgaactggtccccgggtcctcagcctggaatcaccccttgagaaggaccccagagtcctcggcgcccagtccgtcccccgaggcagggcactgaaggggttaagtcccctggggctggattccgccttccggcttttcccagaccccagagccggtccctggaacactgcagtcctgagctctgggatggagcccgagactgcgctgtggggcccggatctgcagggtccggaacagagccccaacgatgctcacagaggtgccgagagtgaaaacgaagaggagagccctcggcaggaaagttctggggaggagatcatcatgggagacccggctcagagtccagaatccaaggactcaacagagatgtccctggagagatcctcccaggacccctctgtcccccagaaccccccaaccccactgggtcactccaatcccttggaccaccagatccccctggaccccccagccccggaggtagtccctaccccatctgactggaccaaggcctgcgaggccagctggcagtggggcgctctcaccacatggaacagccccccagtcgtccccgccaacgagcccagcctgcgggagctggtgcagggccgcccggcgggggcggagaagccctacatctgcaacgagtgcggcaagagcttcagccagtggtccaagctgctgcggcaccagcgcatccacacgggagagcggcccaacacctgctccgagtgcggcaagagcttcacgcagagctcgcacctggtgcagcaccagcgcacgcacaccggcgagaagccctacaagtgccccgactgcggcaagtgcttcagctggagctccaacctggtgcagcaccagcgcacgcacacgggagagaagccctacaagtgcacggagtgcgagaaagccttcacccagagcaccaacctcatcaagcaccagcgatcccacaccggcgagaagccctacaagtgcggcgagtgccgccgggctttctaccgcagctcggacctcatccagcaccaggccacccacacaggcgagaaaccctacaagtgccccgagtgcgggaagcgcttcggccagaaccacaacctcctcaagcaccagaagatccacgcgggcgagaagccataccgctgcaccgagtgcgggaagagcttcatccagagctcggagctgacccagcaccagcgcacgcacacaggcgagaagccctacgagtgcctagagtgcggcaagagcttcggccacagctccaccctcatcaagcaccagcggactcacctgcgcgaggacccgttcaagtgcccagtgtgcggcaagaccttcaccctgagcgccacgttgctgcggcaccagcgcacgcacacgggcgagcggccctacaagtgcccagagtgcggcaagagcttcagcgtcagctccaacctcatcaaccaccagcgcatccaccgcggcgagcggccctacatctgcgccgactgcggcaagagcttcatcatgagctccacccttatccgccaccagcgcatccacaccggtgagaagccctacaagtgttccgactgcggcaagagcttcatccgcagctcccaccttatccagcaccgccgcacgcacaccggcgagaagccctacaagtgccccgagtgcggcaagagcttcagccagagctccaaccttattacccacgtccgcacgcacatggacgagaacctgttcgtgtgctccgactgcgggaaggccttcctggaagcccacgagctggagcagcaccgggtgatccatgagagggggaagaccccagcgcgtagggcccagggcgacagcctgctggggctcggggacccctccctgctgaccccgccgccgggagccaagccgcacaagtgtctcgtgtgcggaaagggcttcaacgacgagggcatcttcatgcaacatcagaggatccacatcggagaaaacccctacaaaaatgcagacggcctcatcgcacacgcagcccccaaacctcctcagttacgatccccaaggctccctttcagagggaattcctaccccggggctgcggagggcagagcggaggcccccggacagccccttaagccgccggagggtcaggagggcttcagccagaggcgggggctgctgtcctccaagacctacatctgctcccactgcggagagagcttcctggatcgctctgtgctcctccagcatcagctcacccacggcaacgaaaagccctttctctttcctgattatagaattggcctaggggaaggcgcagggcccagccccttcttaagtgggaagccctttaaatgccctgaatgcaaacaaagctttggcctcagctctgagctgctgctgcaccagaaagtccatgcaggcgggaagagctcccagaagagtccagagctggggaagagctcttccgtcctcctggagcatctcaggagccccctgggggccagaccctaccgctgctcagattgcagggcctccttcctcgaccgcgtggccctcacccggcaccaagaaacccacacccaggaaaaaccccccaatcccgaggacccccctccagaggcagtcaccctgtccacagatcaggaaggtgagggcgagacccctacccccacagagagcagcagccatggggaagggcaaaaccccaaaaccctagtggaagaaaagccctatctgtgccccgagtgtggagccggcttcacagaagtcgcagccctcctgctccataggagctgccacccaggtgtctccctgtgaaatgggtctggagaccaggggcctcgctctctccagagaggaacactggattttttcccccaaaaaaattacatggggaagggaggataaccctatcagatggtagtggagtggaggagaaagaaccctgggaaaaaatagtgcttttacatcagtgatgagaaaccctataaaattgttggtgggaagcacttataaggcagtagagaaaaactgttgggttagaaaccctataaatatgtaggaaaaaaaaaagccctttaagtctgtagcagaaaaaccctataaaccatagtggataaaagccctattaattgtaggaagaggtcccaatatgtctctgaacaaccctataaaattgtatcaaaatccttaggaaaatcctatagggtcggggaagtaccgcaatggcactgacccgggagtaacgaccctcagatgatgcagaaaacacctctccctcactgttccacaatgttctctcccagcagccctggacagttctcatggaggaagatgctcagctgggggagtggtgtgggaactgggtggaactgaaaaggaagaaaataggagaaaaataagtgaccaggagctctggagcccccagaggagataagacagagactaggaagaaaaggtcccactcactgcactggggtccttggggtttgaggacaatgttagatgcattgtgtgttttagggaaagaggcctatggaatcccttatcaaaaccccaaaatggggaagaaaaaacaaattggcaagcctttttaaaggctgaagtttggggtgcagaaacatggtcagtataagaatactgagaaaccaccacaaaaattagggggaagcagggggcagtttctgttagattgctttgaggggagcaaaccaaggtggggaaactgctcacatggaacccagctaactccaggccccttcttgcttccggaagcttgcgaaactgcaagtagcaggcaggtcccagctctcagagtgcaagggttctccccacaccaggcaggaccaccctttctccctgcccagccagggacttctactctgcaaggcctccagggatggcggttgcctcccaccacattctcaggtctcaccttcaggaggtttttcctgaaatctaactgccgccagtggcagctcatttcctcaaattctgtcctcagtggagagggagaaccgctgctagtcgacctccaaagaataaagcccttcagagacttagggcctgcgtgtgggcctccccagccttctccaagtcatcagggccacagaatttcttagaaagctttgattagccagcaacttgattttaaacttcagctattcatctttgttggtagcaaggctgccccgcaggataaggcagccctcctccctggtggggatccagacaccccacagactgagccacaggtccctgaagagtccgcagaggccgtatcaccctcttcaccctggtacctggagccctccagggttgtgagatccagcccaatctcagccttgagatggatgggatggattccactcacttggctcccctctcctccttagccagaaaccttcagaaggaaacagaaggatgagaaagcctcccttgccaggcccatctcacctcccacaccacacagttacacattcataaacagccaagcctgctcacaggcctgggcatatgtggctggggagagactgttgccctatgagatggtggaagacagaaaactcttgaatgaaacatctgtaacaagactcccactccctaatcctggagaccccttcaaaaggagaggactctgctcagcgctgggtcagaaaggaagtgcttgccaaccccagtaatgcgctgtcctggagtaagaggactgagatgccagctgtggggcccgtcaggagtcacgtctcaagagaggggtgacccagatttttgcaaagctgtggaagagacctctaattccatgacctaaagtttcacacaacctttatgcaaatccttcgccatttgtctatcctggccccagcaggatgaccctcacatttaaaaggatcaaaatctcaaacattgtgggaggaaaacgccaggcctgctggggagagggagaaggcaggcctcaggattgtgcggagaaccatgttgccatctgcataacgccccagcctatccaagtgccaggaagggaagcactactgaggggggtgctgcctgtgggtctcttcctaacagaacgccaacgaagggggtgccctgtaagaatgagaagtctgccaagtctaaggagatgtccccctccccaagatggtagcagaaactgaagttgtaaagacaaacctctcgcaaagccagaagcagatgctctcaaaaacaggcctaaggaatctgttcccagaagaggcctggggagcagcttttggggctcagaggccagtctggggggaggcaggcagtgtgactgaaggccggcgcaggcctgtttcggactagggtgtagcatatttagtaggatgctcacatgttgtagggatgggtgagggctaaggggcttggctcttgtacgggatggatgatgtgagcgcacagttcgtagggtcaggcgtcttgcggtaggaaaggggcagggttcgatacctctggggtgtggcgtgttctctcttgcccacctccccaagctcctttaaccaggagcttccctcccagagtgagctacgtcttgggaggattgaagcagggaggtggcagtggctagagttgctcagatcggctcagatgaaggcccaggggtcaaagcatttgctcaccacaactgagtctggaaggcactgtgcagccaaaccctcttgtccaatcacatgcaggccccaggcccctcagaaacgccctggtggagggaggagcccaacagatagggtcagggagtcagtggggaaagcagaggggagagcttagagtgaaacttgaaactgctatggacatggaggtcagatgggaacttggaactgggcatgaatcctgaatggtggggaaacttgaagccatcacagccaagaggtggggttccatgacctgccctgaggtcagcagctcccagactcctttgccctcactagggaagccccagtcaccggacttgtccccatggagtgaagagaggccccatttttgagtgttgtgtgtccaaaacagtgttgtgtcactggtggtcatgttgcttagttgaagagaataaagggaataagatttcctgggtg

SEQ ID NO: 36316 - protein, 1703 aa, Artificial Sequence
  derived and/or modified sequence
LSLLCVSLKKAKFDGAQEKFNTYVTLKVQNVKSTTIAVRGSQPSWEQDFMFEINRLDLGLTVEVWNKGLIWDTMVGTVWIPLRTIRQSNEEGPGEWLTLDSQVIMADSEICGTKDPTFHRILLDTRFELPLDIPEEEARYWAKKLEQLNAMRDQDEYSFQDEQDKPLPVPSNQCCNWNYFGWGEQHNDDPDSAVDDRDSDYRSETSNSIPPPYYTTSQPNASVHQYSVRPPPLGSRESYSDSMHSYEEFSEPQALSPTGSSRYASSGELSQGSSQLSEDFDPDEHSLQGSDMEDERDRDSYHSCHSSVSYHKDSPRWDQDEEELEEDLEDFLEEEELPEDEEELEEEEEEVPDDLGSYAQREDVAVAEPKDFKRISLPPAAPGKEDKAPVAPTEAPDMAKVAPKPATPDKVPAAEQIPEAEPPKDEESFRPREDEEGQEGQDSMSRAKANWLRAFNKVRMQLQEARGEGEMSKSLWFKGGPGGGLIIIDSMPDIRKRKPIPLVSDLAMSLVQSRKAGITSALASSTLNNEELKNHVYKKTLQALIYPISCTTPHNFEVWTATTPTYCYECEGLLWGIARQGMRCTECGVKCHEKCQDLLNADCLQRAAEKSSKHGAEDRTQNIIMVLKDRMKIRERNKPEIFELIQEIFAVTKTAHTQQMKAVKQSVLDGTSKWSAKISITVVCAQGLQAKDKTGSSDPYVTVQVGKTKKRTKTIYGNLNPVWEENFHFECHNSSDRIKVRVWDEDDDIKSRVKQRFKRESDDFLGQTIIEVRTLSGEMDVWYNLDKRTDKSAVSGAIRLHISVEIKGEEKVAPYHVQYTCLHENLFHFVTDVQNNGVVKIPDAKGDDAWKVYYDETAQEIVDEFAMRYGVESIYQAMTHFACLSSKYMCPGVPAVMSTLLANINAYYAHTTASTNVSASDRFAASNFGKERFVKLLDQLHNSLRIDLSMYRNNFPASSPERLQDLKSTVDLLTSITFFRMKVQELQSPPRASQVVKDCVKACLNSTYEYIFNNCHELYSREYQTDPAKKGEVLPEEQGPSIKNLDFWSKLITLIVSIIEEDKNSYTPCLNQFPQELNVGKISAEVMWNLFAQDMKYAMEEHDKHRLCKSADYMNLHFKVKWLYNEYVTELPAFKDRVPEYPAWFEPFVIQWLDENEEVSRDFLHGALERDKKDGFQQTSEHALFSCSVVDVFSQLNQSFEIIKKLECPDPQIVGHYMRRFAKTISNVLLQYADIISKDFASYCSKEKEKVPCILMNNTQQLRVQLEKMFEAMGGKELDAEASDILKELQVKLNNVLDELSRVFATSFQPHIEECVKQMGDILSQVKGTGNVPASACSSVAQDADNVLQPIMDLLDSNLTLFAKICEKTVLKRVLKELWKLVMNTMEKTIVLPPLTDQTLQGNLLRKHGKGLEKGRVKLPSHSDGTQMIFNAAKELGQLSKLKDHMVREEAKSLTPKQCAVVELALDTIKQYFHAGGVGLKKTFLEKSPDLQSLRYALSLYTQATDLLIKTFVQTQSAQGLGVEDPVGEVSVHVELFTHPGTGEHKVTVKVVAANDLKWQTSGIFRPFIEVNIIGPQLSDKKRKFATKSKNNSWAPKYNESFQFTLSADAGPECYELQVCVKDYCFAREDRTVGLAVLQLRELAQRGSAACWLPLGRRIHMDDTGLTVLRILSQRSNDEVAKEFVKLKSDTRSAEEGGAAPAP

SEQ ID NO: 36317 - protein, 1791 aa, Artificial Sequence
  derived and/or modified sequence
MGGGGTCTISVQVRVCTGGNLLGGRRRPLSPCNEEVWGEAPLPGARPFNAPPARSAPAPSGVPGLRLPAPHQRHSRPGRLRPTCELGDMSLLCVGVKKAKFDGAQEKFNTYVTLKVQNVKSTTIAVRGSQPSWEQDFMFEINRLDLGLTVEVWNKGLIWDTMVGTVWIPLRTIRQSNEEGPGEWLTLDSQVIMADSEICGTKDPTFHRILLDTRFELPLDIPEEEARYWAKKLEQLNAMRDQDEYSFQDEQDKPLPVPSNQCCNWNYFGWGEQHNDDPDSAVDDRDSDYRSETSNSIPPPYYTTSQPNASVHQYSVRPPPLGSRESYSDSMHSYEEFSEPQALSPTGSSRYASSGELSQGSSQLSEDFDPDEHSLQGSDMEDERDRDSYHSCHSSVSYHKDSPRWDQDEEELEEDLEDFLEEEELPEDEEELEEEEEEVPDDLGSYAQREDVAVAEPKDFKRISLPPAAPGKEDKAPVAPTEAPDMAKVAPKPATPDKVPAAEQIPEAEPPKDEESFRPREDEEGQEGQDSMSRAKANWLRAFNKVRMQLQEARGEGEMSKSLWFKGGPGGGLIIIDSMPDIRKRKPIPLVSDLAMSLVQSRKAGITSALASSTLNNEELKNHVYKKTLQALIYPISCTTPHNFEVWTATTPTYCYECEGLLWGIARQGMRCTECGVKCHEKCQDLLNADCLQRAAEKSSKHGAEDRTQNIIMVLKDRMKIRERNKPEIFELIQEIFAVTKTAHTQQMKAVKQSVLDGTSKWSAKISITVVCAQGLQAKDKTGSSDPYVTVQVGKTKKRTKTIYGNLNPVWEENFHFECHNSSDRIKVRVWDEDDDIKSRVKQRFKRESDDFLGQTIIEVRTLSGEMDVWYNLDKRTDKSAVSGAIRLHISVEIKGEEKVAPYHVQYTCLHENLFHFVTDVQNNGVVKIPDAKGDDAWKVYYDETAQEIVDEFAMRYGVESIYQAMTHFACLSSKYMCPGVPAVMSTLLANINAYYAHTTASTNVSASDRFAASNFGKERFVKLLDQLHNSLRIDLSMYRNNFPASSPERLQDLKSTVDLLTSITFFRMKVQELQSPPRASQVVKDCVKACLNSTYEYIFNNCHELYSREYQTDPAKKGEVLPEEQGPSIKNLDFWSKLITLIVSIIEEDKNSYTPCLNQFPQELNVGKISAEVMWNLFAQDMKYAMEEHDKHRLCKSADYMNLHFKVKWLYNEYVTELPAFKDRVPEYPAWFEPFVIQWLDENEEVSRDFLHGALERDKKDGFQQTSEHALFSCSVVDVFSQLNQSFEIIKKLECPDPQIVGHYMRRFAKTISNVLLQYADIISKDFASYCSKEKEKVPCILMNNTQQLRVQLEKMFEAMGGKELDAEASDILKELQVKLNNVLDELSRVFATSFQPHIEECVKQMGDILSQVKGTGNVPASACSSVAQDADNVLQPIMDLLDSNLTLFAKICEKTVLKRVLKELWKLVMNTMEKTIVLPPLTDQTMIGNLLRKHGKGLEKGRVKLPSHSDGTQMIFNAAKELGQLSKLKDHMVREEAKSLTPKQCAVVELALDTIKQYFHAGGVGLKKTFLEKSPDLQSLRYALSLYTQATDLLIKTFVQTQSAQGLGVEDPVGEVSVHVELFTHPGTGEHKVTVKVVAANDLKWQTSGIFRPFIEVNIIGPQLSDKKRKFATKSKNNSWAPKYNESFQFTLSADAGPECYELQVCVKDYCFAREDRTVGLAVLQLRELAQRGSAACWLPLGRRIHMDDTGLTVLRILSQRSNDEVAKEFVKLKSDTRSAEEGGAAPAP

SEQ ID NO: 36318 - protein, 1703 aa, Artificial Sequence
  derived and/or modified sequence
MSLLCVGVKKAKFDGAQEKFNTYVTLKVQNVKSTTIAVRGSQPSWEQDFMFEINRLDLGLTVEVWNKGLIWDTMVGTVWIPLRTIRQSNEEGPGEWLTLDSQVIMADSEICGTKDPTFHRILLDTRFELPLDIPEEEARYWAKKLEQLNAMRDQDEYSFQDEQDKPLPVPSNQCCNWNYFGWGEQHNDDPDSAVDDRDSDYRSETSNSIPPPYYTTSQPNASVHQYSVRPPPLGSRESYSDSMHSYEEFSEPQALSPTGSSRYASSGELSQGSSQLSEDFDPDEHSLQGSDMEDERDRDSYHSCHSSVSYHKDSPRWDQDEEELEEDLEDFLEEEELPEDEEELEEEEEEVPDDLGSYAQREDVAVAEPKDFKRISLPPAAPGKEDKAPVAPTEAPDMAKVAPKPATPDKVPAAEQIPEAEPPKDEESFRPREDEEGQEGQDSMSRAKANWLRAFNKVRMQLQEARGEGEMSKSLWFKGGPGGGLIIIDSMPDIRKRKPIPLVSDLAMSLVQSRKAGITSALASSTLNNEELKNHVYKKTLQALIYPISCTTPHNFEVWTATTPTYCYECEGLLWGIARQGMRCTECGVKCHEKCQDLLNADCLQRAAEKSSKHGAEDRTQNIIMVLKDRMKIRERNKPEIFELIQEIFAVTKTAHTQQMKAVKQSVLDGTSKWSAKISITVVCAQGLQAKDKTGSSDPYVTVQVGKTKKRTKTIYGNLNPVWEENFHFECHNSSDRIKVRVWDEDDDIKSRVKQRFKRESDDFLGQTIIEVRTLSGEMDVWYNLDKRTDKSAVSGAIRLHISVEIKGEEKVAPYHVQYTCLHENLFHFVTDVQNNGVVKIPDAKGDDAWKVYYDETAQEIVDEFAMRYGVESIYQAMTHFACLSSKYMCPGVPAVMSTLLANINAYYAHTTASTNVSASDRFAASNFGKERFVKLLDQLHNSLRIDLSMYRNNFPASSPERLQDLKSTVDLLTSITFFRMKVQELQSPPRASQVVKDCVKACLNSTYEYIFNNCHELYSREYQTDPAKKGEVLPEEQGPSIKNLDFWSKLITLIVSIIEEDKNSYTPCLNQFPQELNVGKISAEVMWNLFAQDMKYAMEEHDKHRLCKSADYMNLHFKVKWLYNEYVTELPAFKDRVPEYPAWFEPFVIQWLDENEEVSRDFLHGALERDKKDGFQQTSEHALFSCSVVDVFSQLNQSFEIIKKLECPDPQIVGHYMRRFAKTISNVLLQYADIISKDFASYCSKEKEKVPCILMNNTQQLRVQLEKMFEAMGGKELDAEASDILKELQVKLNNVLDELSRVFATSFQPHIEECVKQMGDILSQVKGTGNVPASACSSVAQDADNVLQPIMDLLDSNLTLFAKICEKTVLKRVLKELWKLVMNTMEKTIVLPPLTDQTMIGNLLRKHGKGLEKGRVKLPSHSDGTQMIFNAAKELGQLSKLKDHMVREEAKSLTPKQCAVVELALDTIKQYFHAGGVGLKKTFLEKSPDLQSLRYALSLYTQATDLLIKTFVQTQSAQGLGVEDPVGEVSVHVELFTHPGTGEHKVTVKVVAANDLKWQTSGIFRPFIEVNIIGPQLSDKKRKFATKSKNNSWAPKYNESFQFTLSADAGPECYELQVCVKDYCFAREDRTVGLAVLQLRELAQRGSAACWLPLGRRIHMDDTGLTVLRILSQRSNDEVAKEFVKLKSDTRSAEEGGAAPAP

SEQ ID NO: 36319 - DNA, 5112 bp, Artificial Sequence
  derived and/or modified sequence
ctgagcctgctgtgcgtgagcctgaagaaggccaagttcgacggcgcccaggagaagttcaacacctacgtgaccctgaaggtgcagaacgtgaagagcaccaccatcgccgtgagaggcagccagcccagctgggagcaggacttcatgttcgagatcaacagactggacctgggcctgaccgtggaggtgtggaacaagggcctgatctgggacaccatggtgggcaccgtgtggatccccctgagaaccatcagacagagcaacgaggagggccccggcgagtggctgaccctggacagccaggtgatcatggccgacagcgagatctgcggcaccaaggaccccaccttccacagaatcctgctggacaccagattcgagctgcccctggacatccccgaggaggaggccagatactgggccaagaagctggagcagctgaacgccatgagagaccaggacgagtacagcttccaggacgagcaggacaagcccctgcccgtgcccagcaaccagtgctgcaactggaactacttcggctggggcgagcagcacaacgacgaccccgacagcgccgtggacgacagagacagcgactacagaagcgagaccagcaacagcatcccccccccctactacaccaccagccagcccaacgccagcgtgcaccagtacagcgtgagacccccccccctgggcagcagagagagctacagcgacagcatgcacagctacgaggagttcagcgagccccaggccctgagccccaccggcagcagcagatacgccagcagcggcgagctgagccagggcagcagccagctgagcgaggacttcgaccccgacgagcacagcctgcagggcagcgacatggaggacgagagagacagagacagctaccacagctgccacagcagcgtgagctaccacaaggacagccccagatgggaccaggacgaggaggagctggaggaggacctggaggacttcctggaggaggaggagctgcccgaggacgaggaggagctggaggaggaggaggaggaggtgcccgacgacctgggcagctacgcccagagagaggacgtggccgtggccgagcccaaggacttcaagagaatcagcctgccccccgccgcccccggcaaggaggacaaggcccccgtggcccccaccgaggcccccgacatggccaaggtggcccccaagcccgccacccccgacaaggtgcccgccgccgagcagatccccgaggccgagccccccaaggacgaggagagcttcagacccagagaggacgaggagggccaggagggccaggacagcatgagcagagccaaggccaactggctgagagccttcaacaaggtgagaatgcagctgcaggaggccagaggcgagggcgagatgagcaagagcctgtggttcaagggcggccccggcggcggcctgatcatcatcgacagcatgcccgacatcagaaagagaaagcccatccccctggtgagcgacctggccatgagcctggtgcagagcagaaaggccggcatcaccagcgccctggccagcagcaccctgaacaacgaggagctgaagaaccacgtgtacaagaagaccctgcaggccctgatctaccccatcagctgcaccaccccccacaacttcgaggtgtggaccgccaccacccccacctactgctacgagtgcgagggcctgctgtggggcatcgccagacagggcatgagatgcaccgagtgcggcgtgaagtgccacgagaagtgccaggacctgctgaacgccgactgcctgcagagagccgccgagaagagcagcaagcacggcgccgaggacagaacccagaacatcatcatggtgctgaaggacagaatgaagatcagagagagaaacaagcccgagatcttcgagctgatccaggagatcttcgccgtgaccaagaccgcccacacccagcagatgaaggccgtgaagcagagcgtgctggacggcaccagcaagtggagcgccaagatcagcatcaccgtggtgtgcgcccagggcctgcaggccaaggacaagaccggcagcagcgacccctacgtgaccgtgcaggtgggcaagaccaagaagagaaccaagaccatctacggcaacctgaaccccgtgtgggaggagaacttccacttcgagtgccacaacagcagcgacagaatcaaggtgagagtgtgggacgaggacgacgacatcaagagcagagtgaagcagagattcaagagagagagcgacgacttcctgggccagaccatcatcgaggtgagaaccctgagcggcgagatggacgtgtggtacaacctggacaagagaaccgacaagagcgccgtgagcggcgccatcagactgcacatcagcgtggagatcaagggcgaggagaaggtggccccctaccacgtgcagtacacctgcctgcacgagaacctgttccacttcgtgaccgacgtgcagaacaacggcgtggtgaagatccccgacgccaagggcgacgacgcctggaaggtgtactacgacgagaccgcccaggagatcgtggacgagttcgccatgagatacggcgtggagagcatctaccaggccatgacccacttcgcctgcctgagcagcaagtacatgtgccccggcgtgcccgccgtgatgagcaccctgctggccaacatcaacgcctactacgcccacaccaccgccagcaccaacgtgagcgccagcgacagattcgccgccagcaacttcggcaaggagagattcgtgaagctgctggaccagctgcacaacagcctgagaatcgacctgagcatgtacagaaacaacttccccgccagcagccccgagagactgcaggacctgaagagcaccgtggacctgctgaccagcatcaccttcttcagaatgaaggtgcaggagctgcagagcccccccagagccagccaggtggtgaaggactgcgtgaaggcctgcctgaacagcacctacgagtacatcttcaacaactgccacgagctgtacagcagagagtaccagaccgaccccgccaagaagggcgaggtgctgcccgaggagcagggccccagcatcaagaacctggacttctggagcaagctgatcaccctgatcgtgagcatcatcgaggaggacaagaacagctacaccccctgcctgaaccagttcccccaggagctgaacgtgggcaagatcagcgccgaggtgatgtggaacctgttcgcccaggacatgaagtacgccatggaggagcacgacaagcacagactgtgcaagagcgccgactacatgaacctgcacttcaaggtgaagtggctgtacaacgagtacgtgaccgagctgcccgccttcaaggacagagtgcccgagtaccccgcctggttcgagcccttcgtgatccagtggctggacgagaacgaggaggtgagcagagacttcctgcacggcgccctggagagagacaagaaggacggcttccagcagaccagcgagcacgccctgttcagctgcagcgtggtggacgtgttcagccagctgaaccagagcttcgagatcatcaagaagctggagtgccccgacccccagatcgtgggccactacatgagaagattcgccaagaccatcagcaacgtgctgctgcagtacgccgacatcatcagcaaggacttcgccagctactgcagcaaggagaaggagaaggtgccctgcatcctgatgaacaacacccagcagctgagagtgcagctggagaagatgttcgaggccatgggcggcaaggagctggacgccgaggccagcgacatcctgaaggagctgcaggtgaagctgaacaacgtgctggacgagctgagcagagtgttcgccaccagcttccagccccacatcgaggagtgcgtgaagcagatgggcgacatcctgagccaggtgaagggcaccggcaacgtgcccgccagcgcctgcagcagcgtggcccaggacgccgacaacgtgctgcagcccatcatggacctgctggacagcaacctgaccctgttcgccaagatctgcgagaagaccgtgctgaagagagtgctgaaggagctgtggaagctggtgatgaacaccatggagaagaccatcgtgctgccccccctgaccgaccagaccctgcagggcaacctgctgagaaagcacggcaagggcctggagaagggcagagtgaagctgcccagccacagcgacggcacccagatgatcttcaacgccgccaaggagctgggccagctgagcaagctgaaggaccacatggtgagagaggaggccaagagcctgacccccaagcagtgcgccgtggtggagctggccctggacaccatcaagcagtacttccacgccggcggcgtgggcctgaagaagaccttcctggagaagagccccgacctgcagagcctgagatacgccctgagcctgtacacccaggccaccgacctgctgatcaagaccttcgtgcagacccagagcgcccagggcctgggcgtggaggaccccgtgggcgaggtgagcgtgcacgtggagctgttcacccaccccggcaccggcgagcacaaggtgaccgtgaaggtggtggccgccaacgacctgaagtggcagaccagcggcatcttcagacccttcatcgaggtgaacatcatcggcccccagctgagcgacaagaagagaaagttcgccaccaagagcaagaacaacagctgggcccccaagtacaacgagagcttccagttcaccctgagcgccgacgccggccccgagtgctacgagctgcaggtgtgcgtgaaggactactgcttcgccagagaggacagaaccgtgggcctggccgtgctgcagctgagagagctggcccagagaggcagcgccgcctgctggctgcccctgggcagaagaatccacatggacgacaccggcctgaccgtgctgagaatcctgagccagagaagcaacgacgaggtggccaaggagttcgtgaagctgaagagcgacaccagaagcgccgaggagggcggcgccgcccccgccccctag

SEQ ID NO: 36320 - DNA, 5376 bp, Artificial Sequence
  derived and/or modified sequence
atgggcggcggcggcacctgcaccatcagcgtgcaggtgagagtgtgcaccggcggcaacctgctgggcggcagaagaagacccctgagcccctgcaacgaggaggtgtggggcgaggcccccctgcccggcgccagacccttcaacgccccccccgccagaagcgcccccgcccccagcggcgtgcccggcctgagactgcccgccccccaccagagacacagcagacccggcagactgagacccacctgcgagctgggcgacatgagcctgctgtgcgtgggcgtgaagaaggccaagttcgacggcgcccaggagaagttcaacacctacgtgaccctgaaggtgcagaacgtgaagagcaccaccatcgccgtgagaggcagccagcccagctgggagcaggacttcatgttcgagatcaacagactggacctgggcctgaccgtggaggtgtggaacaagggcctgatctgggacaccatggtgggcaccgtgtggatccccctgagaaccatcagacagagcaacgaggagggccccggcgagtggctgaccctggacagccaggtgatcatggccgacagcgagatctgcggcaccaaggaccccaccttccacagaatcctgctggacaccagattcgagctgcccctggacatccccgaggaggaggccagatactgggccaagaagctggagcagctgaacgccatgagagaccaggacgagtacagcttccaggacgagcaggacaagcccctgcccgtgcccagcaaccagtgctgcaactggaactacttcggctggggcgagcagcacaacgacgaccccgacagcgccgtggacgacagagacagcgactacagaagcgagaccagcaacagcatcccccccccctactacaccaccagccagcccaacgccagcgtgcaccagtacagcgtgagacccccccccctgggcagcagagagagctacagcgacagcatgcacagctacgaggagttcagcgagccccaggccctgagccccaccggcagcagcagatacgccagcagcggcgagctgagccagggcagcagccagctgagcgaggacttcgaccccgacgagcacagcctgcagggcagcgacatggaggacgagagagacagagacagctaccacagctgccacagcagcgtgagctaccacaaggacagccccagatgggaccaggacgaggaggagctggaggaggacctggaggacttcctggaggaggaggagctgcccgaggacgaggaggagctggaggaggaggaggaggaggtgcccgacgacctgggcagctacgcccagagagaggacgtggccgtggccgagcccaaggacttcaagagaatcagcctgccccccgccgcccccggcaaggaggacaaggcccccgtggcccccaccgaggcccccgacatggccaaggtggcccccaagcccgccacccccgacaaggtgcccgccgccgagcagatccccgaggccgagccccccaaggacgaggagagcttcagacccagagaggacgaggagggccaggagggccaggacagcatgagcagagccaaggccaactggctgagagccttcaacaaggtgagaatgcagctgcaggaggccagaggcgagggcgagatgagcaagagcctgtggttcaagggcggccccggcggcggcctgatcatcatcgacagcatgcccgacatcagaaagagaaagcccatccccctggtgagcgacctggccatgagcctggtgcagagcagaaaggccggcatcaccagcgccctggccagcagcaccctgaacaacgaggagctgaagaaccacgtgtacaagaagaccctgcaggccctgatctaccccatcagctgcaccaccccccacaacttcgaggtgtggaccgccaccacccccacctactgctacgagtgcgagggcctgctgtggggcatcgccagacagggcatgagatgcaccgagtgcggcgtgaagtgccacgagaagtgccaggacctgctgaacgccgactgcctgcagagagccgccgagaagagcagcaagcacggcgccgaggacagaacccagaacatcatcatggtgctgaaggacagaatgaagatcagagagagaaacaagcccgagatcttcgagctgatccaggagatcttcgccgtgaccaagaccgcccacacccagcagatgaaggccgtgaagcagagcgtgctggacggcaccagcaagtggagcgccaagatcagcatcaccgtggtgtgcgcccagggcctgcaggccaaggacaagaccggcagcagcgacccctacgtgaccgtgcaggtgggcaagaccaagaagagaaccaagaccatctacggcaacctgaaccccgtgtgggaggagaacttccacttcgagtgccacaacagcagcgacagaatcaaggtgagagtgtgggacgaggacgacgacatcaagagcagagtgaagcagagattcaagagagagagcgacgacttcctgggccagaccatcatcgaggtgagaaccctgagcggcgagatggacgtgtggtacaacctggacaagagaaccgacaagagcgccgtgagcggcgccatcagactgcacatcagcgtggagatcaagggcgaggagaaggtggccccctaccacgtgcagtacacctgcctgcacgagaacctgttccacttcgtgaccgacgtgcagaacaacggcgtggtgaagatccccgacgccaagggcgacgacgcctggaaggtgtactacgacgagaccgcccaggagatcgtggacgagttcgccatgagatacggcgtggagagcatctaccaggccatgacccacttcgcctgcctgagcagcaagtacatgtgccccggcgtgcccgccgtgatgagcaccctgctggccaacatcaacgcctactacgcccacaccaccgccagcaccaacgtgagcgccagcgacagattcgccgccagcaacttcggcaaggagagattcgtgaagctgctggaccagctgcacaacagcctgagaatcgacctgagcatgtacagaaacaacttccccgccagcagccccgagagactgcaggacctgaagagcaccgtggacctgctgaccagcatcaccttcttcagaatgaaggtgcaggagctgcagagcccccccagagccagccaggtggtgaaggactgcgtgaaggcctgcctgaacagcacctacgagtacatcttcaacaactgccacgagctgtacagcagagagtaccagaccgaccccgccaagaagggcgaggtgctgcccgaggagcagggccccagcatcaagaacctggacttctggagcaagctgatcaccctgatcgtgagcatcatcgaggaggacaagaacagctacaccccctgcctgaaccagttcccccaggagctgaacgtgggcaagatcagcgccgaggtgatgtggaacctgttcgcccaggacatgaagtacgccatggaggagcacgacaagcacagactgtgcaagagcgccgactacatgaacctgcacttcaaggtgaagtggctgtacaacgagtacgtgaccgagctgcccgccttcaaggacagagtgcccgagtaccccgcctggttcgagcccttcgtgatccagtggctggacgagaacgaggaggtgagcagagacttcctgcacggcgccctggagagagacaagaaggacggcttccagcagaccagcgagcacgccctgttcagctgcagcgtggtggacgtgttcagccagctgaaccagagcttcgagatcatcaagaagctggagtgccccgacccccagatcgtgggccactacatgagaagattcgccaagaccatcagcaacgtgctgctgcagtacgccgacatcatcagcaaggacttcgccagctactgcagcaaggagaaggagaaggtgccctgcatcctgatgaacaacacccagcagctgagagtgcagctggagaagatgttcgaggccatgggcggcaaggagctggacgccgaggccagcgacatcctgaaggagctgcaggtgaagctgaacaacgtgctggacgagctgagcagagtgttcgccaccagcttccagccccacatcgaggagtgcgtgaagcagatgggcgacatcctgagccaggtgaagggcaccggcaacgtgcccgccagcgcctgcagcagcgtggcccaggacgccgacaacgtgctgcagcccatcatggacctgctggacagcaacctgaccctgttcgccaagatctgcgagaagaccgtgctgaagagagtgctgaaggagctgtggaagctggtgatgaacaccatggagaagaccatcgtgctgccccccctgaccgaccagaccatgatcggcaacctgctgagaaagcacggcaagggcctggagaagggcagagtgaagctgcccagccacagcgacggcacccagatgatcttcaacgccgccaaggagctgggccagctgagcaagctgaaggaccacatggtgagagaggaggccaagagcctgacccccaagcagtgcgccgtggtggagctggccctggacaccatcaagcagtacttccacgccggcggcgtgggcctgaagaagaccttcctggagaagagccccgacctgcagagcctgagatacgccctgagcctgtacacccaggccaccgacctgctgatcaagaccttcgtgcagacccagagcgcccagggcctgggcgtggaggaccccgtgggcgaggtgagcgtgcacgtggagctgttcacccaccccggcaccggcgagcacaaggtgaccgtgaaggtggtggccgccaacgacctgaagtggcagaccagcggcatcttcagacccttcatcgaggtgaacatcatcggcccccagctgagcgacaagaagagaaagttcgccaccaagagcaagaacaacagctgggcccccaagtacaacgagagcttccagttcaccctgagcgccgacgccggccccgagtgctacgagctgcaggtgtgcgtgaaggactactgcttcgccagagaggacagaaccgtgggcctggccgtgctgcagctgagagagctggcccagagaggcagcgccgcctgctggctgcccctgggcagaagaatccacatggacgacaccggcctgaccgtgctgagaatcctgagccagagaagcaacgacgaggtggccaaggagttcgtgaagctgaagagcgacaccagaagcgccgaggagggcggcgccgcccccgccccctag

SEQ ID NO: 36321 - DNA, 5112 bp, Artificial Sequence
  derived and/or modified sequence
atgagcctgctgtgcgtgggcgtgaagaaggccaagttcgacggcgcccaggagaagttcaacacctacgtgaccctgaaggtgcagaacgtgaagagcaccaccatcgccgtgagaggcagccagcccagctgggagcaggacttcatgttcgagatcaacagactggacctgggcctgaccgtggaggtgtggaacaagggcctgatctgggacaccatggtgggcaccgtgtggatccccctgagaaccatcagacagagcaacgaggagggccccggcgagtggctgaccctggacagccaggtgatcatggccgacagcgagatctgcggcaccaaggaccccaccttccacagaatcctgctggacaccagattcgagctgcccctggacatccccgaggaggaggccagatactgggccaagaagctggagcagctgaacgccatgagagaccaggacgagtacagcttccaggacgagcaggacaagcccctgcccgtgcccagcaaccagtgctgcaactggaactacttcggctggggcgagcagcacaacgacgaccccgacagcgccgtggacgacagagacagcgactacagaagcgagaccagcaacagcatcccccccccctactacaccaccagccagcccaacgccagcgtgcaccagtacagcgtgagacccccccccctgggcagcagagagagctacagcgacagcatgcacagctacgaggagttcagcgagccccaggccctgagccccaccggcagcagcagatacgccagcagcggcgagctgagccagggcagcagccagctgagcgaggacttcgaccccgacgagcacagcctgcagggcagcgacatggaggacgagagagacagagacagctaccacagctgccacagcagcgtgagctaccacaaggacagccccagatgggaccaggacgaggaggagctggaggaggacctggaggacttcctggaggaggaggagctgcccgaggacgaggaggagctggaggaggaggaggaggaggtgcccgacgacctgggcagctacgcccagagagaggacgtggccgtggccgagcccaaggacttcaagagaatcagcctgccccccgccgcccccggcaaggaggacaaggcccccgtggcccccaccgaggcccccgacatggccaaggtggcccccaagcccgccacccccgacaaggtgcccgccgccgagcagatccccgaggccgagccccccaaggacgaggagagcttcagacccagagaggacgaggagggccaggagggccaggacagcatgagcagagccaaggccaactggctgagagccttcaacaaggtgagaatgcagctgcaggaggccagaggcgagggcgagatgagcaagagcctgtggttcaagggcggccccggcggcggcctgatcatcatcgacagcatgcccgacatcagaaagagaaagcccatccccctggtgagcgacctggccatgagcctggtgcagagcagaaaggccggcatcaccagcgccctggccagcagcaccctgaacaacgaggagctgaagaaccacgtgtacaagaagaccctgcaggccctgatctaccccatcagctgcaccaccccccacaacttcgaggtgtggaccgccaccacccccacctactgctacgagtgcgagggcctgctgtggggcatcgccagacagggcatgagatgcaccgagtgcggcgtgaagtgccacgagaagtgccaggacctgctgaacgccgactgcctgcagagagccgccgagaagagcagcaagcacggcgccgaggacagaacccagaacatcatcatggtgctgaaggacagaatgaagatcagagagagaaacaagcccgagatcttcgagctgatccaggagatcttcgccgtgaccaagaccgcccacacccagcagatgaaggccgtgaagcagagcgtgctggacggcaccagcaagtggagcgccaagatcagcatcaccgtggtgtgcgcccagggcctgcaggccaaggacaagaccggcagcagcgacccctacgtgaccgtgcaggtgggcaagaccaagaagagaaccaagaccatctacggcaacctgaaccccgtgtgggaggagaacttccacttcgagtgccacaacagcagcgacagaatcaaggtgagagtgtgggacgaggacgacgacatcaagagcagagtgaagcagagattcaagagagagagcgacgacttcctgggccagaccatcatcgaggtgagaaccctgagcggcgagatggacgtgtggtacaacctggacaagagaaccgacaagagcgccgtgagcggcgccatcagactgcacatcagcgtggagatcaagggcgaggagaaggtggccccctaccacgtgcagtacacctgcctgcacgagaacctgttccacttcgtgaccgacgtgcagaacaacggcgtggtgaagatccccgacgccaagggcgacgacgcctggaaggtgtactacgacgagaccgcccaggagatcgtggacgagttcgccatgagatacggcgtggagagcatctaccaggccatgacccacttcgcctgcctgagcagcaagtacatgtgccccggcgtgcccgccgtgatgagcaccctgctggccaacatcaacgcctactacgcccacaccaccgccagcaccaacgtgagcgccagcgacagattcgccgccagcaacttcggcaaggagagattcgtgaagctgctggaccagctgcacaacagcctgagaatcgacctgagcatgtacagaaacaacttccccgccagcagccccgagagactgcaggacctgaagagcaccgtggacctgctgaccagcatcaccttcttcagaatgaaggtgcaggagctgcagagcccccccagagccagccaggtggtgaaggactgcgtgaaggcctgcctgaacagcacctacgagtacatcttcaacaactgccacgagctgtacagcagagagtaccagaccgaccccgccaagaagggcgaggtgctgcccgaggagcagggccccagcatcaagaacctggacttctggagcaagctgatcaccctgatcgtgagcatcatcgaggaggacaagaacagctacaccccctgcctgaaccagttcccccaggagctgaacgtgggcaagatcagcgccgaggtgatgtggaacctgttcgcccaggacatgaagtacgccatggaggagcacgacaagcacagactgtgcaagagcgccgactacatgaacctgcacttcaaggtgaagtggctgtacaacgagtacgtgaccgagctgcccgccttcaaggacagagtgcccgagtaccccgcctggttcgagcccttcgtgatccagtggctggacgagaacgaggaggtgagcagagacttcctgcacggcgccctggagagagacaagaaggacggcttccagcagaccagcgagcacgccctgttcagctgcagcgtggtggacgtgttcagccagctgaaccagagcttcgagatcatcaagaagctggagtgccccgacccccagatcgtgggccactacatgagaagattcgccaagaccatcagcaacgtgctgctgcagtacgccgacatcatcagcaaggacttcgccagctactgcagcaaggagaaggagaaggtgccctgcatcctgatgaacaacacccagcagctgagagtgcagctggagaagatgttcgaggccatgggcggcaaggagctggacgccgaggccagcgacatcctgaaggagctgcaggtgaagctgaacaacgtgctggacgagctgagcagagtgttcgccaccagcttccagccccacatcgaggagtgcgtgaagcagatgggcgacatcctgagccaggtgaagggcaccggcaacgtgcccgccagcgcctgcagcagcgtggcccaggacgccgacaacgtgctgcagcccatcatggacctgctggacagcaacctgaccctgttcgccaagatctgcgagaagaccgtgctgaagagagtgctgaaggagctgtggaagctggtgatgaacaccatggagaagaccatcgtgctgccccccctgaccgaccagaccatgatcggcaacctgctgagaaagcacggcaagggcctggagaagggcagagtgaagctgcccagccacagcgacggcacccagatgatcttcaacgccgccaaggagctgggccagctgagcaagctgaaggaccacatggtgagagaggaggccaagagcctgacccccaagcagtgcgccgtggtggagctggccctggacaccatcaagcagtacttccacgccggcggcgtgggcctgaagaagaccttcctggagaagagccccgacctgcagagcctgagatacgccctgagcctgtacacccaggccaccgacctgctgatcaagaccttcgtgcagacccagagcgcccagggcctgggcgtggaggaccccgtgggcgaggtgagcgtgcacgtggagctgttcacccaccccggcaccggcgagcacaaggtgaccgtgaaggtggtggccgccaacgacctgaagtggcagaccagcggcatcttcagacccttcatcgaggtgaacatcatcggcccccagctgagcgacaagaagagaaagttcgccaccaagagcaagaacaacagctgggcccccaagtacaacgagagcttccagttcaccctgagcgccgacgccggccccgagtgctacgagctgcaggtgtgcgtgaaggactactgcttcgccagagaggacagaaccgtgggcctggccgtgctgcagctgagagagctggcccagagaggcagcgccgcctgctggctgcccctgggcagaagaatccacatggacgacaccggcctgaccgtgctgagaatcctgagccagagaagcaacgacgaggtggccaaggagttcgtgaagctgaagagcgacaccagaagcgccgaggagggcggcgccgcccccgccccctag

SEQ ID NO: 36322 - DNA, 5112 bp, Artificial Sequence
  derived and/or modified sequence
ctgagtcttctgtgcgttagcctgaagaaagctaagttcgacggagcacaggaaaaattcaacacctatgtaacccttaaagtccaaaacgttaagagcacaaccatcgctgtccgggggtcgcaaccttcttgggagcaggattttatgtttgagatcaacaggctggatttaggactgacagttgaggtttggaacaagggcctaatctgggatacaatggtaggcaccgtttggattcccctgaggactatccgtcagtccaatgaggaggggcccggtgagtggctcacactggatagtcaagttatcatggctgatagtgaaatatgtggtacaaaggatccaacgttccatcggatactgctggatacccgctttgaattgcctcttgatatccctgaggaggaggctagatactgggctaagaaactggagcagttgaatgctatgcgcgaccaagacgaatactcattccaagacgagcaggacaagcctctccccgttccaagcaatcaatgctgcaactggaattacttcggctggggggagcagcacaacgacgatcccgattctgccgttgacgaccgggatagtgactaccgttccgagacctctaattctatcccccccccttactacacaaccagccaacctaacgcctccgtgcaccagtactctgtgaggcctccaccactggggagtcgtgaatcatactccgacagcatgcacagttacgaagaattctccgagccacaggctctgtcacccacgggctctagccgttatgcaagttcaggcgaactcagccagggaagttcccaattatctgaagatttcgacccagatgaacactccctgcagggcagcgacatggaggacgaaagggatcgggactcataccattcctgccatagtagtgtaagttaccacaaggacagcccccggtgggatcaggatgaagaggagttggaggaagatttagaggatttcctggaggaggaagaactgcccgaagatgaagaggaactggaggaagaagaagaagaagttcccgacgacctggggtcatacgctcagagagaggacgtagctgtagctgagccaaaagatttcaagagaatatccctcccccctgcggcacctggtaaggaggataaggcccccgtggcccccactgaggcccccgatatggccaaggttgcgcccaagccagctacacccgacaaggtacctgcggcggaacagatccccgaggctgagccgccaaaagatgaagagtcctttcgcccacgtgaggacgaagagggtcaggagggtcaggattcaatgagccgcgccaaggccaattggcttcgggcctttaataaggtcagaatgcagctgcaggaggcccgcggcgagggagagatgtcaaaaagtctatggttcaagggtggcccgggtggtggactgattatcattgattctatgccagacattaggaagaggaagcccatacccttagtcagcgacctggctatgagcctggtccagtcacgcaaggcagggatcacaagcgctttagcttccagtaccctgaataatgaggaactgaaaaaccatgtatacaaaaaaactctgcaggctctgatctatcccatctcatgtacgacaccccataactttgaggtgtggaccgcaacaacaccgacctattgttatgaatgtgaaggcctgctgtggggaattgcgcgacaggggatgcggtgcacagaatgcggggtaaagtgccatgaaaagtgccaggatttactgaacgctgattgccttcaacgggcggcagaaaaaagctcaaagcacggcgcggaggaccgaacccagaacatcatcatggttttgaaggatcgcatgaagatccgggaacggaacaagcccgagatctttgaacttattcaggaaatcttcgcggtgactaagaccgctcacactcagcaaatgaaggcagtcaagcagtcagttcttgacggaacatcaaaatggtccgctaagatcagcattaccgtcgtttgtgcccaggggcttcaagcaaaggataagacagggagttctgacccatatgtcaccgtgcaggtgggcaaaactaagaagcggaccaaaacaatctacggaaacctcaatcctgtttgggaggagaactttcattttgagtgtcataattccagtgaccggataaaagtacgtgtgtgggatgaggatgacgacattaagtccagggtcaaacagaggtttaagagggagtcggatgactttctaggtcagaccattattgaagttagaaccttatctggggagatggacgtttggtacaatctggacaaacgcaccgataagtcagccgtgtcaggtgcaatacgtttgcacatttcagtcgagatcaagggggaagaaaaggtggctccgtaccatgttcagtacacctgcctacacgagaacttatttcattttgtgaccgacgtgcagaacaacggagttgttaagatacctgacgcgaagggtgatgatgcatggaaagtgtactatgacgagaccgcccaagagattgtggatgaattcgctatgaggtatggcgtggaaagcatatatcaggccatgacccactttgcctgcttatcctcgaagtatatgtgtccaggagtgccggccgtcatgagtactcttctggcaaacataaacgcctactacgctcatactacggccagcactaatgtgtccgcatctgatcgcttcgcggcctccaactttggcaaggaaagatttgtcaaattgttggatcagttgcataactctctccgtattgacttatcaatgtacagaaataattttccggcttcctcgcctgaacgtcttcaagatctcaagtccaccgtggacttgctgacctctattactttcttcagaatgaaggtacaggaactgcaaagcccaccccgcgccagtcaggtcgtgaaagactgtgtcaaagcgtgtctcaacagcacctacgaatatatatttaacaattgccacgagctatatagcagggagtaccaaacagatcccgctaagaagggggaggtgctccctgaagagcagggcccatccatcaagaaccttgatttctggtctaagttgattaccctgattgtgtccatcattgaggaagataagaacagctatacaccctgtcttaaccagtttccacaggagttgaatgtgggcaagatatccgccgaagtgatgtggaacctgtttgcccaggatatgaagtacgctatggaggaacacgacaagcaccggctctgtaaatcagctgactatatgaacctacatttcaaagtaaaatggctctataacgagtacgttacagagttgcctgctttcaaggatcgcgtccctgagtatcctgcttggtttgaaccattcgtcatccagtggcttgacgaaaatgaagaggtatctagagacttcctccacggagccctcgagcgtgataagaaagacgggtttcagcaaacttccgagcacgcgctcttcagctgcagtgttgtcgacgtgttttctcagttaaatcagagttttgagattatcaaaaaattggagtgtccggaccctcagatagtgggccactacatgcggcggttcgcaaaaactatatccaacgtgctgctgcagtacgcagacataatcagcaaggactttgcatcctattgttccaaagagaaggagaaggtcccctgcatcctcatgaacaacacacagcagctgagggtccagctcgaaaaaatgttcgaggctatggggggcaaggaactagacgctgaggcaagtgacatactgaaggagctgcaggtaaaacttaacaacgtgctggatgagctctcaagagtgtttgccacgtccttccagccacatatcgaggagtgcgtcaagcagatgggtgatattctcagccaggtaaagggaacaggcaatgtgcccgcctcagcgtgctctagtgtggctcaggatgccgataacgtcctgcagccgattatggacttattggattcaaatctaacactgtttgccaagatctgcgagaaaactgtcctgaaacgggtgctgaaagaactatggaagctggtcatgaacacgatggaaaagactatcgtactgccacccctgactgaccagacactccaggggaatctactgaggaaacacgggaagggtctcgagaagggaagagtgaagctgccttcacattccgatggtactcagatgatcttcaacgctgctaaggaactcgggcagctcagcaagctgaaggaccacatggtgagggaagaagccaagtcacttacgccaaagcagtgcgccgtggtggagcttgccctggatacaataaagcagtacttccacgcagggggtgtcggccttaaaaaaacattcctggagaagagtccagacctacagagccttcggtacgccctatcactgtatactcaagctaccgatctgcttatcaaaacattcgtacagactcagtccgcccaaggcctgggcgtggaggaccccgttggtgaggtatccgttcacgtggagctcttcacccatcccgggacaggggaacacaaagtgaccgtgaaagtcgtggccgccaacgacctgaagtggcagacttctggaatctttcgtccttttattgaagtgaacatcattgggccacagctaagtgataagaaaagaaaattcgccacaaaatccaagaataactcatgggcccctaagtataatgagagcttccagtttactctgtctgccgatgccggaccggagtgttatgaactgcaggtctgtgtcaaggattactgttttgcgcgagaggatcgcactgtgggactggctgtgctccagttacgcgaactcgcacagcgaggaagcgctgcctgttggttgccgctgggacgtagaattcacatggacgatactggtctgaccgttctcagaatcttatctcagaggtctaacgatgaggtggctaaagaatttgtgaagttaaaaagcgacacccgctctgccgaagagggcggggccgcgcccgccccatag

SEQ ID NO: 36323 - DNA, 5376 bp, Artificial Sequence
  derived and/or modified sequence
atgggagggggcggtacttgcaccatctctgtgcaggtgagggtttgcacaggcggcaatcttcttgggggacggagaaggccgctgagtccctgtaatgaggaggtctggggagaggccccactgcctggcgcaagacctttcaatgctccacccgctcggtcggcccctgccccatccggagtaccagggctaagacttcccgcccctcatcaaaggcatagccggcctgggcgcctacggccaacatgcgaactgggtgacatgagtctgctgtgcgtcggcgtgaagaaggcaaaatttgatggagcacaggagaagtttaacacctatgtgacactgaaggtgcagaacgtgaagtctactactattgccgtgagaggatcccagccaagttgggagcaggacttcatgttcgagatcaatcgtctggacttgggcttgaccgtggaggtgtggaacaaagggctaatctgggacacgatggtcggaactgtctggattccactgagaactattcgacagagtaacgaagaggggccaggtgaatggttaactttagacagccaagtgatcatggccgactcagagatctgtggtaccaaggatccaaccttccatagaattctgctcgacacacggtttgaactcccgctggacatcccagaggaagaagcacgatactgggccaaaaagctagagcagctgaacgcgatgcgcgatcaagatgaatactccttccaggacgagcaggataagccactgcccgtgccctcgaaccagtgctgcaactggaactactttggatggggcgaacaacacaatgatgaccctgactccgcagtggatgacagagacagtgattatcggagcgagacgtctaactccatacctccaccgtattacacgacaagtcagccgaacgcctcggtgcatcagtattcagttcgcccaccccccttgggctcccgtgaaagttacagcgacagcatgcactcctacgaggagttttcagaaccccaggcactgtctccaactggctccagtaggtacgcaagctccggggaactctcccagggtagctcacagctcagcgaggacttcgaccctgatgagcactctctacagggcagcgacatggaggatgagagagaccgagactcttaccacagctgtcactctagtgtctcctaccacaaagactccccccgctgggatcaggatgaagaggagctggaagaggacctggaggactttctggaagaagaggagctgccagaggatgaagaggagctcgaagaggaagaagaggaagtgcccgacgacctgggaagctatgcccagcgggaagacgtagccgtcgcagagccaaaggattttaaaaggatctccctgccgccagctgccccgggtaaggaagataaggctcccgtagcacctaccgaggccccagacatggccaaggtcgcccccaagcccgccacacctgataaagtgccagccgccgagcagatcccagaggccgagccgcctaaagatgaagagtctttcagaccccgggaggacgaggaaggacaggagggacaggacagtatgagccgcgccaaagcaaactggcttagagcattcaataaagtcaggatgcaactccaggaggctcggggagagggagaaatgagcaaaagcctctggtttaagggcggacccggagggggactgatcatcattgactctatgccggatattcgtaaacgaaaacccattccactggtctccgacctggctatgtctctggtgcaaagccgcaaagcaggaatcacctccgccctcgcgagctccacactgaataacgaggagctcaagaaccacgtctataagaaaactctgcaggctctcatctaccccatcagctgtaccacgccccacaatttcgaagtgtggaccgcaactactcctacttactgctacgaatgtgaagggcttctttggggaattgctcgacagggcatgcgctgcaccgagtgtggcgtgaagtgtcatgagaagtgccaagacttgctaaatgccgattgcctccagcgtgccgcagaaaagtcctctaagcacggagccgaagatcggacacagaacattatcatggtgctgaaagaccgcatgaaaattcgggagcgaaataaacctgagatatttgaacttatacaggagatatttgcagtgactaagacagcccacactcagcaaatgaaagcagtgaaacagagtgtgctggacggcacaagcaaatggagcgctaagatcagcattaccgtcgtgtgtgcgcagggcctgcaggcgaaagataagacaggcagttcggacccctatgttactgtgcaggtaggtaaaactaaaaaacggactaaaactatatatggaaatcttaatcccgtctgggaagagaactttcacttcgagtgtcacaactctagcgataggattaaagtccgggtgtgggacgaagatgacgacatcaagtcccgggtgaaacagcgatttaagagggagtccgatgactttctaggccagacaatcatcgaggtgagaacactgagcggagaaatggatgtatggtataacttggacaagaggacagataagtcagccgttagtggagccatacgtctgcacatttcggtcgagatcaagggcgaagagaaggtggctccttaccacgtgcagtatacatgcctgcacgaaaacttgttccatttcgtcacagacgttcaaaataacggtgtggtaaagatacccgatgcgaagggagacgacgcttggaaggtctattacgatgaaactgctcaggagatcgtggatgagtttgctatgcggtacggggtcgaatctatctatcaggccatgacacattttgcatgtttatcttctaaatatatgtgtcccggggtcccagcagtgatgagcaccctgctggctaacatcaacgcttattacgcccataccactgctagcaccaacgtgtccgccagcgatcggtttgctgcctcaaattttgggaaggagagattcgtaaaattgctcgatcaactacacaactccctgcgtattgacttaagtatgtaccgtaacaactttcctgcttccagccccgaacgactacaggacctgaaatcaacggtggacctcttgactagtattaccttcttcaggatgaaggtgcaggagctacagtctcctccaagggcctcacaggtggtcaaagactgtgttaaggcttgtctcaactctacatacgagtacatctttaacaactgtcacgaactgtactcacgggaatatcaaaccgacccggccaagaaaggcgaagtgctgccggaagagcagggacccagcattaagaacctggacttttggtccaagttgataactttgatcgtttcaataattgaagaagataagaatagttacactccctgccttaaccagttcccccaagagctcaatgttgggaagattagcgctgaagtcatgtggaatctcttcgctcaggatatgaaatatgcaatggaggaacacgataagcaccggctgtgcaaaagcgcggactatatgaatctgcactttaaggttaaatggctttacaatgaatatgtcacagagctcccagcctttaaggatcgcgtccctgaataccccgcttggttcgagcccttcgtcattcagtggttagatgaaaacgaagaggttagtcgagactttttacacggagccctcgaacgggacaaaaaggatggcttccagcagaccagcgaacatgcgctgtttagctgcagcgttgtcgatgtattcagccagttgaatcagtcttttgagatcatcaagaagttagaatgcccagacccgcagatcgtgggccactacatgcgacgctttgcaaagaccattagtaatgtgctgcttcaatatgcggacatcatcagtaaggattttgctagctattgctccaaagaaaaggagaaagttccctgtatcctcatgaataatacacagcagctacgtgtccagctagagaagatgttcgaggccatgggaggaaaggaactggacgcagaggctagcgacatattgaaggaactgcaggttaagctcaataatgttcttgacgagctgtccagagtcttcgcaacaagtttccagccccacatcgaagaatgtgtgaagcaaatgggggacatcttgtcgcaagtcaagggcacgggaaatgtcccagcgtccgcatgcagcagcgtggctcaggacgccgataacgtactgcaacccattatggacttgctggatagtaacctgaccttgttcgcaaaaatctgcgagaagaccgtcctcaagcgcgtgctcaaggaactctggaagctcgtgatgaataccatggagaagacgattgtgttgcctccactgaccgaccagaccatgattggtaatttgctgcggaaacatggaaaggggcttgagaaaggaagggtgaaactcccaagccactcagatggcactcagatgattttcaatgcagcaaaggagctcggtcagttgtccaagctgaaagatcacatggtgcgcgaggaggcaaagtcattgacccctaaacagtgcgcggtcgtagaattggctctggatactataaagcagtacttccatgctggcggggtcggcctgaaaaaaacttttctcgaaaaatcccctgacctgcagtcactaaggtacgcacttagcctttacactcaggccacagacttgctcatcaagacgtttgtgcagacacagagcgctcagggcctaggagtcgaggaccccgtgggagaagtgtcggtccacgtggaactgttcactcatccaggaactggcgagcacaaagtcaccgttaaagttgtagccgccaatgacctgaagtggcagacgagcgggatttttagacccttcattgaagtgaacataattggcccccagcttagcgataaaaagcggaagttcgctaccaagtcgaaaaacaattcttgggctccaaagtataacgagtcctttcagttcacactgtccgctgatgctggacccgagtgctatgaactgcaggtatgtgtaaaggactattgctttgctagggaggacagaacggtggggcttgccgtgcttcaactcagggagctcgcccagcgagggtccgcagcctgctggctaccacttggcaggcggatccatatggatgacaccggtctcactgttcttagaattctgagtcaacggtccaacgacgaagtagcgaaggagtttgtcaagctcaagagtgacacgcggtccgcagaagagggaggggcagccccggccccttag

SEQ ID NO: 36324 - DNA, 5112 bp, Artificial Sequence
  derived and/or modified sequence
atgagcctgctgtgcgtcggagtcaagaaagctaagttcgatggcgctcaggagaagtttaacacttacgttacccttaaggtgcagaacgtgaagtctacaaccatagcagtaaggggctctcagccatcctgggaacaagattttatgtttgaaattaacaggctggatttgggattgaccgtggaggtttggaacaagggtctgatctgggatacaatggtgggcactgtgtggatacctcttagaacgatcagacagtcaaacgaagagggtccgggggaatggctgaccttagatagtcaggtgattatggcagatagtgagatttgcgggaccaaagacccaacgtttcacaggattctgctggacacaagattcgagttgccgctggatattcccgaagaggaggctcgctactgggccaaaaagctggagcaactgaacgcgatgagagatcaggacgaatactccttccaggacgaacaagacaagcccctgccagtgcctagcaaccagtgttgtaactggaactactttgggtggggtgagcagcacaacgacgatccggactctgccgtagatgatcgggacagcgactaccgttctgaaaccagcaacagtattccaccgccgtattataccacgtcgcagcccaatgcgagcgtgcatcagtatagcgtgcgtcctccacccctcggctctagagagtcctatagcgattccatgcattcctatgaggaatttagcgagccccaagcattgtctcccactggatcctcccggtacgcctccagcggggaactgtctcagggaagttctcagctgtccgaggacttcgaccccgacgagcacagcctccagggctccgatatggaagatgaacgggatcgggactcttatcacagttgtcattccagcgtgtcctatcacaaagacagtcccaggtgggatcaggacgaagaagagctggaagaggacctcgaagattttctggaagaagaagagcttcctgaggatgaggaagagttggaagaggaggaagaggaagtcccagacgatctcgggtcttatgctcagagagaggacgtagctgtagccgaaccgaaagatttcaagcgcattagcctcccccccgcagctccaggcaaagaagataaagcccctgtggccccaactgaggcacccgatatggcaaaagtcgctccgaagcccgcgaccccagacaaagtaccagcagcagagcaaattccagaggccgagccacccaaagacgaagaatcctttcgcccacgcgaggacgaagaaggtcaagaggggcaggatagtatgtccagggctaaagccaattggctccgggcctttaacaaagttcgtatgcaactgcaggaagcccgtggcgaaggagagatgtcaaagagcttgtggtttaaaggaggtcctggaggcggcctgatcatcattgattcaatgccagatattcgcaaacgtaaaccgatccctcttgtgagcgacctggctatgtcactcgtgcaaagccgcaaagcaggaataaccagtgctttggccagcagcaccctaaataacgaagaactgaaaaaccacgtgtacaagaaaaccttgcaggccctcatttatcccatttcatgcactaccccgcataacttcgaggtatggaccgcaacaaccccaacttactgttatgaatgtgaggggctgttgtggggtatagctaggcaggggatgcggtgcacagagtgcggcgtgaagtgtcacgaaaaatgccaggatctgctcaacgctgactgcctgcagcgggcggctgaaaagtcaagtaagcatggggccgaggatagaacacagaacattatcatggtcctcaaggatagaatgaagataagagagaggaacaaacccgagatctttgagctgattcaggaaatctttgccgtgaccaaaacagcccatacacagcagatgaaagccgtgaagcagtcagtgctggatgggacatccaaatggagtgctaaaatatccattacagtggtgtgtgcccagggactccaagccaaagataagaccggttctagtgacccctacgtgacggtgcaggtcggaaagaccaagaaacgaaccaagactatttacggcaatctgaatcccgtttgggaggagaattttcactttgaatgtcataatagtagcgatcggatcaaagttcgggtctgggacgaagacgatgacataaagtctagagttaagcagagattcaagcgcgaaagcgacgactttttgggacagaccatcatcgaggttcgaacactttccggtgaaatggatgtgtggtacaatctagacaagcgaaccgacaagtctgccgtgtcgggcgcaatacgcctgcatatttccgttgagattaagggcgaagagaaagttgccccttatcatgttcaatacacctgccttcacgaaaacctgttccatttcgtgacagatgtacaaaataatggggtcgttaaaattcctgacgctaaaggcgacgacgcctggaaggtgtactatgacgagacagcgcaggaaattgtggatgagtttgccatgcgctacggtgtggaatcaatctaccaggccatgacccacttcgcttgcctgagctctaagtatatgtgtcccggcgtacctgcagtgatgtccactctcctggccaatatcaacgcatactacgcccacaccacagcgagcaccaacgtcagcgccagtgatcggtttgccgcatccaattttggcaaggaacggttcgtaaagctgcttgaccagctccataacagtctacgaattgacctgtccatgtacaggaacaacttcccagcctccagtcccgaaagactccaggatcttaagtcaactgtggatcttcttacttccatcacattcttcagaatgaaggtgcaggagctgcagtccccccccagggcgtcccaggtggtcaaagattgcgtgaaggcctgcctgaactccacttacgagtacatctttaacaactgccatgagttatactcccgagaataccaaactgatcctgctaaaaagggggaagttttacctgaggagcagggaccgtctattaagaatctcgatttttggtccaagctgattaccctgattgtgtccatcattgaggaagacaaaaactcatacaccccatgtctcaaccagtttccacaggagcttaatgtgggaaagatcagtgcggaggtgatgtggaacctgtttgctcaagatatgaaatatgcaatggaggagcatgacaaacacaggttatgtaaatcggccgattatatgaaccttcatttcaaggtgaagtggttatataatgagtacgtcactgaactacctgccttcaaggatagagtgcctgaatatcctgcgtggtttgaaccatttgttatacaatggcttgacgagaacgaggaggtgtctcgggacttcctgcacggtgccctggaacgggacaaaaaggatgggtttcagcagactagtgaacacgcccttttcagttgctccgtagtggatgtgttttcccaacttaatcagtcttttgaaatcattaaaaagctggagtgccccgacccccagatcgtaggacactacatgcgaagatttgccaaaacgatttcaaacgttcttttgcagtatgccgacattatatctaaggattttgctagctactgctctaaggagaaagaaaaggtcccctgcattctgatgaacaatacacagcaactgagagtgcagctcgaaaaaatgtttgaggctatgggaggaaaagaactggacgcggaagctagcgacatcctcaaagagcttcaggtgaagttgaataatgttcttgacgagttgagccgcgtcttcgctacttccttccagccacatattgaggaatgcgtgaaacagatgggagacatcctcagccaggtgaaaggtactggtaacgtgccagcaagcgcttgtagttccgttgcgcaggacgctgacaatgtgctacaaccaatcatggaccttctggatagtaacctgacattgttcgctaaaatctgtgagaaaactgtcctgaagcgggttctgaaagagttgtggaaactggtgatgaacactatggaaaaaaccattgtcctgcctccacttaccgatcagaccatgatcggtaatcttcttcggaagcacggaaaagggcttgagaaggggagagtcaaactgcctagccactcagacggcacccaaatgattttcaatgccgcgaaggaactgggccagctgtccaagctgaaagatcacatggtgcgggaagaggctaaaagcctcacgcccaagcagtgtgccgtcgtggagctggccctggacaccataaaacaatactttcatgctgggggggtggggctcaagaaaaccttcctggagaagtctcctgaccttcagagccttagatatgccctgagcctgtacacccaggcaactgacctgcttatcaaaacattcgtgcagacccagtccgcccaaggtttgggggtggaagaccctgtcggagaggtgtccgtgcacgttgagctctttacacaccccggcactggagagcacaaggtcaccgtaaaggtcgtggccgcaaatgatctgaaatggcagacttcaggcatcttccgcccttttatcgaggtgaatattatcggaccacaactgagtgacaaaaagcgaaaattcgctacaaagagcaagaacaactcttgggcccccaagtacaatgagtcttttcagttcaccctcagcgcagatgccgggccggaatgttacgagctgcaggtctgtgtaaaggattactgctttgccagggaggacaggacagtcgggctagctgtgctccaactgcgtgagctcgcccagagagggagtgccgcctgttggcttcctctaggtcgccggatacacatggacgacacggggctaacagtgctaaggattctcagccagcgaagtaacgatgaggttgccaaagaattcgtgaagcttaaatccgataccaggtctgccgaagagggaggcgctgccccggccccttag

SEQ ID NO: 36325 - DNA, 5112 bp, Artificial Sequence
  derived and/or modified sequence
ctgagcctgctgtgtgtgtccctgaagaaggccaagtttgatggagcccaggagaagttcaacacctacgtgaccctgaaggtgcagaatgtgaagagcaccaccatcgctgtgcggggcagccagcccagctgggagcaggacttcatgtttgagatcaaccggctggacctgggcctgactgtggaggtgtggaacaagggcctcatctgggacaccatggtgggcaccgtgtggatccccctgcggaccatccggcagagcaatgaggagggccctggagagtggctgaccctggacagccaggtgatcatggctgacagcgagatctgtggcaccaaggaccccaccttccaccgcatcctgctggacaccaggtttgagctgcccctggacatccctgaggaggaggcccgctactgggccaagaagctggagcagctgaatgccatgagggaccaggatgagtacagcttccaggatgagcaggacaagcccctgcctgtgcccagcaaccagtgctgcaactggaactacttcggctggggcgagcagcacaatgatgatcctgacagcgctgtggatgaccgggacagcgactacagaagtgagaccagcaacagcatccccccaccctactacaccaccagccagcccaatgcctctgtgcaccagtacagcgtgcggcccccacccctgggcagccgggagagctacagcgacagcatgcacagctatgaggagttcagcgagccccaggccctgagccccaccggcagcagccgctatgccagcagcggggagctgagccagggcagcagccagctgtctgaggactttgatcctgatgagcacagcctgcagggcagtgacatggaggatgagcgggaccgggacagctaccacagctgccacagctctgtgtcctaccacaaggacagcccccgctgggaccaggatgaggaggagctggaggaggacctggaggacttcctggaggaggaggagctgcctgaagatgaggaggagctggaggaggaggaggaggaggtgcctgatgacctgggcagctatgcccagcgggaggatgtggccgtggccgagcccaaggacttcaagaggatcagcctgcccccagctgcccctgggaaggaggacaaggcccctgtggcccccacagaggccccagacatggccaaggtggcccccaagccagccaccccagacaaggtgcctgctgctgagcagatccctgaggccgagccccccaaggatgaggagagcttccggcccagagaagatgaggagggccaggagggccaggacagcatgagccgggccaaggccaactggctgcgggccttcaacaaggtgaggatgcagctgcaggaggcccggggggagggggagatgagcaagagcctgtggttcaagggcggccctgggggcggcctcatcatcatcgacagcatgccagacatcaggaagaggaagcccatccccctggtgtctgacctggccatgagcctggtgcagagcaggaaggccggcatcaccagcgccctggccagcagcaccctgaacaatgaggagctgaagaaccacgtgtacaagaagaccctgcaggccctgatctaccccatcagctgcaccaccccccacaactttgaggtgtggacagccaccacccccacctactgctatgaatgtgagggcctgctgtggggcatcgcccggcagggcatgcgctgcacagaatgtggggtgaagtgccacgagaagtgccaggacctgctgaatgctgactgcctgcagagagctgctgagaagagcagcaagcacggggctgaggacaggacccagaacatcatcatggtgctgaaggacaggatgaagatccgggagaggaacaagccagagatctttgagctgatccaggagatctttgctgtgaccaagacagcccacacccagcagatgaaggctgtgaagcagagcgtgctggatggcaccagcaagtggagcgccaagatcagcatcaccgtggtgtgtgcccagggcctgcaggccaaggacaagacaggcagcagtgacccctacgtgacagtgcaggtgggcaagaccaagaagaggaccaagaccatctacggcaacctgaaccctgtgtgggaggagaacttccactttgagtgccacaacagcagtgaccgcatcaaggtgcgggtgtgggatgaagatgatgacatcaagagccgggtgaagcagcgcttcaagcgggagagtgatgacttcctgggccagaccatcatcgaggtgaggaccctgagcggggagatggatgtgtggtacaacctggacaagaggacagacaagtctgctgtgtctggggccatccggctgcacatctctgtggagatcaagggggaggagaaggtggccccctaccacgtgcagtacacctgcctgcacgagaacctcttccactttgtgacagatgtgcagaacaacggggtggtgaagatcccagatgccaagggagatgatgcctggaaggtgtactatgatgaaacagcccaggagatcgtggatgaatttgccatgagatatggagtggagagcatctaccaggccatgacccactttgcctgcctgagcagcaagtacatgtgccctggggtgcctgctgtgatgagcaccctgctggccaacatcaatgcctactatgcccacaccacagccagcaccaacgtgtctgccagtgacagatttgctgccagcaactttgggaaggagagatttgtgaagctgctggaccagctgcacaacagcctgagaattgacctgtccatgtacagaaacaacttccctgccagcagccctgagcggctgcaggacctgaagagcacagtggacctgctgaccagcatcaccttcttcaggatgaaggtgcaggagctgcagagccccccccgggccagccaggtggtgaaggactgtgtgaaggcctgcctgaacagcacctatgagtacatcttcaacaactgccacgagctgtacagccgggagtaccagacagatcctgccaagaagggggaggtgctgcctgaggagcagggccccagcatcaagaacctggacttctggagcaagctgatcaccctgattgtgtccatcatcgaggaggacaagaacagctacaccccctgcctgaaccagttcccccaggagctgaatgtgggcaagatctctgctgaggtgatgtggaacctgtttgcccaggacatgaagtatgccatggaggagcatgacaagcaccggctgtgcaagtctgctgactacatgaacctgcacttcaaggtgaagtggctgtacaatgaatatgtgacagagctgcctgccttcaaggacagagtgcctgagtacccagcctggtttgagcccttcgtcatccagtggctggatgaaaatgaggaggtgtcccgggacttcctgcatggagccctggagcgggacaagaaggatggcttccagcagaccagcgagcacgccctcttcagctgcagcgtggtggatgtgttcagccagctgaaccagagctttgagatcatcaagaagctggagtgcccagacccccagatcgtgggccactacatgagaagatttgccaagaccatcagcaatgtgctgctgcagtatgctgacatcatcagcaaggactttgccagctactgcagcaaggagaaggagaaggtgccctgcatcctgatgaacaacacccagcagctgcgggtgcagctggagaagatgtttgaggccatgggcggcaaggagctggatgctgaggccagtgacatcctgaaggagctgcaggtgaagctgaacaacgtgctggatgagctgagccgggtgtttgccaccagcttccagccccacatcgaggagtgtgtgaagcagatgggagacatcctgagccaggtgaagggcactggaaatgtgcctgccagcgcctgcagctctgtggcccaggatgctgacaacgtgctgcagcccatcatggacctgctggacagcaacctgaccctgtttgccaagatctgtgagaagacagtgctgaagagggtgctgaaggagctgtggaagctggtgatgaacaccatggagaagaccatcgtgctgccccccctgacagaccagaccctgcagggcaacctgctgaggaagcacggcaagggcctggagaagggccgggtgaagctgcccagccacagtgatggcacccagatgatcttcaatgctgccaaggagctgggccagctgagcaagctgaaggaccacatggtgcgggaggaggccaagagcctgacccccaagcagtgtgctgtggtggagctggccctggacaccatcaagcagtacttccacgccggcggcgtgggcctgaagaagaccttcctggagaagagcccagacctgcagagcctgcgctatgccctgagcctgtacacccaggccacagacctgctgatcaagacctttgtgcagacccagagcgcccagggcctgggcgtggaggaccctgtgggggaggtgtctgtgcacgtggagctgttcacccaccctggcaccggggagcacaaggtgacagtgaaggtggtggccgccaatgacctgaagtggcagaccagcggcatcttccggcccttcatcgaggtgaacatcatcggcccccagctgagtgacaagaagaggaagtttgccaccaagagcaagaacaacagctgggcccccaagtacaatgaaagcttccagttcaccctgtctgcagatgctggcccagaatgttatgagctgcaggtgtgtgtgaaggactactgctttgcccgggaggacagaacagtgggcctggccgtgctgcagctgcgggagctggcccagaggggcagcgctgcctgctggctgcccctgggccgccgcatccacatggatgacaccggcctgactgtgctgcgcatcctgagccagaggagcaatgatgaggtggccaaggagtttgtgaagctgaagagtgacaccaggtctgctgaggagggcggggccgccccagccccctag

SEQ ID NO: 36326 - DNA, 5376 bp, Artificial Sequence
  derived and/or modified sequence
atgggcggcggcggcacctgcaccatctctgtgcaggtgcgggtgtgcacaggaggcaacctgctgggcggcagaagaagacccctgagcccctgcaatgaggaggtgtggggcgaggcccccctgcccggggcccggcccttcaatgcccccccagcccggagcgccccagcccccagcggcgtgcccggcctgcggctgcctgccccccaccagaggcacagcaggcctggccgcctgcggcccacctgtgagctgggggacatgagcctgctgtgtgtgggcgtgaagaaggccaagtttgatggagcccaggagaagttcaacacctacgtgaccctgaaggtgcagaatgtgaagagcaccaccatcgctgtgcggggcagccagcccagctgggagcaggacttcatgtttgagatcaaccggctggacctgggcctgactgtggaggtgtggaacaagggcctcatctgggacaccatggtgggcaccgtgtggatccccctgcggaccatccggcagagcaatgaggagggccctggagagtggctgaccctggacagccaggtgatcatggctgacagcgagatctgtggcaccaaggaccccaccttccaccgcatcctgctggacaccaggtttgagctgcccctggacatccctgaggaggaggcccgctactgggccaagaagctggagcagctgaatgccatgagggaccaggatgagtacagcttccaggatgagcaggacaagcccctgcctgtgcccagcaaccagtgctgcaactggaactacttcggctggggcgagcagcacaatgatgatcctgacagcgctgtggatgaccgggacagcgactacagaagtgagaccagcaacagcatccccccaccctactacaccaccagccagcccaatgcctctgtgcaccagtacagcgtgcggcccccacccctgggcagccgggagagctacagcgacagcatgcacagctatgaggagttcagcgagccccaggccctgagccccaccggcagcagccgctatgccagcagcggggagctgagccagggcagcagccagctgtctgaggactttgatcctgatgagcacagcctgcagggcagtgacatggaggatgagcgggaccgggacagctaccacagctgccacagctctgtgtcctaccacaaggacagcccccgctgggaccaggatgaggaggagctggaggaggacctggaggacttcctggaggaggaggagctgcctgaagatgaggaggagctggaggaggaggaggaggaggtgcctgatgacctgggcagctatgcccagcgggaggatgtggccgtggccgagcccaaggacttcaagaggatcagcctgcccccagctgcccctgggaaggaggacaaggcccctgtggcccccacagaggccccagacatggccaaggtggcccccaagccagccaccccagacaaggtgcctgctgctgagcagatccctgaggccgagccccccaaggatgaggagagcttccggcccagagaagatgaggagggccaggagggccaggacagcatgagccgggccaaggccaactggctgcgggccttcaacaaggtgaggatgcagctgcaggaggcccggggggagggggagatgagcaagagcctgtggttcaagggcggccctgggggcggcctcatcatcatcgacagcatgccagacatcaggaagaggaagcccatccccctggtgtctgacctggccatgagcctggtgcagagcaggaaggccggcatcaccagcgccctggccagcagcaccctgaacaatgaggagctgaagaaccacgtgtacaagaagaccctgcaggccctgatctaccccatcagctgcaccaccccccacaactttgaggtgtggacagccaccacccccacctactgctatgaatgtgagggcctgctgtggggcatcgcccggcagggcatgcgctgcacagaatgtggggtgaagtgccacgagaagtgccaggacctgctgaatgctgactgcctgcagagagctgctgagaagagcagcaagcacggggctgaggacaggacccagaacatcatcatggtgctgaaggacaggatgaagatccgggagaggaacaagccagagatctttgagctgatccaggagatctttgctgtgaccaagacagcccacacccagcagatgaaggctgtgaagcagagcgtgctggatggcaccagcaagtggagcgccaagatcagcatcaccgtggtgtgtgcccagggcctgcaggccaaggacaagacaggcagcagtgacccctacgtgacagtgcaggtgggcaagaccaagaagaggaccaagaccatctacggcaacctgaaccctgtgtgggaggagaacttccactttgagtgccacaacagcagtgaccgcatcaaggtgcgggtgtgggatgaagatgatgacatcaagagccgggtgaagcagcgcttcaagcgggagagtgatgacttcctgggccagaccatcatcgaggtgaggaccctgagcggggagatggatgtgtggtacaacctggacaagaggacagacaagtctgctgtgtctggggccatccggctgcacatctctgtggagatcaagggggaggagaaggtggccccctaccacgtgcagtacacctgcctgcacgagaacctcttccactttgtgacagatgtgcagaacaacggggtggtgaagatcccagatgccaagggagatgatgcctggaaggtgtactatgatgaaacagcccaggagatcgtggatgaatttgccatgagatatggagtggagagcatctaccaggccatgacccactttgcctgcctgagcagcaagtacatgtgccctggggtgcctgctgtgatgagcaccctgctggccaacatcaatgcctactatgcccacaccacagccagcaccaacgtgtctgccagtgacagatttgctgccagcaactttgggaaggagagatttgtgaagctgctggaccagctgcacaacagcctgagaattgacctgtccatgtacagaaacaacttccctgccagcagccctgagcggctgcaggacctgaagagcacagtggacctgctgaccagcatcaccttcttcaggatgaaggtgcaggagctgcagagccccccccgggccagccaggtggtgaaggactgtgtgaaggcctgcctgaacagcacctatgagtacatcttcaacaactgccacgagctgtacagccgggagtaccagacagatcctgccaagaagggggaggtgctgcctgaggagcagggccccagcatcaagaacctggacttctggagcaagctgatcaccctgattgtgtccatcatcgaggaggacaagaacagctacaccccctgcctgaaccagttcccccaggagctgaatgtgggcaagatctctgctgaggtgatgtggaacctgtttgcccaggacatgaagtatgccatggaggagcatgacaagcaccggctgtgcaagtctgctgactacatgaacctgcacttcaaggtgaagtggctgtacaatgaatatgtgacagagctgcctgccttcaaggacagagtgcctgagtacccagcctggtttgagcccttcgtcatccagtggctggatgaaaatgaggaggtgtcccgggacttcctgcatggagccctggagcgggacaagaaggatggcttccagcagaccagcgagcacgccctcttcagctgcagcgtggtggatgtgttcagccagctgaaccagagctttgagatcatcaagaagctggagtgcccagacccccagatcgtgggccactacatgagaagatttgccaagaccatcagcaatgtgctgctgcagtatgctgacatcatcagcaaggactttgccagctactgcagcaaggagaaggagaaggtgccctgcatcctgatgaacaacacccagcagctgcgggtgcagctggagaagatgtttgaggccatgggcggcaaggagctggatgctgaggccagtgacatcctgaaggagctgcaggtgaagctgaacaacgtgctggatgagctgagccgggtgtttgccaccagcttccagccccacatcgaggagtgtgtgaagcagatgggagacatcctgagccaggtgaagggcactggaaatgtgcctgccagcgcctgcagctctgtggcccaggatgctgacaacgtgctgcagcccatcatggacctgctggacagcaacctgaccctgtttgccaagatctgtgagaagacagtgctgaagagggtgctgaaggagctgtggaagctggtgatgaacaccatggagaagaccatcgtgctgccccccctgacagaccagaccatgattggcaacctgctgaggaagcacggcaagggcctggagaagggccgggtgaagctgcccagccacagtgatggcacccagatgatcttcaatgctgccaaggagctgggccagctgagcaagctgaaggaccacatggtgcgggaggaggccaagagcctgacccccaagcagtgtgctgtggtggagctggccctggacaccatcaagcagtacttccacgccggcggcgtgggcctgaagaagaccttcctggagaagagcccagacctgcagagcctgcgctatgccctgagcctgtacacccaggccacagacctgctgatcaagacctttgtgcagacccagagcgcccagggcctgggcgtggaggaccctgtgggggaggtgtctgtgcacgtggagctgttcacccaccctggcaccggggagcacaaggtgacagtgaaggtggtggccgccaatgacctgaagtggcagaccagcggcatcttccggcccttcatcgaggtgaacatcatcggcccccagctgagtgacaagaagaggaagtttgccaccaagagcaagaacaacagctgggcccccaagtacaatgaaagcttccagttcaccctgtctgcagatgctggcccagaatgttatgagctgcaggtgtgtgtgaaggactactgctttgcccgggaggacagaacagtgggcctggccgtgctgcagctgcgggagctggcccagaggggcagcgctgcctgctggctgcccctgggccgccgcatccacatggatgacaccggcctgactgtgctgcgcatcctgagccagaggagcaatgatgaggtggccaaggagtttgtgaagctgaagagtgacaccaggtctgctgaggagggcggggccgccccagccccctag

SEQ ID NO: 36327 - DNA, 5112 bp, Artificial Sequence
  derived and/or modified sequence
atgagcctgctgtgtgtgggcgtgaagaaggccaagtttgatggagcccaggagaagttcaacacctacgtgaccctgaaggtgcagaatgtgaagagcaccaccatcgctgtgcggggcagccagcccagctgggagcaggacttcatgtttgagatcaaccggctggacctgggcctgactgtggaggtgtggaacaagggcctcatctgggacaccatggtgggcaccgtgtggatccccctgcggaccatccggcagagcaatgaggagggccctggagagtggctgaccctggacagccaggtgatcatggctgacagcgagatctgtggcaccaaggaccccaccttccaccgcatcctgctggacaccaggtttgagctgcccctggacatccctgaggaggaggcccgctactgggccaagaagctggagcagctgaatgccatgagggaccaggatgagtacagcttccaggatgagcaggacaagcccctgcctgtgcccagcaaccagtgctgcaactggaactacttcggctggggcgagcagcacaatgatgatcctgacagcgctgtggatgaccgggacagcgactacagaagtgagaccagcaacagcatccccccaccctactacaccaccagccagcccaatgcctctgtgcaccagtacagcgtgcggcccccacccctgggcagccgggagagctacagcgacagcatgcacagctatgaggagttcagcgagccccaggccctgagccccaccggcagcagccgctatgccagcagcggggagctgagccagggcagcagccagctgtctgaggactttgatcctgatgagcacagcctgcagggcagtgacatggaggatgagcgggaccgggacagctaccacagctgccacagctctgtgtcctaccacaaggacagcccccgctgggaccaggatgaggaggagctggaggaggacctggaggacttcctggaggaggaggagctgcctgaagatgaggaggagctggaggaggaggaggaggaggtgcctgatgacctgggcagctatgcccagcgggaggatgtggccgtggccgagcccaaggacttcaagaggatcagcctgcccccagctgcccctgggaaggaggacaaggcccctgtggcccccacagaggccccagacatggccaaggtggcccccaagccagccaccccagacaaggtgcctgctgctgagcagatccctgaggccgagccccccaaggatgaggagagcttccggcccagagaagatgaggagggccaggagggccaggacagcatgagccgggccaaggccaactggctgcgggccttcaacaaggtgaggatgcagctgcaggaggcccggggggagggggagatgagcaagagcctgtggttcaagggcggccctgggggcggcctcatcatcatcgacagcatgccagacatcaggaagaggaagcccatccccctggtgtctgacctggccatgagcctggtgcagagcaggaaggccggcatcaccagcgccctggccagcagcaccctgaacaatgaggagctgaagaaccacgtgtacaagaagaccctgcaggccctgatctaccccatcagctgcaccaccccccacaactttgaggtgtggacagccaccacccccacctactgctatgaatgtgagggcctgctgtggggcatcgcccggcagggcatgcgctgcacagaatgtggggtgaagtgccacgagaagtgccaggacctgctgaatgctgactgcctgcagagagctgctgagaagagcagcaagcacggggctgaggacaggacccagaacatcatcatggtgctgaaggacaggatgaagatccgggagaggaacaagccagagatctttgagctgatccaggagatctttgctgtgaccaagacagcccacacccagcagatgaaggctgtgaagcagagcgtgctggatggcaccagcaagtggagcgccaagatcagcatcaccgtggtgtgtgcccagggcctgcaggccaaggacaagacaggcagcagtgacccctacgtgacagtgcaggtgggcaagaccaagaagaggaccaagaccatctacggcaacctgaaccctgtgtgggaggagaacttccactttgagtgccacaacagcagtgaccgcatcaaggtgcgggtgtgggatgaagatgatgacatcaagagccgggtgaagcagcgcttcaagcgggagagtgatgacttcctgggccagaccatcatcgaggtgaggaccctgagcggggagatggatgtgtggtacaacctggacaagaggacagacaagtctgctgtgtctggggccatccggctgcacatctctgtggagatcaagggggaggagaaggtggccccctaccacgtgcagtacacctgcctgcacgagaacctcttccactttgtgacagatgtgcagaacaacggggtggtgaagatcccagatgccaagggagatgatgcctggaaggtgtactatgatgaaacagcccaggagatcgtggatgaatttgccatgagatatggagtggagagcatctaccaggccatgacccactttgcctgcctgagcagcaagtacatgtgccctggggtgcctgctgtgatgagcaccctgctggccaacatcaatgcctactatgcccacaccacagccagcaccaacgtgtctgccagtgacagatttgctgccagcaactttgggaaggagagatttgtgaagctgctggaccagctgcacaacagcctgagaattgacctgtccatgtacagaaacaacttccctgccagcagccctgagcggctgcaggacctgaagagcacagtggacctgctgaccagcatcaccttcttcaggatgaaggtgcaggagctgcagagccccccccgggccagccaggtggtgaaggactgtgtgaaggcctgcctgaacagcacctatgagtacatcttcaacaactgccacgagctgtacagccgggagtaccagacagatcctgccaagaagggggaggtgctgcctgaggagcagggccccagcatcaagaacctggacttctggagcaagctgatcaccctgattgtgtccatcatcgaggaggacaagaacagctacaccccctgcctgaaccagttcccccaggagctgaatgtgggcaagatctctgctgaggtgatgtggaacctgtttgcccaggacatgaagtatgccatggaggagcatgacaagcaccggctgtgcaagtctgctgactacatgaacctgcacttcaaggtgaagtggctgtacaatgaatatgtgacagagctgcctgccttcaaggacagagtgcctgagtacccagcctggtttgagcccttcgtcatccagtggctggatgaaaatgaggaggtgtcccgggacttcctgcatggagccctggagcgggacaagaaggatggcttccagcagaccagcgagcacgccctcttcagctgcagcgtggtggatgtgttcagccagctgaaccagagctttgagatcatcaagaagctggagtgcccagacccccagatcgtgggccactacatgagaagatttgccaagaccatcagcaatgtgctgctgcagtatgctgacatcatcagcaaggactttgccagctactgcagcaaggagaaggagaaggtgccctgcatcctgatgaacaacacccagcagctgcgggtgcagctggagaagatgtttgaggccatgggcggcaaggagctggatgctgaggccagtgacatcctgaaggagctgcaggtgaagctgaacaacgtgctggatgagctgagccgggtgtttgccaccagcttccagccccacatcgaggagtgtgtgaagcagatgggagacatcctgagccaggtgaagggcactggaaatgtgcctgccagcgcctgcagctctgtggcccaggatgctgacaacgtgctgcagcccatcatggacctgctggacagcaacctgaccctgtttgccaagatctgtgagaagacagtgctgaagagggtgctgaaggagctgtggaagctggtgatgaacaccatggagaagaccatcgtgctgccccccctgacagaccagaccatgattggcaacctgctgaggaagcacggcaagggcctggagaagggccgggtgaagctgcccagccacagtgatggcacccagatgatcttcaatgctgccaaggagctgggccagctgagcaagctgaaggaccacatggtgcgggaggaggccaagagcctgacccccaagcagtgtgctgtggtggagctggccctggacaccatcaagcagtacttccacgccggcggcgtgggcctgaagaagaccttcctggagaagagcccagacctgcagagcctgcgctatgccctgagcctgtacacccaggccacagacctgctgatcaagacctttgtgcagacccagagcgcccagggcctgggcgtggaggaccctgtgggggaggtgtctgtgcacgtggagctgttcacccaccctggcaccggggagcacaaggtgacagtgaaggtggtggccgccaatgacctgaagtggcagaccagcggcatcttccggcccttcatcgaggtgaacatcatcggcccccagctgagtgacaagaagaggaagtttgccaccaagagcaagaacaacagctgggcccccaagtacaatgaaagcttccagttcaccctgtctgcagatgctggcccagaatgttatgagctgcaggtgtgtgtgaaggactactgctttgcccgggaggacagaacagtgggcctggccgtgctgcagctgcgggagctggcccagaggggcagcgctgcctgctggctgcccctgggccgccgcatccacatggatgacaccggcctgactgtgctgcgcatcctgagccagaggagcaatgatgaggtggccaaggagtttgtgaagctgaagagtgacaccaggtctgctgaggagggcggggccgccccagccccctag

SEQ ID NO: 36328 - DNA, 5112 bp, Artificial Sequence
  derived and/or modified sequence
ctgagcctgctgtgcgtgagcctgaagaaggccaagttcgacggcgctcaggaaaagttcaacacgtatgtgactctgaaagtccagaacgtgaaatctaccaccatagccgttcggggctcccaaccttcttgggaacaggactttatgtttgaaattaacagattagatctcggcttgaccgtcgaagtttggaacaaggggctcatttgggatactatggtgggcacagtttggatccctctgaggactatccggcaaagcaacgaagagggaccaggggaatggctcactctggactctcaggtcatcatggctgacagcgagatctgtgggaccaaggatcccacattccatcggattctccttgatacgcgcttcgagctgcctctggatattccagaggaagaagccaggtactgggccaagaaactggagcagctgaatgctatgcgagaccaggacgagtactcgttccaggacgaacaagacaaacctctacccgtgccgagtaatcaatgttgcaattggaactatttcggatggggtgagcagcataatgacgatcccgacagtgccgtggacgatagggactcagattacagatccgagaccagcaatagcatcccacccccctattataccaccagccagcccaacgcgtccgtccaccagtatagcgttcggccccctcccctaggatcccgggagtcctactccgattctatgcacagctacgaggaattcagcgagccccaggccctgagccctactggcagttctagatatgcatcaagcggggagctgagtcagggctcttcccagctgagtgaggattttgatccagatgaacatagcctgcagggttccgacatggaagacgagcgggaccgggacagctatcacagctgccattcgtcagtttcttaccataaggactcgccgcgttgggatcaggatgaggaagaactggaggaggacctggaggacttcttggaggaagaggaactaccagaggacgaagaggaattggaggaggaggaagaagaagtgccagacgatttgggttcctatgcacagcgggaagatgttgccgtggcagagcctaaagacttcaaacggatatccttgccaccagctgcacccgggaaggaggataaggcgccagtggcccctacagaagctcccgatatggcaaaggtggcacccaaacccgcgacccctgataaggtgcctgctgccgagcagatccccgaggctgagcctccaaaggacgaagaaagtttcaggccacgcgaagatgaggagggacaggagggtcaggattctatgagcagagcgaaggctaattggttacgggcgttcaacaaggtgcgtatgcagctgcaggaggcccgcggcgagggggaaatgtctaaaagcctgtggttcaaggggggcccaggcggagggctcattattatcgactccatgccagacatcagaaagagaaagccgatcccactggtatcggatctggccatgagcttggtgcagagcaggaaagccggaatcacttcagcactcgcctcttcaacgttaaataatgaagagctgaaaaaccacgtatacaagaagacacttcaggcgctgatatatccgatcagctgcacaacccctcacaattttgaggtctggaccgccacaacacctacctactgctacgagtgcgaggggctcctttgggggatcgctagacagggcatgaggtgcactgaatgcggagtcaagtgtcacgagaaatgccaggacctgctgaatgcagactgcttacagagggccgccgaaaagtcaagcaaacatggagccgaagatcgtacacagaatataattatggtgttaaaggatcggatgaagattcgggaacgaaacaaaccggagatttttgaattgattcaagagatctttgccgttacgaaaacagcccatacgcagcagatgaaggccgttaagcagtcagtgctggatggtacctctaaatggtcagcgaaaatttcgatcacagtggtatgtgcccagggcctgcaggcaaaggacaagacaggaagcagcgatccctacgtgaccgtgcaagttggcaagactaaaaaacggacaaagaccatatatggcaacttgaaccctgtctgggaggagaactttcactttgagtgccacaattcaagcgaccggatcaaggtgagagtatgggacgaggatgatgacatcaaatcccgtgtgaagcaacggtttaagcgtgagagcgacgatttcctgggccaaactatcattgaggtgcgtaccttgtccggagagatggatgtgtggtacaacctggataaacggaccgacaagagtgctgtttctggcgccatccgccttcacattagcgtggaaatcaagggggaggagaaagtggccccatatcacgtgcagtatacttgtctgcatgagaacttgttccatttcgtgaccgacgtgcagaacaacggtgtggtgaaaatcccagatgccaagggagacgacgcgtggaaagtttactatgacgagaccgctcaggagatcgtggatgagttcgcgatgcggtacggggtagaatccatctatcaggctatgacacacttcgcgtgcttatcctccaaatatatgtgtccaggagtgcccgctgttatgtcaacacttctggccaatattaatgcctactatgcccacaccaccgcgtcaactaatgtgtccgcatccgaccgcttcgccgctagtaactttggtaaggaacgattcgtcaagctgctggatcagttgcataactctctccgaatcgacctgtccatgtacaggaataactttcccgcatcaagcccggagcgcctccaggatctgaagtctacagtggacttattaacatctatcacctttttccggatgaaagtgcaagagctgcagagcccacctagagcgtcccaagtagtaaaggactgtgtgaaagcttgcctgaattcaacctacgaatacatcttcaataattgtcatgaactatactcccgggaataccagaccgatccagctaaaaaaggggaggtcctgcccgaggagcagggaccgtccataaagaacctggacttctggtccaagctgataacccttattgtgtcaattattgaggaagataagaacagttatacaccatgtctgaatcagttcccacaggaacttaacgtcgggaaaatctctgcagaagtaatgtggaacttatttgcccaggatatgaagtatgcaatggaagagcatgacaagcatcgcttatgtaaatcggcagactatatgaacctccatttcaaagtgaagtggttgtacaacgagtatgtcaccgaactccctgccttcaaagatagggtccctgaataccctgcctggttcgaacccttcgtaatccagtggctggatgagaatgaggaggtgagccgggactttctccatggggccttagagcgcgataaaaaggacggtttccaacagacttcggagcatgcgctattctcctgtagtgtggtagacgtgttcagccagctcaatcaatcctttgagattattaagaaactagagtgcccggacccccagatcgtgggccattatatgcgacgattcgcgaaaaccatctcaaacgtgctccttcagtacgctgacattatttcaaaggattttgccagctattgctccaaggagaaagagaaggtcccgtgtattctgatgaataatacccagcagctcagggtacagttagagaaaatgttcgaagccatgggcggaaaagagttggatgcagaggcctcagatatcctgaaagagctccaggtcaagctgaataacgtattagacgaactgagtcgagtatttgccacctcgtttcagcctcacattgaagaatgcgtcaagcagatgggtgacattttgtctcaagtaaagggaacaggcaacgttccagcttccgcttgcagtagtgttgcacaggacgccgataacgttcttcagccgattatggatctgcttgactctaacctgacactctttgccaagatctgtgaaaaaacagtgcttaaacgtgttctcaaggaactgtggaagttggtaatgaatacgatggaaaaaactatagttctgcctcctctgacggatcagactctgcaaggcaacctgctcaggaagcatggcaaggggctggaaaaaggtagggtcaagctaccatctcactctgacggtactcaaatgattttcaatgcggctaaagagctgggacagctatctaagctcaaggatcatatggtgcgagaagaggccaaatcactgaccccaaaacagtgtgctgtggttgaattggcattagacacgatcaagcagtatttccatgcggggggggtggggttgaaaaagacttttttagagaagagccctgacctccagtcccttcggtatgcgctctccctttacactcaggcgactgatctgcttataaagaccttcgttcagactcaatctgcacagggactcggtgtcgaggaccccgttggcgaagtgtcagtccatgtggagctgttcacacatccaggtaccggcgaacacaaggtgactgtaaaagtggtggcagctaatgatctcaagtggcagacgtccgggatctttcggccattcatcgaagtgaacatcatcggacctcaacttagcgacaaaaaacggaaatttgccacaaagtccaagaacaactcctgggcaccaaaatataacgaaagcttccagttcactctctcggccgatgctggccccgagtgctacgagctgcaggtgtgtgttaaggattactgctttgccagggaagaccgaacggtcggtctggcagttttacagctgagggagctggcccagaggggctccgctgcatgctggcttcccttggggaggcgcatccatatggatgataccgggctgactgtactgaggatactctcacaacgttccaatgatgaggtcgctaaagagttcgttaagctgaaaagcgatacccgttcggccgaggagggcggcgcagccccagctccatag

SEQ ID NO: 36329 - DNA, 5376 bp, Artificial Sequence
  derived and/or modified sequence
atgggcggcggcggcacctgcaccatcagcgtgcaggtgcgggtgtgtaccgggggcaacctgcttggcggccgaagaagaccgctgagtccttgtaatgaagaagtgtggggcgaagccccactgcccggcgcacgaccgtttaacgctccgcccgcccggagtgcgcctgctccaagcggagtgcctgggctgagacttcctgccccccatcagcgtcacagtaggcccggtcgcctgcggccgacctgcgagttaggcgacatgtcacttttatgtgtgggtgtgaagaaggccaaattcgacggagcccaggagaaattcaacacgtatgtgacgctcaaggtgcagaatgtgaagagcacaaccattgcggtaagagggtctcagccatcctgggaacaggatttcatgttcgaaatcaataggctggacttagggctgactgtagaggtgtggaataaaggattgatttgggacaccatggtgggtactgtgtggatccccttacggacaattcgtcagtctaacgaagagggcccaggcgagtggctgaccttagatagccaggtcatcatggccgattccgaaatctgcggcactaaggatccaacatttcataggattctgctcgatactaggtttgaattacctctcgatatccctgaggaagaagcccgctactgggcgaagaagctcgagcagctgaatgccatgcgggatcaggacgagtactcctttcaagatgagcaggataagcctctgccggtgccctccaaccagtgttgcaattggaactatttcggatggggcgagcagcacaatgatgatcctgattctgccgtggatgatcgggatagcgattaccgctctgaaacatcaaactcaatccccccgccttattataccacatcccagccaaatgcttcagtgcaccaatattccgttcgccccccaccgctgggatccagggaatcttacagcgatagcatgcatagctatgaggaattttccgaacctcaggctctcagccccacgggatctagccgctatgcatcttctggggaactctcccagggatcgtcccagctaagcgaggacttcgaccccgatgaacactcattacaaggatctgacatggaggacgaacgggacagggatagttatcattcatgccacagttcagtcagctaccataaggactccccccgatgggaccaggatgaggaagaactggaggaggacttagaagatttcctcgaagaggaggagctgcccgaagacgaagaagaactggaggaagaagaggaagaagtcccagatgatttgggttcttatgcacagagagaggacgttgctgtcgccgagcctaaggacttcaagcgcatcagcctgccacctgcggcccccgggaaagaggacaaggccccggtggcaccaactgaagccccagacatggccaaagtagcacccaagcccgctacccctgataaagtgcctgccgcagaacaaatcccagaggccgaacccccaaaggatgaggagagctttaggccacgagaagacgaggagggacaggagggacaagacagcatgtcacgggcaaaagcaaactggcttagggcctttaataaagttaggatgcagctccaggaggctcgcggagagggggagatgtccaagtccttgtggttcaaggggggcccagggggtggtttaattataattgattctatgcctgatatccgaaagagaaaaccaatccctctcgttagcgatctcgcaatgagcctcgtacagtcgcggaaggcaggcatcaccagcgcactagcaagttccaccctgaataatgaggaactcaaaaatcatgtttacaagaagactctgcaggcactgatatatccaatatcttgcaccacccctcataattttgaggtctggacagcaacaactcctacatactgctatgagtgcgaggggctgctgtggggcatcgctaggcaaggaatgcggtgcacggaatgtggcgtgaagtgccatgaaaagtgccaagacctactaaatgcagattgcctccagagggctgccgaaaagtctagcaagcatggagctgaggatagaactcaaaacatcattatggtgctgaaggaccgcatgaagatcagagagaggaataagccggaaatattcgaacttattcaggagatctttgcagtgaccaagaccgctcacactcagcagatgaaagcggttaaacagtctgtcctggacggaaccagtaagtggtccgccaagatcagtattaccgtcgtgtgtgctcaggggctgcaggccaaagacaagaccggctcgagcgacccgtatgtcacagtgcaggtggggaaaacaaagaagagaaccaagaccatttacgggaacctcaatcctgtttgggaagagaacttccattttgaatgtcataattcctctgaccgcatcaaggtgagagtttgggatgaagacgatgacatcaagagcagggttaaacagcggtttaagcgggagagtgatgattttctcggacagacaattatagaggtccggacactaagcggagaaatggatgtctggtataacctcgacaagcggaccgataagtcagctgtatctggagcaatccgcctccacatttccgttgaaatcaagggcgaagagaaggtcgctccgtatcacgttcagtacacatgcctgcatgagaatttatttcatttcgtcacggacgtacagaacaacggcgtcgtgaaaattcccgatgcaaagggggacgatgcttggaaggtttattatgatgaaaccgcccaagagatcgttgatgaattcgctatgaggtatggagtcgaaagcatctatcaggctatgacccattttgcctgtctgtcttccaaatatatgtgtcccggagtccctgccgtaatgtctaccctgctggccaacataaacgcctattatgcacacaccacagcctcgacgaatgtcagtgcgtctgaccgattcgccgcatccaacttcggcaaggagaggtttgtgaagctgctcgatcagttgcacaatagcttgaggattgacctctcaatgtatcgaaacaacttccccgcctctagccccgagaggctgcaggacctgaaatccacggtggacttgcttacgagtatcacgttcttccggatgaaggtccaagagttacagagtcccccacgggccagccaggttgtgaaggattgcgtaaaggcctgcttgaatagtacctacgagtacatttttaataattgccacgaactctatagtcgggaataccagaccgatcccgccaagaagggggaagtgcttccagaggagcaaggtccgtctattaaaaatctagacttctggagcaaattgatcacactaatcgtgtccatcatagaagaggataagaacagctatacgccatgcctgaaccagttccctcaggaacttaatgtgggcaagatatcggccgaggtgatgtggaacctctttgcccaggatatgaaatacgctatggaggaacatgataaacacagactctgtaaatcagctgactacatgaacctgcatttcaaggtgaaatggctgtataacgagtacgtcaccgaactgcccgcattcaaagatagggtgccagaatacccagcttggtttgagccgttcgtcattcagtggcttgacgagaatgaggaggtctcgagggattttctgcatggggccctggagcgagataagaaagacggttttcagcagacctcagagcacgccttattttcctgttccgtcgtggatgtcttttctcaactgaatcagtcctttgaaattatcaagaagctggaatgccccgacccacagattgttggacattacatgagacgttttgcaaagaccatttctaacgtgctgctgcaatatgccgacatcatttccaaggactttgcctcctactgcagcaaggagaaggagaaggtaccttgcatcctcatgaacaacactcagcagctgagagtccagctggagaagatgtttgaggctatgggcgggaaggagctcgatgcagaagcatctgatattctgaaggaactccaggtaaaattgaacaacgtgctggacgagttgtctcgcgtgtttgcaacaagcttccagcctcacatagaggagtgcgtgaagcagatgggcgacatcttaagccaagtcaaggggaccggcaacgtcccggcatccgcttgcagttctgttgctcaggatgccgataatgtgctccagcctataatggatttgctggactctaacctgactctgttcgctaagatttgtgagaagactgtgctaaagcgcgtacttaaagagctatggaaactggtaatgaataccatggaaaagacaattgttcttccccctctgacagatcagactatgatcggcaacctgctgcgcaagcatggtaaaggtctggaaaagggccgagtaaaacttccatctcattccgacgggacccagatgatattcaatgcagctaaagagttggggcagctgtctaaactcaaggaccacatggttcgcgaagaagccaaatctctgactccaaaacaatgcgccgtggtggagctcgccttagatactataaaacagtacttccacgccggcggggtgggtcttaaaaagaccttcctggaaaaaagtccagacctgcagtccctgagatacgcgcttagcctctacactcaggcaaccgacctcctcattaagacctttgtacagacgcagagcgctcaggggttgggcgttgaagaccccgttggagaggtgagtgtgcacgtagagcttttcacacacccaggcacaggagagcacaaagttactgtcaaagtggtcgcagctaacgatcttaaatggcaaaccagcggtatttttagaccctttatcgaggttaacattatagggccccagctgtctgacaagaagcgaaagtttgcaactaagagcaaaaacaacagttgggcccctaagtataatgagtcttttcagttcaccttgagcgctgatgcgggccccgaatgctatgaactgcaggtgtgcgtgaaggactattgtttcgctcgcgaagatcgcacagtgggcttggccgtcttacaattacgggagctagcccaacgcgggtccgccgcgtgttggttgcccctcgggagaagaattcatatggacgatactggtctcaccgtgcttaggatcctgagtcaacggtcaaatgacgaggtcgccaaagagtttgtcaaactgaagtctgacaccagaagcgctgaggagggaggcgccgcccccgctccctag

SEQ ID NO: 36330 - DNA, 5112 bp, Artificial Sequence
  derived and/or modified sequence
atgagcctgctgtgcgtgggcgtgaagaaggccaagttcgacggcgcacaggagaagttcaacacctacgtcacactcaaggttcagaacgttaaaagcacaacaattgcggtgcgagggtctcaaccaagctgggagcaggactttatgttcgagatcaatcgcctggacctgggactcaccgttgaggtttggaacaaagggcttatatgggacacaatggttgggactgtgtggattcccctgcgtaccatacgtcaaagcaatgaagaaggcccaggcgagtggttgaccctcgactcacaagtgataatggccgactccgaaatctgtggcaccaaagatcctacgtttcatcgaatcttactggatacccgtttcgaactcccacttgatattcccgaggaggaggcccgctactgggctaagaaactcgaacagctaaatgccatgagggaccaggatgagtactcatttcaggatgaacaggacaaaccactgcccgtgccatctaatcagtgctgcaactggaactactttggctggggtgagcagcataatgatgacccagactcagcggtagacgacagagactctgactatcgttcagagacaagcaactccattccgcccccttactacaccactagccagcccaatgcgtccgtacatcagtactccgttaggccaccgcccctcgggtcgcgggaatcctacagcgacagcatgcattcttacgaggagtttagcgagccccaagctctctctcctacaggcagtagccgctatgccagtagcggcgaactgtcccaaggaagttcacaactcagcgaagactttgacccggatgagcattccctccagggatcagatatggaggacgagcgagatagagacagctaccactcctgccactcctccgtgagttatcataaagactcccctcgttgggatcaggacgaagaggagctcgaagaagatttggaggatttcctcgaggaggaagagttacctgaagacgaagaggaactggaagaggaggaggaggaagtccccgacgatctgggttcctatgctcagagagaggacgtcgcagtggccgagccaaaggacttcaagcgcattagcctaccccccgccgcaccagggaaggaagacaaagcacccgtggcccctaccgaagctcccgacatggcaaaggttgctcctaagccagcgacacctgacaaagtccccgcggcagaacaaatccctgaggcagagcccccaaaggatgaggagtccttccggccccgggaggatgaggaagggcaggaaggccaagactccatgtctcgcgcgaaggccaattggctgagggcgttcaacaaggtccggatgcaactgcaggaagcgcgcggagaaggcgagatgtctaagagcctgtggttcaagggcggtccaggcggcgggctgattataatcgactccatgcccgatattcgcaagaggaaacccattcccctagtcagcgacctggcaatgtctctggtccagtcccgaaaggccgggatcaccagcgcactcgcaagcagtaccctgaataacgaagagctgaaaaaccacgtatataagaaaaccctgcaggctctgatctatcctataagctgcactacaccgcataattttgaggtgtggactgcaaccactcccacgtactgctatgaatgcgaaggcctgctgtggggcatcgctagacagggcatgcggtgcacagagtgtggagttaaatgtcacgagaagtgtcaggacctcctgaatgcagattgcctgcaaagagctgcagagaagtcctccaagcatggcgctgaggatcggactcagaacattatcatggtgctcaaggacaggatgaaaatccgggagcggaataaacctgagatttttgaactgatccaggagatcttcgcagtcaccaagacagctcatacccagcagatgaaggccgttaagcagtcagtcttggacggcacttcaaaatggtccgccaagatatctatcaccgtcgtctgtgcccaaggcttgcaggctaaagacaaaacgggctcttccgacccttacgtaaccgttcaggtaggaaaaacaaagaaaagaactaagaccatctatggcaacctaaaccccgtatgggaggagaacttccatttcgagtgccataatagttcggatagaattaaagtgcgggtgtgggacgaggacgacgacattaagagccgagtgaaacagagattcaagcgcgagtctgacgactttctggggcagactatcattgaggtgcggactctgtctggagaaatggacgtgtggtataatctggataaaagaacagataagtctgccgtctccggtgcaataaggctgcacatttcagtcgaaattaagggtgaggagaaagtcgctccttatcacgtgcagtacacatgcttgcatgagaatctgtttcactttgtcacagatgttcagaacaatggtgttgtcaagattcccgatgccaagggcgatgatgcctggaaggtgtattatgatgagactgcgcaggaaatcgtggacgaattcgccatgcgatatggggtcgagtccatttaccaggcaatgacccactttgcttgtttatctagcaagtacatgtgcccaggcgtcccagccgtgatgagtactcttctggccaatatcaacgcttattacgcccacaccacggcaagcaccaacgtatccgcctctgatagatttgctgcaagcaacttcgggaaagaacggtttgtgaagcttctggatcagctgcataatagcctccggattgacttatcgatgtaccgaaacaactttcctgccagttctccagaacgcctgcaggatctgaaaagcactgtggacctgttaacaagtatcactttcttccggatgaaagtgcaggagcttcagtctcccccaagagcctctcaggtcgtgaaagattgtgtaaaagcgtgcttgaacagcacctacgagtatatttttaacaactgccacgagctctactccagggaataccagaccgaccctgccaaaaagggggaggttctccccgaggaacagggccctagcatcaagaatctcgatttttggtccaagctcattactctgatcgtcagcatcatcgaggaagacaagaactcttacactccatgtctcaatcagttccctcaggagcttaatgtgggaaagatctccgctgaggtcatgtggaatctgtttgcccaggacatgaagtacgccatggaagagcacgacaagcatcgcctttgtaaatcagccgactacatgaatctgcatttcaaagtgaagtggctgtacaacgaatacgtgacagaattaccagcattcaaagatagggtgcccgagtatccagcctggtttgagccattcgtcatccagtggttagatgaaaatgaagaggttagccgggatttcctacatggcgcattggagagagacaaaaaagatgggtttcaacagacgtctgagcacgcgctgtttagttgctcagtcgtagatgtgtttagtcagctgaatcagtcttttgagattatcaaaaagctcgaatgtcccgacccacagatcgtagggcactatatgcgccgatttgctaagacaatctccaacgtgttgcttcagtatgccgacataattagcaaggactttgctagctactgcagcaaagaaaaggagaaggtaccatgtattttgatgaacaacacacagcagcttcgcgtgcagctcgagaaaatgtttgaggcaatggggggcaaggagctggatgccgaggcgtcggatattctgaaggagttgcaggtaaagctgaataacgtgttggacgaactgtccagggtcttcgccaccagcttccagccccatatcgaggagtgtgtgaaacagatgggggatatactgtcacaggtgaagggaactggcaacgttcctgcctcggcatgttcatccgtcgcgcaggacgctgataatgtgctgcaaccgataatggatctgttggacagcaacctgaccttattcgccaaaatctgtgagaagactgtgttaaagagagtactgaaggagctgtggaagttggttatgaacacaatggagaaaaccatcgtgctgccccccctgaccgaccaaaccatgataggaaatttacttagaaagcatggcaaagggttggaaaagggccgggtgaagctgccctcccactcagacggtacccagatgatctttaacgctgccaaggaattgggacaactcagcaagctgaaagatcatatggtccgcgaggaagccaaatcattgactccgaaacagtgcgcagtggtcgagctcgctctggacaccatcaaacaatactttcatgctggaggtgtgggcttgaagaaaacttttctcgagaagagtcccgacctgcaaagtcttaggtatgcgctgagtctatacacccaagccaccgacctgctgataaagactttcgtgcagacccagtccgcccaagggctaggggtggaggaccccgtcggagaggtttccgtccatgtggagctgttcacacaccctggcactggcgagcataaggttaccgtgaaagtcgtggccgcaaatgaccttaagtggcagacctctggtatattcaggccgttcatcgaagtgaatataatcggaccccaattgtccgacaagaaacgaaaattcgctactaaatcaaaaaacaattcttgggcacctaaatacaacgagtccttccaattcacccttagtgcggacgccggacctgagtgctacgaactgcaagtgtgcgtgaaagattattgttttgccagggaggatcggaccgtgggcctggccgtccttcagctgagggaattagctcagcgcggctctgcggcttgctggctgcccttgggcaggcggattcatatggacgatacaggcctcacggtcctcaggattttatctcagagaagcaacgatgaggtggcaaaagaatttgtcaagttaaagagcgacacacggtctgccgaggagggtggggccgccccagctccatag

SEQ ID NO: 36331 - DNA, 5112 bp, Artificial Sequence
  derived and/or modified sequence
cttagtctgttgtgtgtgtcattaaaaaaagctaaattcgacggcgcacaggagaaatttaatacctacgttactctgaaggttcagaacgtaaaatccacaaccatagccgtgcgcggttcccagccaagctgggagcaagattttatgtttgagatcaatcggctcgacctggggttaacagttgaagtatggaacaagggcctgatttgggatacgatggtgggaaccgtgtggatccctttacgcaccatcagacagtccaacgaggagggcccaggcgaatggctgacactagattcccaggttataatggccgacagcgagatctgcggaactaaggatccgaccttccaccgcatcctactggacacaaggtttgaactcccgctggatatcccagaagaagaggccaggtactgggctaagaaactcgagcagctcaatgctatgcgcgaccaggatgagtactcttttcaggatgagcaggacaaaccactcccagtgccgtctaatcaatgctgcaactggaattactttggctggggcgagcaacataacgacgatccggacagcgcagtggacgaccgggacagcgactacagaagcgagacatcgaactcaattccgccaccttattatacaaccagtcagccaaacgcatccgtccatcagtatagtgtccgcccacctcccctgggctcaagggagtcctactcagatagcatgcacagttatgaggaattctccgagcctcaagctctgtcacccacaggctctagccggtacgccagctctggggagctgtcccaagggtcttcccagctcagtgaggattttgatccagatgagcatagtttacaggggtctgatatggaggatgaacgagatcgggactcttatcatagctgccactcgtccgtgagttatcataaggattctcccaggtgggatcaggacgaagaggagcttgaagaagacctcgaggactttctggaagaggaagagctgcctgaagacgaggaggagcttgaggaggaagaagaggaagtgcctgacgacttaggatcctatgcacagcgagaggacgtcgccgtggccgagcccaaggacttcaagcgcatttccctaccaccggcagccccaggcaaagaggacaaggccccagttgctcctaccgaggcgccagacatggccaaagtcgctcccaagcccgcaaccccagataaggtgcccgctgcagaacagatccctgaagcagagcctcccaaagatgaggaaagcttccggcctcgggaggacgaggaggggcaggagggtcaggacagcatgagtagggctaaggcaaattggttgagggcattcaacaaggtccggatgcagctccaggaggcacgaggagagggggagatgagcaaatctctctggtttaaaggcggacccggtgggggactgatcataattgatagcatgcctgatatccggaagaggaagccgatccctctcgtcagcgacctcgctatgtctttggtgcaatcacggaaagcagggattacgtctgctctcgcctcctctactctgaacaatgaggagctaaagaatcacgtatacaagaaaactcttcaagcacttatttaccctatctcttgcaccacaccacataattttgaggtgtggacggcaacgacccccacctactgttacgagtgtgagggactgttatggggaatcgccagacagggcatgagatgcaccgagtgtggagtgaaatgccatgagaagtgccaggatctcttgaatgccgactgcctacagagggctgccgagaagtccagcaagcacggggctgaagaccgaacccagaatattatcatggtgctgaaggacaggatgaagattagggaacgaaataaacccgagatctttgagttaattcaagaaattttcgcagtcaccaagacagcccatactcaacagatgaaggctgtcaaacagagcgtcctcgatggcacgtcaaagtggagcgccaaaatatctattaccgtggtttgtgctcagggccttcaggcaaaagataagacaggctcatcggacccatacgttactgtgcaggtgggaaaaacaaaaaagcggacgaaaaccatctatggcaacctgaatcccgtctgggaggagaattttcacttcgagtgccacaattcatcggacaggatcaaggtgcgcgtgtgggatgaagacgatgacatcaaatctcgagtgaaacagcgcttcaaacgcgagagcgacgattttctcggtcagacaatcatcgaggtaaggacccttagcggcgagatggatgtgtggtataacttagataagcgcacagataaaagtgcagtgtctggcgcaatccgtttacacatctctgtggaaattaagggagaggaaaaggtggcgccataccacgtgcaatacacctgcctgcatgagaatctgttccatttcgtgaccgatgtgcagaacaacggcgtcgtgaaaattcctgacgccaagggggatgacgcttggaaagtgtactacgacgaaacagcccaggagattgtcgacgagttcgcaatgcgctacggtgttgaatccatataccaggccatgacacactttgcttgtctcagcagcaagtatatgtgcccaggggtgccagccgtgatgtctaccctgctggccaacataaacgcctactacgcccatacgactgcgtcaaccaacgtgtccgcttccgacagattcgcagctagcaattttgggaaggagagatttgtgaaactgctggatcaactgcacaactcgttacgcattgacttgtcgatgtatagaaataatttcccggctagctcccccgaaagactacaggatctgaaaagcacagtcgacctgctgacaagcatcaccttttttcggatgaaggtgcaagagcttcagagcccgccacgggcatctcaagtggtaaaagactgtgtcaaggcctgcctgaactctacatacgagtatatattcaacaactgtcatgagctgtactcccgcgaataccagaccgatcccgctaagaagggcgaagtactgcccgaggagcaggggccaagtatcaagaaccttgatttctggtcaaaactgatcacactgatagtatcgataattgaggaggacaaaaactcctatacgccctgcctgaaccaatttccgcaggaactcaacgtaggcaaaataagcgccgaagtgatgtggaacctgtttgcccaagacatgaagtacgcgatggaagagcacgacaagcacaggttatgtaaatccgccgactacatgaaccttcactttaaggttaaatggttgtataatgagtacgtcacagaactcccagctttcaaagatcgcgtccctgagtatcccgcttggttcgagcccttcgtgattcaatggctcgacgaaaatgaggaggtgagccgggatttcctacacggagccttagagcgtgacaaaaaggatgggtttcaacaaactagcgaacacgccctattcagctgttccgtggtggacgtcttttcccaactgaatcagagctttgaaataataaaaaagctggagtgccccgacccacagattgttggacattatatgcgccgtttcgctaagaccatatccaacgtgctacttcagtacgctgacattatatccaaggacttcgcatcttactgctcaaaggagaaggagaaggtcccctgcatccttatgaataacacgcagcagctgagagtgcagctggagaagatgttcgaggccatgggcggaaaggagcttgatgctgaagccagcgacatcctgaaggagctccaggtgaagcttaacaacgttcttgacgagcttagtagagtgtttgctacgtcctttcagccacacattgaagaatgcgttaaacagatgggagacattctttcgcaggtcaagggcactggcaacgtcccagcatcagcgtgttcctcagttgcccaggacgccgataatgtcctccagccaataatggatttattggattccaatctgacgctgttcgctaagatttgtgagaagactgtactgaaaagagtcctgaaggagctgtggaagctggtgatgaacactatggaaaagactattgttttgcctccactgacggaccagacattgcagggtaaccttctccggaagcacggtaaaggactcgaaaagggtagggtcaaacttccctcacattccgatggaacgcagatgatattcaatgccgctaaagaattggggcagttatccaagcttaaggatcatatggttagagaggaggctaagtcattgacccccaagcagtgtgctgtagtggaactcgctttagacacaattaagcagtatttccacgcgggaggcgtcggcctgaaaaagacctttctggagaaatcacccgacctgcagagcctgcggtatgccctgtctctttatactcaagcaaccgacctgttgattaaaacttttgtccagacacagtcggctcagggactgggggtggaggatcccgtcggggaagtgagtgtgcacgtcgaactgttcacccatcctggcaccggcgagcataaggtcacagtgaaagtggtcgcggcaaatgacctcaagtggcaaacgtcgggaattttccggccttttatagaggtgaatataatcgggccacagctgtcagacaaaaaaaggaagttcgcaaccaagtccaaaaataatagttgggccccaaaatataatgagtcatttcagttcacactcagtgcagatgctgggcctgaatgctacgagctgcaggtgtgcgtgaaagactattgtttcgccagggaggaccgcacagtcggtctggccgtgcttcagctgagagaattggcccaacgaggatccgctgcatgctggttgcctctaggacgtcggatacatatggatgacacaggcctgacagtgttgaggattcttagccagcgatccaatgatgaggtggccaaggaatttgtcaagcttaagagcgatactcgatctgcagaagaagggggtgctgcccctgcgccttar

SEQ ID NO: 36332 - DNA, 5375 bp, Artificial Sequence
  derived and/or modified sequence
atgggtggcggtgggacgtgcactatctctgtgcaggtgagagtctgcacgggcggaaacctccttggaggcagacgaagacccctatcaccctgcaatgaggaagtgtggggcgaagcccctctgccaggcgctcgtccattcaacgctcctcccgctaggagcgctcccgcaccctccggcgtccctggccttcgccttccggcaccccaccaaagacactcccgacccggtcgcttaagaccgacttgtgagctgggagacatgtctctcctttgcgtgggcgttaaaaaagcgaaatttgatggggcacaggagaagtttaacacctacgtcacccttaaagtccagaatgtgaagtctaccaccattgccgtcaggggttcacagcccagctgggagcaggactttatgttcgagattaaccgtctggatttagggttgactgtcgaggtatggaacaaaggcctcatctgggatactatggtaggtacggtctggatccctttaagaacaataaggcaatccaatgaagaggggcctggggagtggctgacgttggacagtcaggtgatcatggctgattcagaaatttgtggtaccaaggatcctacatttcatcggattctgctcgatacacggttcgaacttcccctcgacatccctgaggaggaggcccgatactgggccaaaaaactggaacaattgaacgccatgagggaccaagatgagtacagcttccaagacgaacaggataagcctctgccagtgccaagtaatcagtgttgtaattggaactatttcggctggggcgaacaacacaatgatgatcctgactcagctgtcgacgacagagactcagattaccggtctgagacaagcaactcgattccacccccttactacactacaagccaacccaatgcaagcgtccatcaatactccgtcaggccaccgcctttgggctctcgcgaatcgtatagcgactctatgcacagctacgaagagttctctgagcctcaggctctcagtcccaccggtagctccaggtacgcctctagtggcgagctgagccagggctcctcgcagctctccgaggacttcgatcccgacgagcattcgctgcaaggctctgatatggaggacgaacgggatcgtgacagttaccactcttgccactcaagcgtctcctaccataaggattctcctcgatgggaccaagacgaagaggaactggaggaagacctggaagactttctggaagaagaagagctcccagaagatgaagaagaacttgaggaggaggaggaggaagtcccagacgatctggggagctacgctcaaagagaagatgtcgcggtagcggagcctaaggatttcaaaaggatcagcctcccccctgcggcaccgggaaaggaggacaaggcgcctgtggcacccaccgaagctcccgacatggctaaggtcgcccctaagcctgccactcccgataaagtgcccgcagcagagcagattcctgaggccgagcctcccaaggatgaggagtcattccggcctagagaagatgaagaagggcaggaaggacaggattcaatgtcccgggctaaagcgaactggctccgtgctttcaacaaggtccgcatgcagttgcaggaggctcggggagaaggagaaatgtcaaagtctctctggtttaagggcggtcccggtgggggactgataataatcgactccatgccggatatcaggaagaggaagcccattccccttgtgagtgacttggccatgagcctggtgcagagtaggaaagccggtatcacctcagcactagcgtctagcaccttaaataatgaggagcttaagaatcacgtatacaaaaagaccctacaggcattaatctatcctataagttgcacaaccccgcacaattttgaggtatggactgctaccacccccacctactgctacgaatgtgaagggctcttatggggcattgccagacagggtatgcgctgcacagagtgtggcgtgaagtgccacgaaaaatgccaggatttgctgaacgccgactgtctgcagcgggctgccgaaaaaagttcaaagcacggcgcagaggatcgaacccagaatatcattatggtgctgaaggatcggatgaaaatcagggagcggaacaagccagaaatcttcgagttgattcaagagatttttgcggtcacaaagactgcccacactcagcaaatgaaagctgttaagcagtcagtgctggatggcaccagcaaatggtctgcaaaaatctctattaccgtggtctgtgcgcagggactccaggcaaaggacaagaccggaagttccgatccatatgtaacagtgcaggtcggcaagaccaaaaagagaactaaaacaatttacggaaacctgaaccccgtttgggaggagaactttcactttgagtgtcacaatagctccgatcgtattaaagtgcgcgtgtgggacgaagacgacgacatcaagagccgcgttaaacagaggttcaagcgcgagtctgatgattttctgggtcagaccatcattgaagtacgcactctgagcggcgaaatggatgtgtggtacaatttagacaagcgcacagacaagtcagccgtgagcggagcaatccggctgcacatatcggtggaaattaagggggaagaaaaggtcgctccttatcacgtgcagtacacatgtcttcatgagaatctgttccattttgtaacagatgtacagaacaacggtgtggtcaaaattccggacgctaagggcgacgacgcctggaaagtctactacgacgaaacggcgcaggagatcgtggacgagtttgctatgagatatggcgttgaaagtatctatcaggccatgactcacttcgcctgcctgtcatccaagtacatgtgccctggggtaccggcagttatgagcacgctcctggctaatattaacgcgtattacgctcataccaccgctagcacgaatgtcagcgcctcggataggttcgctgcgtctaacttcggcaaggaaagattcgtgaaactacttgaccagcttcataattctctccgcatcgacttatccatgtatcgcaataacttccctgcctcctctcctgagcgactacaggacctgaagagtaccgtggatctgcttacatccattacattcttccggatgaaggtgcaggaactacagagtcctcccagggcttctcaggttgtgaaagactgcgttaaagcctgtctgaattctacttatgagtacatttttaacaactgccacgaactctacagtagggaataccaaactgatcccgctaagaaaggcgaagtgctccccgaagagcaaggcccatccatcaaaaacttggatttttggagtaaattgatcactttgatcgtgtccatcatcgaagaggacaagaattcctacacaccctgcctgaaccagttccctcaggaacttaatgtggggaaaatctccgcagaggtgatgtggaacctttttgcacaagatatgaagtatgccatggaggagcatgataagcacagattgtgcaaatctgcagactatatgaatcttcacttcaaggttaaatggttatacaacgagtacgttaccgagctaccagccttcaaagacagagtcccagaatacccagcttggttcgagccttttgtcattcagtggttagatgaaaacgaagaggtgtcacgcgactttttgcacggagccctggaacgggataagaaagacggcttccagcagacatctgagcacgcactcttctcctgttcagtcgtcgatgtttttagtcagctaaaccagtcttttgaaataatcaagaagttggagtgcccagatccacaaattgtcggacactacatgaggaggtttgctaagaccatttctaacgtgctgcttcagtatgccgatatcatctccaaggactttgcttcctattgctccaaagagaaggagaaggttccatgtatccttatgaacaacacgcagcaactgagggtccagctcgagaagatgttcgaggccatggggggaaaggagctagatgccgaggcgtctgacatcctaaaagagctgcaggtcaaattaaataatgttctggacgaattatctcgtgtgtttgccacctcatttcaaccccacattgaagagtgcgtcaagcaaatgggtgacatcctctcacaggtcaaaggaacgggaaacgtacccgctagcgcgtgctctagtgtggcccaagatgctgacaacgtgttgcagcctatcatggatcttctggattccaacttaacacttttcgccaaaatttgtgaaaaaaccgttctaaagcgagtccttaaagagttatggaaactcgtgatgaacacgatggaaaagactatcgttctgcctcccctgaccgatcagaccatgattgggaatttgctgcggaagcacgggaaaggattagagaaagggagggtgaaacttccttctcatagcgacggaacccaaatgatattcaatgctgcgaaggagctgggccagctctctaaactcaaggatcatatggttagggaagaggctaaatctttaacgccaaaacagtgcgcagtggtcgagcttgccctcgacacaataaaacaatatttccatgccggtggcgtcggtctgaagaagacttttctggaaaagtctccagatcttcagtcactgcgctacgctctcagcctatacacccaggcaactgacttgttaatcaagacattcgtgcagacccagagtgcccagggtttgggcgtcgaggacccagttggggaagtctctgtgcacgtggagctgttcacacatccagggaccggagaacataaggtcaccgtcaaggttgtcgcagcaaatgatctgaagtggcagaccagcggcatctttcgcccttttattgaggttaatattataggcccacaactttccgacaaaaaaagaaagtttgctactaagtcaaaaaacaattcctgggcgccaaagtataacgagtccttccaattcacactttccgccgacgcgggtccggagtgttacgagctccaggtctgtgtcaaagactactgttttgcacgagaggaccggactgtaggcctggccgtgctgcaactgcgcgagttagcacagagggggtctgccgcttgctggctgccgctcgggagacgaattcacatggatgacacaggtctcacagtcctgcgcatccttagtcagaggagtaatgatgaagtcgccaaagagtttgtcaagcttaaaagtgacacccgaagcgccgaggaaggcggtgctgcccctgccccata

SEQ ID NO: 36333 - DNA, 5111 bp, Artificial Sequence
  derived and/or modified sequence
atgtctcttctgtgcgtgggagtgaagaaagctaagttcgacggcgctcaagaaaaattcaatacctacgtgaccttgaaagtgcagaacgtaaaatccaccacaatcgccgtgcgaggttcgcaacccagctgggagcaggacttcatgtttgagatcaatcggttggacctgggactcactgttgaggtctggaataaggggctgatctgggacactatggtggggaccgtgtggattccgctgcgcaccatccgccagtccaatgaggagggaccgggtgagtggctaaccttggatagtcaggtgatcatggctgattcagagatttgcggtactaaggatccaaccttccatcgcatcctgctggataccagattcgagctccccctggatattcccgaagaggaagcacgctactgggcgaagaagctggagcagcttaatgcgatgagagatcaggatgagtactccttccaagacgaacaggataagcctctgccagtgccatccaaccagtgctgcaactggaactatttcggttggggagagcagcataacgacgaccccgattctgccgtggacgacagagattccgactatcgcagtgaaacttccaatagtatcccaccaccatattacacaacctcccagcctaacgcgagcgttcaccagtattccgtgagaccccctcccttaggctcacgggaatcctactctgactcaatgcacagttacgaagaattctctgagcctcaggcccttagtccaactggatctagcaggtatgcaagcagtggtgaattgtcccaggggagcagtcagctgtccgaggactttgacccggatgaacatagcctgcaagggagcgatatggaggacgagagagatcgagattcctatcattcttgtcactcaagcgtatcttaccacaaggactctcccagatgggatcaggacgaagaagagcttgaggaggatttggaagattttttagaggaagaagagctccctgaggatgaggaggagttggaggaggaggaagaagaggtgcctgatgatcttggcagctatgcccagcgcgaggacgtcgcggtcgccgaacccaaagacttcaaacgtatcagcctgccccctgctgcgcctggaaaagaggataaagccccagtcgcccctaccgaagctcctgacatggcaaaagtggctccgaagcctgccactcccgacaaagtgcccgctgcagaacagattcctgaggcagagccacctaaggacgaggagtcgtttaggcctagggaagatgaggagggccaagaaggtcaggatagtatgagccgggctaaagccaactggctaagggctttcaataaagtacggatgcaactgcaggaagccagaggagaaggggagatgtccaagtctctctggttcaagggtggcccaggcggtgggctcataataattgactccatgccagacatacgcaaacggaagccaatccctcttgtaagcgatctagctatgtctctggtgcaatcccggaaggcaggtatcaccagcgccttagctagttcgacattgaataacgaggaactgaagaaccacgtttacaagaagactttgcaggccctcatctaccctattagctgcacaactccccataacttcgaagtttggactgccaccactcccacttactgctacgaatgcgaggggttactgtggggcattgcccgtcagggcatgaggtgtacggagtgtggtgtaaaatgtcacgagaaatgccaggatctcctgaacgccgattgtctgcagagagcggctgagaagtccagtaagcatggggctgaagacaggactcagaatattatcatggtgttgaaggatcgtatgaaaattcgggagaggaataagcctgaaatctttgagcttatccaggagattttcgccgtcacaaagaccgctcatacccaacagatgaaggcagtaaagcagtccgtgcttgacggcacgtccaaatggagcgctaaaatatcaatcacagtggtttgtgctcaaggcctccaggctaaggataagacaggctcctctgatccgtacgtgaccgtgcaggttgggaagaccaaaaaacgaactaaaaccatttacggcaatctcaaccccgtgtgggaagaaaattttcattttgagtgtcataatagcagtgaccggattaaagttcgggtgtgggacgaagacgacgacattaaatctcgcgtcaaacaacggttcaaacgcgaaagcgatgactttctgggccagaccatcatcgaagtccgaacactctcgggagagatggatgtttggtacaatctagataaacgaacagacaagtccgcggtgtcaggcgctattcgcctgcatatttccgtggagattaaaggggaggagaaggtagctccttatcacgtgcagtacacctgcctgcatgagaatcttttccatttcgtaacggatgttcagaataacggtgtagtgaagatcccagacgccaaaggtgatgacgcttggaaggtctactatgacgagaccgctcaagaaattgtggacgagtttgcgatgcgatacggggtggagagcatctaccaggctatgacccatttcgcttgtctatcttccaaatatatgtgccctggtgtgcctgccgtcatgtcgacactgctcgccaatatcaacgcttattacgcacacaccacagcctcaactaatgttagcgcctctgacagattcgccgcatcaaatttcggaaaggaacggttcgttaagctcttggaccagttgcataatagcttacgcatcgacttatcaatgtatcgtaacaattttcccgcttcctcgcccgagcggcttcaggacctgaagtcgacagtcgatctgctgacatctattaccttttttagaatgaaagtgcaggaactccagtccccaccacgggcttcccaagtggttaaagactgtgtaaaggcttgtttaaactctacgtacgagtatatcttcaataactgccatgagctgtatagtcgggagtaccaaactgatccagccaagaaaggcgaagtactgccggaggagcagggaccgtctataaaaaatcttgacttttggagcaagctgataaccctgatagtttccattattgaagaggataaaaactcatacacaccatgcctgaatcaatttccccaagagttgaacgtaggcaaaatcagtgccgaggtcatgtggaatctattcgcacaggacatgaaatatgctatggaggagcatgataagcacaggctatgtaagagcgccgattacatgaatcttcatttcaaagtgaagtggctgtataacgagtatgtgacagagctacctgctttcaaggacagagtgcccgaatacccagcctggttcgaaccgtttgtcatccagtggctagatgagaacgaagaagtgtctcgggattttttacatggcgctcttgaaagagacaagaaagacggattccagcagacttccgagcacgctcttttcagttgtagtgtcgttgatgttttcagccagctaaatcagagctttgagataattaagaagcttgagtgcccagacccgcaaatcgtcgggcattacatgagaagattcgccaaaactatttctaacgtcctccttcagtatgcggatattatctcaaaagatttcgcaagctattgtagcaaagaaaaagagaaggtgccttgtatcctgatgaacaatacccagcagctcagagttcaactggaaaaaatgttcgaggcaatgggtggaaaggagctggacgcagaggcctcagacattctcaaagaactgcaggtaaaactcaataacgtcctggacgagctgtctcgagtttttgccacttcttttcagccacacattgaggagtgcgttaagcagatgggggacatcctgtcacaagttaaggggacgggcaatgtccccgcttccgcttgttcatccgtcgcccaggacgcagacaacgtacttcagcccatcatggacttgctcgatagcaacctgaccctattcgccaaaatctgtgaaaagactgtcctaaagagggttctgaaagagctgtggaaactggtgatgaataccatggagaaaactatcgtcctcccacctttaaccgatcaaaccatgattggaaacctgttgaggaagcacggaaaaggactggagaaaggacgtgtgaagctgccgagtcattcagatggtacgcagatgattttcaacgccgctaaggaactaggtcagttgtcgaagttgaaagatcatatggttagggaagaggccaagtctttgacccccaagcagtgtgccgttgtggagctggctctggacactatcaaacaatacttccatgctgggggagtcgggctgaagaagacattcctagagaagagccccgatttgcagagcctgaggtatgctctctccctgtatacccaggcaactgacctgctgatcaagaccttcgtgcagacgcagtccgcccaggggctgggagtggaggatcccgtcggagaggtgtcagtccatgtggagctctttactcaccctggcaccggagagcataaggttaccgtgaaagtggtcgccgctaacgatcttaagtggcagacaagtggtatctttcggccattcatcgaggtgaacataattggcccacagctgtccgacaagaaaagaaagttcgcaacaaaatcaaagaataactcctgggcgccaaagtataacgaatcattccagttcaccctttctgccgacgcgggaccagagtgctatgaactgcaggtgtgcgttaaggactactgcttcgccagagaagatcggactgtcggattggcagtgctgcaactgcgggagttagcccagaggggctccgcggcttgttggctacccctgggtaggcgcatccatatggacgacaccggacttacggtgctgaggatcctgtcccagcgctctaacgatgaggtagctaaggagtttgtaaaattgaaatcagacacaaggtctgccgaagaaggcggagccgctcccgctccgta

SEQ ID NO: 36334 - DNA, 9837 bp, Artificial Sequence
  derived and/or modified sequence
ctgtctctcctctgtgtctctctcaaaaaagccaagtttgatggtgcccaagagaaattcaacacgtacgtgaccctgaaagtgcagaatgtcaagagcacgaccatcgcggtgcggggcagccagcccagctgggagcaggatttcatgttcgagattaaccgtctggatttgggactgacggtggaggtgtggaataagggtctcatctgggacacaatggtgggcactgtgtggatcccactgaggaccatccgccagtccaatgaggagggccctggagagtggctgacgctggactcccaggtcatcatggcagacagtgagatctgtggcaccaaggaccccaccttccaccgcatcctcctggacacgcgctttgagctacccttagacattcctgaagaggaggctcgctactgggccaagaagctggagcagctcaatgctatgcgggaccaggatgaatattcgttccaagatgagcaagacaagcctctgcctgtccccagcaaccagtgctgcaactggaattattttggctggggtgagcagcacaacgatgaccccgacagtgcagtggatgatcgtgacagtgactaccgcagtgaaacgagcaacagcatcccgccgccctattatactacgtcacaacccaacgcctcagtccaccaatattctgttcgcccaccacccctgggctcccgggagtcctacagtgactccatgcacagttacgaggagttctctgagccacaagccctcagccccacgggtagcagccgctatgcctcttccggggagctgagccagggaagctctcagctgagcgaggacttcgaccctgacgagcacagcctgcagggctccgacatggaggatgagcgggaccgggactcctaccactcctgccacagctcggtcagctaccacaaagactcgcctcgctgggaccaggatgaggaagagctggaggaggacctggaggacttcctggaggaggaggagctgcctgaagatgaggaggagctggaggaggaggaggaggaggtgcctgacgatttgggcagctatgcccagcgtgaagacgtagctgtggctgagcccaaagacttcaaacgcatcagcctcccgccagctgccccagggaaggaggacaaggccccagtggcacccaccgaggcccccgacatggccaaggtggcccccaagccagccacgcccgacaaggtgcctgcagctgagcagatccctgaggctgagccacccaaggacgaggagagtttcaggccgagagaggatgaggaaggccaggaggggcaggactccatgtccagggccaaggccaactggctgcgtgccttcaacaaggtgcggatgcagctgcaggaggcccggggagaaggagagatgtctaaatccctatggttcaaaggcggcccagggggcggtctcatcatcatcgacagcatgccagacatccgcaagaggaaacctatcccactcgtgagcgacttggccatgtccctggtccagtccaggaaagcgggcatcacctcggccttggcctccagcacgttgaacaacgaggagctgaaaaaccacgtttacaagaagaccctgcaagccttaatctaccccatctcgtgcacgacgccacacaacttcgaagtgtggacggccaccacgcccacctactgctacgagtgcgaggggctgctgtggggcatcgcgaggcagggcatgcgctgcaccgagtgcggtgtcaagtgccacgagaagtgccaggacctgctcaacgccgactgcctgcagcgggctgcggagaagagctccaagcacggggcggaggaccggacacagaacatcatcatggtgctcaaggaccgcatgaagatccgggagcgcaacaagcccgagatcttcgagctcatccaggagatcttcgcggtgaccaagacggcgcacacgcagcagatgaaggcggtcaagcagagcgtgctggacggcacgtccaagtggtccgccaagatcagcatcaccgtggtctgcgcccagggcttgcaggcaaaggacaagacaggatccagtgacccctatgtcaccgtccaggtcgggaagaccaagaaacggacaaaaaccatctatgggaacctcaacccggtgtgggaggagaatttccactttgaatgtcacaattcctccgaccgcatcaaggtgcgcgtctgggacgaggatgacgacatcaaatcccgcgtgaaacagaggttcaagagggaatctgacgatttcctggggcagacgatcattgaggtgcggacgctcagcggcgagatggacgtgtggtacaacctggacaagcgaactgacaaatctgccgtgtcgggtgccatccggctccacatcagtgtggagatcaaaggcgaggagaaggtggccccgtaccatgtccagtacacctgtctgcatgagaacctgttccacttcgtgaccgacgtgcagaacaatggggtcgtgaagatcccagatgccaagggtgacgatgcctggaaggtttactacgatgagacagcccaggagattgtggacgagtttgccatgcgctacggcgtcgagtccatctaccaagccatgacccactttgcctgcctctcctccaagtatatgtgcccaggggtgcctgccgtcatgagcaccctgctcgccaacatcaatgcctactacgcacacaccaccgcctccaccaacgtgtctgcctccgaccgcttcgccgcctccaactttgggaaagagcgcttcgtgaaactcctggaccagctgcataactccctgcggattgacctctccatgtaccggaataacttcccagccagcagcccggagagactccaggacctcaaatccactgtggaccttctcaccagcatcaccttctttcggatgaaggtacaagaactccagagcccgccccgagccagccaggtggtaaaggactgtgtgaaagcctgccttaattctacctacgagtacatcttcaataactgccatgaactgtacagccgggagtaccagacagacccggccaagaagggggaagttctcccagaggaacaggggcccagcatcaagaacctcgacttctggtccaagctgattaccctcatagtgtccatcattgaggaagacaagaattcctacactccctgcctcaaccagtttccccaggagctgaatgtgggtaaaatcagcgctgaagtgatgtggaatctgtttgcccaagacatgaagtacgccatggaggagcacgacaagcatcgtctatgcaagagtgccgactacatgaacctccacttcaaggtgaaatggctctacaatgagtatgtgacggaacttcccgccttcaaggaccgcgtgcctgagtaccctgcatggtttgaacccttcgtcatccagtggctggatgagaatgaggaggtgtcccgggatttcctgcacggtgccctggagcgagacaagaaggatgggttccagcagacctcagagcatgccctattctcctgctccgtggtggatgttttctcccaactcaaccagagctttgaaatcatcaagaaactcgagtgtcccgaccctcagatcgtggggcactacatgaggcgctttgccaagaccatcagtaatgtgctcctccagtatgcagacatcatctccaaggactttgcctcctactgctccaaggagaaggagaaagtgccctgcattctcatgaataacactcaacagctacgagttcagctggagaagatgttcgaagccatgggaggaaaggagctggatgctgaagccagtgacatcctgaaggagcttcaggtgaaactcaataacgtcttggatgagctcagccgggtgtttgctaccagcttccagccgcacattgaagagtgtgtcaaacagatgggtgacatccttagccaggttaagggcacaggcaatgtgccagccagtgcctgcagcagcgtggcccaggacgcggacaatgtgttgcagcccatcatggacctgctggacagcaacctgaccctctttgccaaaatctgtgagaagactgtgctgaagcgagtgctgaaggagctgtggaagctggttatgaacaccatggagaaaaccatcgtcctgccgcccctcactgaccagacgctgcaggggaacctcttgagaaaacatggcaagggattagaaaagggcagggtgaaattgccaagccactcagacggaacccagatgatcttcaatgcagccaaggagctgggtcagctgtccaaactcaaggatcacatggtacgagaagaagccaagagcttgaccccaaagcagtgcgcggttgttgagttggccctggacaccatcaagcaatatttccacgcgggtggcgtgggcctcaagaagaccttcctggagaagagcccggacctgcaatccttgcgctatgccctgtcgctctacacgcaggccaccgacctgctaatcaagacctttgtacagacgcaatcggcccagggcttgggtgtagaagaccctgtgggtgaagtctctgtccatgttgagctgttcactcatccaggaactggggaacacaaggtcacagtgaaagtggtggctgccaatgacctcaagtggcagacttctggcatcttccggccgttcatcgaggtcaacatcattgggccccagctcagcgacaagaaacgcaagtttgcgaccaaatccaagaacaatagctgggctcccaagtacaatgagagcttccagttcacgctgagcgccgacgcgggtcccgagtgctatgagctgcaggtgtgcgtcaaggactactgcttcgcgcgcgaggaccgcacggtggggctggccgtgctgcagctgcgtgagctggcccagcgcgggagcgccgcctgctggctgccgctcggccgccgcatccacatggacgacacgggcctcacggtgctgcgaatcctctcgcagcgcagcaacgacgaggtggccaaggagttcgtgaagctcaagtcggacacgcgctccgccgaggagggcggtgccgcgcctgcgccttagcgcgggcggtcggccgagcggcactgcgcctgcgcggagggcgctgggcggggagggacggggcttgcgccttggtgggacctccccaggggcggggctcggggggctccacgccaagggtgggctgcgcctacgcccttgactcagctttcccttttggggaattaggaatggaggatgccccgccctctcgggaggccacgcccaagggcgcgacgaaggaaggagccacatccccaacttgaggccacgcccccagcacctagggggcattttgagctgggatgggggaaacctcgtccctatggaggaggccacatcccggggctctggtaccgggaggcaccacctcatgtcccctggaaaagccataagatgggacccagacccctgggaccccagaccaattgccaagtatggaaatctcagctccctcgagggggggccctgggcaaggggtagggctctctggagcgcccctctaggtggcctggggactggagggaccaggatgctggttggagggccccggaataccggagtccctttagatatttgtgcaaaaaataaatggggggaggggggaggatgggatttcaaaagcacatgcgcccttgggcgcccaaaccctgggggccgaggggacggctctggttccccacgctgcccctacttccctttgggagtttgcctctccctctcccccaacaaacccagtcctcatatcatagagttcaacacacccatttgacagatggcaaaactgaggcttaaagagctgcttgagacttggccaaggttccaggtgccataccctctgtgcccctcccttaggcctgtgtgccccatggaagggtgggctgagatcgggatgacctgacacagctccctattgctgctaattccccctcggcctcctccaaggggtgggaattccaggccaagacccctacttcgcctttccttctccggctgccaagcaggacctttgccctcagccctttctcctgggatctccatgggggatgccatgagggcctcccaccacaaaagagaatttgggatcccctggtcccaggtttctccatcccttcttccttttccagaattttccaaataggaaagaacagaaggagaccagaaactctaggggggagaaagagaatgagagaaagagaatgagagagagagaaacacaaacacagtgacacagtgagagcttagtctccaagagcctattcattgattcaaacacccaagccacaggatacctcagatggccctcttgccagctggaagctctttctccaatgagcaaagttacagtgacctggctggagttacctggtgcacataggaccttaggggaaagttcagcgtggactacacttgctctgggatctgcttttccacatgtgtgtatggcacgcctttttctgctggattgggaaggacaagattttgctgtgctagggagaaatgaaaacggggtgagctgagtagctgggtttctggaggatagaacatcagatggggaggctttccgaggtgaagaatgagagggaaccacttactagagagaaaagagctccaggcctggggaacagcacgtgcgaaggccaggagagaagaactgttgaaacaacgagaagggtggcacggctggagctgagccagcaagggggatcgtgaggagccttggggttggggagatctgcagaagcatcagaccaggcagggcctcgtacgcagtcctgaggagttttacttttattctaagacagttggggagctccaggagctgttttaagttggggagagactggattccagcctgcaaaagctgttttgtgaagactaaaaccagtgaggagaggtggaggtgctttggggacactgaaatggattcttggaaagattctgaaggctgtgttgaaaagacacctatagctgtggggacatgactataatcccagcatttggggagaccgaggctggcagatcacttaaggtcaggagtttgagaccagcctggccaacatggcgaaaccccatctctgctaaaaatacaaaaattagctgggtgcagtggtgcatgcctgtagtcccagctactcaggagactgaggcgggagaattgtttgaaccctggaggcagaggttgtagtgagtcgtgatcacacaactgcactccagcctgggcaacagaacaatactccattccctcccctctaccccaccaaaaaaaaaaaaaaatcctgcccttagatgagctctagggctgctgagtacagttgtcccagttgcacagtgcccaagggtttggcattgctaagaaggccacgtgcaaatcctagatattgagtgttgtatgtttgtgacgttggtttcccgacatgtgaatggcccaagtgtctggaagaagtggcgccactttctaatttgcttggagatgttgcatgtcccttaaattcagacaggtgcaggtaactggaggttctgaaccaaaggttaaaatgcaaattctcatacagggttgggaagttgtagccagggataagcttatgtgactgttatatggactgaggagcagatgtgaatttcgaaccatgacatggctgagggtaggggtcgggtggatggatgattcagggttgtaacccatagagcccaaaggggaagtgatctgtgacctggggtgagggtgatctggaagatttttggatggctggaaagaaatggggaagtcgagctgcctgagagagccaagttatttcccaaaagattccttaggagtctttctgttcaagacctccgtgtgtgtgtgtgtgtgtttagggttccccagcaatggcccaggcatgtgaaggaaacaagcttcttcagggaatatttgttgaatgagttttcctgactcccaggctagaactgtttttgcaatttccaccctcttttctttcccccagagaactcctattcgtccttcaaaacccatcacggaaacccctcttggagaaaaccctccttccttcccctcaggactttcccagccaccgtctctcctccagtccagcctgatgccatgggactgggggtttctctgtccagctctgtttctcccagactggggtctgaggactctcaggacccccaactttacctagcacaggctgggcacaagtgggtgacagggagtctacgcctagtggaattatgtattggggcagggtcagtgtgagaatacacatccgcatgcatgtctgtccatgtctgtccgtaccaaccttccccttccacacggacctgggcacataggaggtgtctgagcctgacacatgggacagagagtggacatggctgagacacggacagagaaaagacaaggagtccagggggctgaaagccttttgaaatcaggaagttcctgtattggcagaacaaagcccagagaggagcagggctttcctcaacgccacccagcaagtggacacagagcccggccttggatgacacctccagggttctgaaccctggacctcgctttatgcaaggagctggccccacatttccatgaatcggggaaacagcacaagaaggttggcctgtggcagggcaagggttaaaggggtgacattgagggatgcctcagagtcaaagtcccctgaccaagaggaatagagtagaaaacacagagacagagggtgagatcacgccccgatgaggacggagagagacagagatggagagagacatagaggtggaaatatacagagaaagataaatgcagagaccaaggcagggagtgtcgggggaagtaaagagggtgtcctgaagaaagaaggatctgttcactcttaccagtctgtcctcgaatgatttgcataaaatgaggaggtgcctgtccacacccccaattcctctctcaggccccagagcctgagacctcaccatgcccccatcagagatgcaaaaaactaaacacccaactagaaatccttgggacctctctcggctgggatctcagagcctttctgtcccctacccctaccccatgtgctgtcgattttgcagatggggacaacctggggcctcccggaactctgccaccctggggaagttgggggagggccttagtcccggatcacaaccccgtctgctccccagaatcctttcctaagaatcgttgaggaccaaagttgtctttgctgacacgtgttgcttttctctttgccttttattgtttcagagaaaaatcaagttgactgtgtcaagtaacaccccaccccttacccccgtccagccatagtggctctctggagacacaggtcacaggcggagggtcccctgatcatccccaaccacacagccagggggacttgacccctgtccacccctgtctcgtgctccctcagacccccacaaaccggccaagcagtccggggaggcttcccctccacacaactcttagcatgtgattgcagatgtgaaatcaaaacgttgtttgttttttgttttgttttgattctaccccgtcggtccagtgtctgcacagacgccttcatttctctgtaaatatgtgacttggaacaaatgtttaacacaaacgagaagtggtcatgaatgcatggtgttgagatgttttgcactattctgactttttggtctctgtaaaaatattttattaacagcagacattaaaaaaagaaaaaccacacacagccttgg

SEQ ID NO: 36335 - DNA, 10101 bp, Artificial Sequence
  derived and/or modified sequence
atgggtggcgggggcacgtgcaccatttcagtgcaggtgagggtctgcacaggaggaaacctgcttgggggccgccgtcgccccttgtccccctgcaacgaggaggtgtggggcgaggcgccccttcccggagccaggccctttaacgcccccccagcccgcagcgcccccgccccatcaggcgtccctgggctccgcctgcccgccccgcatcagcgccacagccggcccggccgcctccggcccacctgcgagctcggagacatgtctctgctttgcgttggagtcaaaaaagccaagtttgatggtgcccaagagaaattcaacacgtacgtgaccctgaaagtgcagaatgtcaagagcacgaccatcgcggtgcggggcagccagcccagctgggagcaggatttcatgttcgagattaaccgtctggatttgggactgacggtggaggtgtggaataagggtctcatctgggacacaatggtgggcactgtgtggatcccactgaggaccatccgccagtccaatgaggagggccctggagagtggctgacgctggactcccaggtcatcatggcagacagtgagatctgtggcaccaaggaccccaccttccaccgcatcctcctggacacgcgctttgagctacccttagacattcctgaagaggaggctcgctactgggccaagaagctggagcagctcaatgctatgcgggaccaggatgaatattcgttccaagatgagcaagacaagcctctgcctgtccccagcaaccagtgctgcaactggaattattttggctggggtgagcagcacaacgatgaccccgacagtgcagtggatgatcgtgacagtgactaccgcagtgaaacgagcaacagcatcccgccgccctattatactacgtcacaacccaacgcctcagtccaccaatattctgttcgcccaccacccctgggctcccgggagtcctacagtgactccatgcacagttacgaggagttctctgagccacaagccctcagccccacgggtagcagccgctatgcctcttccggggagctgagccagggaagctctcagctgagcgaggacttcgaccctgacgagcacagcctgcagggctccgacatggaggatgagcgggaccgggactcctaccactcctgccacagctcggtcagctaccacaaagactcgcctcgctgggaccaggatgaggaagagctggaggaggacctggaggacttcctggaggaggaggagctgcctgaagatgaggaggagctggaggaggaggaggaggaggtgcctgacgatttgggcagctatgcccagcgtgaagacgtagctgtggctgagcccaaagacttcaaacgcatcagcctcccgccagctgccccagggaaggaggacaaggccccagtggcacccaccgaggcccccgacatggccaaggtggcccccaagccagccacgcccgacaaggtgcctgcagctgagcagatccctgaggctgagccacccaaggacgaggagagtttcaggccgagagaggatgaggaaggccaggaggggcaggactccatgtccagggccaaggccaactggctgcgtgccttcaacaaggtgcggatgcagctgcaggaggcccggggagaaggagagatgtctaaatccctatggttcaaaggcggcccagggggcggtctcatcatcatcgacagcatgccagacatccgcaagaggaaacctatcccactcgtgagcgacttggccatgtccctggtccagtccaggaaagcgggcatcacctcggccttggcctccagcacgttgaacaacgaggagctgaaaaaccacgtttacaagaagaccctgcaagccttaatctaccccatctcgtgcacgacgccacacaacttcgaagtgtggacggccaccacgcccacctactgctacgagtgcgaggggctgctgtggggcatcgcgaggcagggcatgcgctgcaccgagtgcggtgtcaagtgccacgagaagtgccaggacctgctcaacgccgactgcctgcagcgggctgcggagaagagctccaagcacggggcggaggaccggacacagaacatcatcatggtgctcaaggaccgcatgaagatccgggagcgcaacaagcccgagatcttcgagctcatccaggagatcttcgcggtgaccaagacggcgcacacgcagcagatgaaggcggtcaagcagagcgtgctggacggcacgtccaagtggtccgccaagatcagcatcaccgtggtctgcgcccagggcttgcaggcaaaggacaagacaggatccagtgacccctatgtcaccgtccaggtcgggaagaccaagaaacggacaaaaaccatctatgggaacctcaacccggtgtgggaggagaatttccactttgaatgtcacaattcctccgaccgcatcaaggtgcgcgtctgggacgaggatgacgacatcaaatcccgcgtgaaacagaggttcaagagggaatctgacgatttcctggggcagacgatcattgaggtgcggacgctcagcggcgagatggacgtgtggtacaacctggacaagcgaactgacaaatctgccgtgtcgggtgccatccggctccacatcagtgtggagatcaaaggcgaggagaaggtggccccgtaccatgtccagtacacctgtctgcatgagaacctgttccacttcgtgaccgacgtgcagaacaatggggtcgtgaagatcccagatgccaagggtgacgatgcctggaaggtttactacgatgagacagcccaggagattgtggacgagtttgccatgcgctacggcgtcgagtccatctaccaagccatgacccactttgcctgcctctcctccaagtatatgtgcccaggggtgcctgccgtcatgagcaccctgctcgccaacatcaatgcctactacgcacacaccaccgcctccaccaacgtgtctgcctccgaccgcttcgccgcctccaactttgggaaagagcgcttcgtgaaactcctggaccagctgcataactccctgcggattgacctctccatgtaccggaataacttcccagccagcagcccggagagactccaggacctcaaatccactgtggaccttctcaccagcatcaccttctttcggatgaaggtacaagaactccagagcccgccccgagccagccaggtggtaaaggactgtgtgaaagcctgccttaattctacctacgagtacatcttcaataactgccatgaactgtacagccgggagtaccagacagacccggccaagaagggggaagttctcccagaggaacaggggcccagcatcaagaacctcgacttctggtccaagctgattaccctcatagtgtccatcattgaggaagacaagaattcctacactccctgcctcaaccagtttccccaggagctgaatgtgggtaaaatcagcgctgaagtgatgtggaatctgtttgcccaagacatgaagtacgccatggaggagcacgacaagcatcgtctatgcaagagtgccgactacatgaacctccacttcaaggtgaaatggctctacaatgagtatgtgacggaacttcccgccttcaaggaccgcgtgcctgagtaccctgcatggtttgaacccttcgtcatccagtggctggatgagaatgaggaggtgtcccgggatttcctgcacggtgccctggagcgagacaagaaggatgggttccagcagacctcagagcatgccctattctcctgctccgtggtggatgttttctcccaactcaaccagagctttgaaatcatcaagaaactcgagtgtcccgaccctcagatcgtggggcactacatgaggcgctttgccaagaccatcagtaatgtgctcctccagtatgcagacatcatctccaaggactttgcctcctactgctccaaggagaaggagaaagtgccctgcattctcatgaataacactcaacagctacgagttcagctggagaagatgttcgaagccatgggaggaaaggagctggatgctgaagccagtgacatcctgaaggagcttcaggtgaaactcaataacgtcttggatgagctcagccgggtgtttgctaccagcttccagccgcacattgaagagtgtgtcaaacagatgggtgacatccttagccaggttaagggcacaggcaatgtgccagccagtgcctgcagcagcgtggcccaggacgcggacaatgtgttgcagcccatcatggacctgctggacagcaacctgaccctctttgccaaaatctgtgagaagactgtgctgaagcgagtgctgaaggagctgtggaagctggttatgaacaccatggagaaaaccatcgtcctgccgcccctcactgaccagacgatgatcgggaacctcttgagaaaacatggcaagggattagaaaagggcagggtgaaattgccaagccactcagacggaacccagatgatcttcaatgcagccaaggagctgggtcagctgtccaaactcaaggatcacatggtacgagaagaagccaagagcttgaccccaaagcagtgcgcggttgttgagttggccctggacaccatcaagcaatatttccacgcgggtggcgtgggcctcaagaagaccttcctggagaagagcccggacctgcaatccttgcgctatgccctgtcgctctacacgcaggccaccgacctgctaatcaagacctttgtacagacgcaatcggcccagggcttgggtgtagaagaccctgtgggtgaagtctctgtccatgttgagctgttcactcatccaggaactggggaacacaaggtcacagtgaaagtggtggctgccaatgacctcaagtggcagacttctggcatcttccggccgttcatcgaggtcaacatcattgggccccagctcagcgacaagaaacgcaagtttgcgaccaaatccaagaacaatagctgggctcccaagtacaatgagagcttccagttcacgctgagcgccgacgcgggtcccgagtgctatgagctgcaggtgtgcgtcaaggactactgcttcgcgcgcgaggaccgcacggtggggctggccgtgctgcagctgcgtgagctggcccagcgcgggagcgccgcctgctggctgccgctcggccgccgcatccacatggacgacacgggcctcacggtgctgcgaatcctctcgcagcgcagcaacgacgaggtggccaaggagttcgtgaagctcaagtcggacacgcgctccgccgaggagggcggtgccgcgcctgcgccttagcgcgggcggtcggccgagcggcactgcgcctgcgcggagggcgctgggcggggagggacggggcttgcgccttggtgggacctccccaggggcggggctcggggggctccacgccaagggtgggctgcgcctacgcccttgactcagctttcccttttggggaattaggaatggaggatgccccgccctctcgggaggccacgcccaagggcgcgacgaaggaaggagccacatccccaacttgaggccacgcccccagcacctagggggcattttgagctgggatgggggaaacctcgtccctatggaggaggccacatcccggggctctggtaccgggaggcaccacctcatgtcccctggaaaagccataagatgggacccagacccctgggaccccagaccaattgccaagtatggaaatctcagctccctcgagggggggccctgggcaaggggtagggctctctggagcgcccctctaggtggcctggggactggagggaccaggatgctggttggagggccccggaataccggagtccctttagatatttgtgcaaaaaataaatggggggaggggggaggatgggatttcaaaagcacatgcgcccttgggcgcccaaaccctgggggccgaggggacggctctggttccccacgctgcccctacttccctttgggagtttgcctctccctctcccccaacaaacccagtcctcatatcatagagttcaacacacccatttgacagatggcaaaactgaggcttaaagagctgcttgagacttggccaaggttccaggtgccataccctctgtgcccctcccttaggcctgtgtgccccatggaagggtgggctgagatcgggatgacctgacacagctccctattgctgctaattccccctcggcctcctccaaggggtgggaattccaggccaagacccctacttcgcctttccttctccggctgccaagcaggacctttgccctcagccctttctcctgggatctccatgggggatgccatgagggcctcccaccacaaaagagaatttgggatcccctggtcccaggtttctccatcccttcttccttttccagaattttccaaataggaaagaacagaaggagaccagaaactctaggggggagaaagagaatgagagaaagagaatgagagagagagaaacacaaacacagtgacacagtgagagcttagtctccaagagcctattcattgattcaaacacccaagccacaggatacctcagatggccctcttgccagctggaagctctttctccaatgagcaaagttacagtgacctggctggagttacctggtgcacataggaccttaggggaaagttcagcgtggactacacttgctctgggatctgcttttccacatgtgtgtatggcacgcctttttctgctggattgggaaggacaagattttgctgtgctagggagaaatgaaaacggggtgagctgagtagctgggtttctggaggatagaacatcagatggggaggctttccgaggtgaagaatgagagggaaccacttactagagagaaaagagctccaggcctggggaacagcacgtgcgaaggccaggagagaagaactgttgaaacaacgagaagggtggcacggctggagctgagccagcaagggggatcgtgaggagccttggggttggggagatctgcagaagcatcagaccaggcagggcctcgtacgcagtcctgaggagttttacttttattctaagacagttggggagctccaggagctgttttaagttggggagagactggattccagcctgcaaaagctgttttgtgaagactaaaaccagtgaggagaggtggaggtgctttggggacactgaaatggattcttggaaagattctgaaggctgtgttgaaaagacacctatagctgtggggacatgactataatcccagcatttggggagaccgaggctggcagatcacttaaggtcaggagtttgagaccagcctggccaacatggcgaaaccccatctctgctaaaaatacaaaaattagctgggtgcagtggtgcatgcctgtagtcccagctactcaggagactgaggcgggagaattgtttgaaccctggaggcagaggttgtagtgagtcgtgatcacacaactgcactccagcctgggcaacagaacaatactccattccctcccctctaccccaccaaaaaaaaaaaaaaatcctgcccttagatgagctctagggctgctgagtacagttgtcccagttgcacagtgcccaagggtttggcattgctaagaaggccacgtgcaaatcctagatattgagtgttgtatgtttgtgacgttggtttcccgacatgtgaatggcccaagtgtctggaagaagtggcgccactttctaatttgcttggagatgttgcatgtcccttaaattcagacaggtgcaggtaactggaggttctgaaccaaaggttaaaatgcaaattctcatacagggttgggaagttgtagccagggataagcttatgtgactgttatatggactgaggagcagatgtgaatttcgaaccatgacatggctgagggtaggggtcgggtggatggatgattcagggttgtaacccatagagcccaaaggggaagtgatctgtgacctggggtgagggtgatctggaagatttttggatggctggaaagaaatggggaagtcgagctgcctgagagagccaagttatttcccaaaagattccttaggagtctttctgttcaagacctccgtgtgtgtgtgtgtgtgtttagggttccccagcaatggcccaggcatgtgaaggaaacaagcttcttcagggaatatttgttgaatgagttttcctgactcccaggctagaactgtttttgcaatttccaccctcttttctttcccccagagaactcctattcgtccttcaaaacccatcacggaaacccctcttggagaaaaccctccttccttcccctcaggactttcccagccaccgtctctcctccagtccagcctgatgccatgggactgggggtttctctgtccagctctgtttctcccagactggggtctgaggactctcaggacccccaactttacctagcacaggctgggcacaagtgggtgacagggagtctacgcctagtggaattatgtattggggcagggtcagtgtgagaatacacatccgcatgcatgtctgtccatgtctgtccgtaccaaccttccccttccacacggacctgggcacataggaggtgtctgagcctgacacatgggacagagagtggacatggctgagacacggacagagaaaagacaaggagtccagggggctgaaagccttttgaaatcaggaagttcctgtattggcagaacaaagcccagagaggagcagggctttcctcaacgccacccagcaagtggacacagagcccggccttggatgacacctccagggttctgaaccctggacctcgctttatgcaaggagctggccccacatttccatgaatcggggaaacagcacaagaaggttggcctgtggcagggcaagggttaaaggggtgacattgagggatgcctcagagtcaaagtcccctgaccaagaggaatagagtagaaaacacagagacagagggtgagatcacgccccgatgaggacggagagagacagagatggagagagacatagaggtggaaatatacagagaaagataaatgcagagaccaaggcagggagtgtcgggggaagtaaagagggtgtcctgaagaaagaaggatctgttcactcttaccagtctgtcctcgaatgatttgcataaaatgaggaggtgcctgtccacacccccaattcctctctcaggccccagagcctgagacctcaccatgcccccatcagagatgcaaaaaactaaacacccaactagaaatccttgggacctctctcggctgggatctcagagcctttctgtcccctacccctaccccatgtgctgtcgattttgcagatggggacaacctggggcctcccggaactctgccaccctggggaagttgggggagggccttagtcccggatcacaaccccgtctgctccccagaatcctttcctaagaatcgttgaggaccaaagttgtctttgctgacacgtgttgcttttctctttgccttttattgtttcagagaaaaatcaagttgactgtgtcaagtaacaccccaccccttacccccgtccagccatagtggctctctggagacacaggtcacaggcggagggtcccctgatcatccccaaccacacagccagggggacttgacccctgtccacccctgtctcgtgctccctcagacccccacaaaccggccaagcagtccggggaggcttcccctccacacaactcttagcatgtgattgcagatgtgaaatcaaaacgttgtttgttttttgttttgttttgattctaccccgtcggtccagtgtctgcacagacgccttcatttctctgtaaatatgtgacttggaacaaatgtttaacacaaacgagaagtggtcatgaatgcatggtgttgagatgttttgcactattctgactttttggtctctgtaaaaatattttattaacagcagacattaaaaaaagaaaaaccacacacagccttgg

SEQ ID NO: 36336 - DNA, 9838 bp, Artificial Sequence
  derived and/or modified sequence
atgtctctgctttgcgttggagtcaaaaaagccaagtttgatggtgcccaagagaaattcaacacgtacgtgaccctgaaagtgcagaatgtcaagagcacgaccatcgcggtgcggggcagccagcccagctgggagcaggatttcatgttcgagattaaccgtctggatttgggactgacggtggaggtgtggaataagggtctcatctgggacacaatggtgggcactgtgtggatcccactgaggaccatccgccagtccaatgaggagggccctggagagtggctgacgctggactcccaggtcatcatggcagacagtgagatctgtggcaccaaggaccccaccttccaccgcatcctcctggacacgcgctttgagctacccttagacattcctgaagaggaggctcgctactgggccaagaagctggagcagctcaatgctatgcgggaccaggatgaatattcgttccaagatgagcaagacaagcctctgcctgtccccagcaaccagtgctgcaactggaattattttggctggggtgagcagcacaacgatgaccccgacagtgcagtggatgatcgtgacagtgactaccgcagtgaaacgagcaacagcatcccgccgccctattatactacgtcacaacccaacgcctcagtccaccaatattctgttcgcccaccacccctgggctcccgggagtcctacagtgactccatgcacagttacgaggagttctctgagccacaagccctcagccccacgggtagcagccgctatgcctcttccggggagctgagccagggaagctctcagctgagcgaggacttcgaccctgacgagcacagcctgcagggctccgacatggaggatgagcgggaccgggactcctaccactcctgccacagctcggtcagctaccacaaagactcgcctcgctgggaccaggatgaggaagagctggaggaggacctggaggacttcctggaggaggaggagctgcctgaagatgaggaggagctggaggaggaggaggaggaggtgcctgacgatttgggcagctatgcccagcgtgaagacgtagctgtggctgagcccaaagacttcaaacgcatcagcctcccgccagctgccccagggaaggaggacaaggccccagtggcacccaccgaggcccccgacatggccaaggtggcccccaagccagccacgcccgacaaggtgcctgcagctgagcagatccctgaggctgagccacccaaggacgaggagagtttcaggccgagagaggatgaggaaggccaggaggggcaggactccatgtccagggccaaggccaactggctgcgtgccttcaacaaggtgcggatgcagctgcaggaggcccggggagaaggagagatgtctaaatccctatggttcaaaggcggcccagggggcggtctcatcatcatcgacagcatgccagacatccgcaagaggaaacctatcccactcgtgagcgacttggccatgtccctggtccagtccaggaaagcgggcatcacctcggccttggcctccagcacgttgaacaacgaggagctgaaaaaccacgtttacaagaagaccctgcaagccttaatctaccccatctcgtgcacgacgccacacaacttcgaagtgtggacggccaccacgcccacctactgctacgagtgcgaggggctgctgtggggcatcgcgaggcagggcatgcgctgcaccgagtgcggtgtcaagtgccacgagaagtgccaggacctgctcaacgccgactgcctgcagcgggctgcggagaagagctccaagcacggggcggaggaccggacacagaacatcatcatggtgctcaaggaccgcatgaagatccgggagcgcaacaagcccgagatcttcgagctcatccaggagatcttcgcggtgaccaagacggcgcacacgcagcagatgaaggcggtcaagcagagcgtgctggacggcacgtccaagtggtccgccaagatcagcatcaccgtggtctgcgcccagggcttgcaggcaaaggacaagacaggatccagtgacccctatgtcaccgtccaggtcgggaagaccaagaaacggacaaaaaccatctatgggaacctcaacccggtgtgggaggagaatttccactttgaatgtcacaattcctccgaccgcatcaaggtgcgcgtctgggacgaggatgacgacatcaaatcccgcgtgaaacagaggttcaagagggaatctgacgatttcctggggcagacgatcattgaggtgcggacgctcagcggcgagatggacgtgtggtacaacctggacaagcgaactgacaaatctgccgtgtcgggtgccatccggctccacatcagtgtggagatcaaaggcgaggagaaggtggccccgtaccatgtccagtacacctgtctgcatgagaacctgttccacttcgtgaccgacgtgcagaacaatggggtcgtgaagatcccagatgccaagggtgacgatgcctggaaggtttactacgatgagacagcccaggagattgtggacgagtttgccatgcgctacggcgtcgagtccatctaccaagccatgacccactttgcctgcctctcctccaagtatatgtgcccaggggtgcctgccgtcatgagcaccctgctcgccaacatcaatgcctactacgcacacaccaccgcctccaccaacgtgtctgcctccgaccgcttcgccgcctccaactttgggaaagagcgcttcgtgaaactcctggaccagctgcataactccctgcggattgacctctccatgtaccggaataacttcccagccagcagcccggagagactccaggacctcaaatccactgtggaccttctcaccagcatcaccttctttcggatgaaggtacaagaactccagagcccgccccgagccagccaggtggtaaaggactgtgtgaaagcctgccttaattctacctacgagtacatcttcaataactgccatgaactgtacagccgggagtaccagacagacccggccaagaagggggaagttctcccagaggaacaggggcccagcatcaagaacctcgacttctggtccaagctgattaccctcatagtgtccatcattgaggaagacaagaattcctacactccctgcctcaaccagtttccccaggagctgaatgtgggtaaaatcagcgctgaagtgatgtggaatctgtttgcccaagacatgaagtacgccatggaggagcacgacaagcatcgtctatgcaagagtgccgactacatgaacctccacttcaaggtgaaatggctctacaatgagtatgtgacggaacttcccgccttcaaggaccgcgtgcctgagtaccctgcatggtttgaacccttcgtcatccagtggctggatgagaatgaggaggtgtcccgggatttcctgcacggtgccctggagcgagacaagaaggatgggttccagcagacctcagagcatgccctattctcctgctccgtggtggatgttttctcccaactcaaccagagctttgaaatcatcaagaaactcgagtgtcccgaccctcagatcgtggggcactacatgaggcgctttgccaagaccatcagtaatgtgctcctccagtatgcagacatcatctccaaggactttgcctcctactgctccaaggagaaggagaaagtgccctgcattctcatgaataacactcaacagctacgagttcagctggagaagatgttcgaagccatgggaggaaaggagctggatgctgaagccagtgacatcctgaaggagcttcaggtgaaactcaataacgtcttggatgagctcagccgggtgtttgctaccagcttccagccgcacattgaagagtgtgtcaaacagatgggtgacatccttagccaggttaagggcacaggcaatgtgccagccagtgcctgcagcagcgtggcccaggacgcggacaatgtgttgcagcccatcatggacctgctggacagcaacctgaccctctttgccaaaatctgtgagaagactgtgctgaagcgagtgctgaaggagctgtggaagctggttatgaacaccatggagaaaaccatcgtcctgccgcccctcactgaccagacgatgatcgggaacctcttgagaaaacatggcaagggattagaaaagggcagggtgaaattgccaagccactcagacggaacccagatgatcttcaatgcagccaaggagctgggtcagctgtccaaactcaaggatcacatggtacgagaagaagccaagagcttgaccccaaagcagtgcgcggttgttgagttggccctggacaccatcaagcaatatttccacgcgggtggcgtgggcctcaagaagaccttcctggagaagagcccggacctgcaatccttgcgctatgccctgtcgctctacacgcaggccaccgacctgctaatcaagacctttgtacagacgcaatcggcccagggcttgggtgtagaagaccctgtgggtgaagtctctgtccatgttgagctgttcactcatccaggaactggggaacacaaggtcacagtgaaagtggtggctgccaatgacctcaagtggcagacttctggcatcttccggccgttcatcgaggtcaacatcattgggccccagctcagcgacaagaaacgcaagtttgcgaccaaatccaagaacaatagctgggctcccaagtacaatgagagcttccagttcacgctgagcgccgacgcgggtcccgagtgctatgagctgcaggtgtgcgtcaaggactactgcttcgcgcgcgaggaccgcacggtggggctggccgtgctgcagctgcgtgagctggcccagcgcgggagcgccgcctgctggctgccgctcggccgccgcatccacatggacgacacgggcctcacggtgctgcgaatcctctcgcagcgcagcaacgacgaggtggccaaggagttcgtgaagctcaagtcggacacgcgctccgccgaggagggcggtgccgcgcctgcgccttagcgcgggcggtcggccgagcggcactgcgcctgcgcggagggcgctgggcggggagggacggggcttgcgccttggtgggacctccccaggggcggggctcggggggctccacgccaagggtgggctgcgcctacgcccttgactcagctttcccttttggggaattaggaatggaggatgccccgccctctcgggaggccacgcccaagggcgcgacgaaggaaggagccacatccccaacttgaggccacgcccccagcacctagggggcattttgagctgggatgggggaaacctcgtccctatggaggaggccacatcccggggctctggtaccgggaggcaccacctcatgtcccctggaaaagccataagatgggacccagacccctgggaccccagaccaattgccaagtatggaaatctcagctccctcgagggggggccctgggcaaggggtagggctctctggagcgcccctctaggtggcctggggactggagggaccaggatgctggttggagggccccggaataccggagtccctttagatatttgtgcaaaaaataaatggggggaggggggaggatgggatttcaaaagcacatgcgcccttgggcgcccaaaccctgggggccgaggggacggctctggttccccacgctgcccctacttccctttgggagtttgcctctccctctcccccaacaaacccagtcctcatatcatagagttcaacacacccatttgacagatggcaaaactgaggcttaaagagctgcttgagacttggccaaggttccaggtgccataccctctgtgcccctcccttaggcctgtgtgccccatggaagggtgggctgagatcgggatgacctgacacagctccctattgctgctaattccccctcggcctcctccaaggggtgggaattccaggccaagacccctacttcgcctttccttctccggctgccaagcaggacctttgccctcagccctttctcctgggatctccatgggggatgccatgagggcctcccaccacaaaagagaatttgggatcccctggtcccaggtttctccatcccttcttccttttccagaattttccaaataggaaagaacagaaggagaccagaaactctaggggggagaaagagaatgagagaaagagaatgagagagagagaaacacaaacacagtgacacagtgagagcttagtctccaagagcctattcattgattcaaacacccaagccacaggatacctcagatggccctcttgccagctggaagctctttctccaatgagcaaagttacagtgacctggctggagttacctggtgcacataggaccttaggggaaagttcagcgtggactacacttgctctgggatctgcttttccacatgtgtgtatggcacgcctttttctgctggattgggaaggacaagattttgctgtgctagggagaaatgaaaacggggtgagctgagtagctgggtttctggaggatagaacatcagatggggaggctttccgaggtgaagaatgagagggaaccacttactagagagaaaagagctccaggcctggggaacagcacgtgcgaaggccaggagagaagaactgttgaaacaacgagaagggtggcacggctggagctgagccagcaagggggatcgtgaggagccttggggttggggagatctgcagaagcatcagaccaggcagggcctcgtacgcagtcctgaggagttttacttttattctaagacagttggggagctccaggagctgttttaagttggggagagactggattccagcctgcaaaagctgttttgtgaagactaaaaccagtgaggagaggtggaggtgctttggggacactgaaatggattcttggaaagattctgaaggctgtgttgaaaagacacctatagctgtggggacatgactataatcccagcatttggggagaccgaggctggcagatcacttaaggtcaggagtttgagaccagcctggccaacatggcgaaaccccatctctgctaaaaatacaaaaattagctgggtgcagtggtgcatgcctgtagtcccagctactcaggagactgaggcgggagaattgtttgaaccctggaggcagaggttgtagtgagtcgtgatcacacaactgcactccagcctgggcaacagaacaatactccattccctcccctctaccccaccaaaaaaaaaaaaaaatcctgcccttagatgagctctagggctgctgagtacagttgtcccagttgcacagtgcccaagggtttggcattgctaagaaggccacgtgcaaatcctagatattgagtgttgtatgtttgtgacgttggtttcccgacatgtgaatggcccaagtgtctggaagaagtggcgccactttctaatttgcttggagatgttgcatgtcccttaaattcagacaggtgcaggtaactggaggttctgaaccaaaggttaaaatgcaaattctcatacagggttgggaagttgtagccagggataagcttatgtgactgttatatggactgaggagcagatgtgaatttcgaaccatgacatggctgagggtaggggtcgggtggatggatgattcagggttgtaacccatagagcccaaaggggaagtgatctgtgacctggggtgagggtgatctggaagatttttggatggctggaaagaaatggggaagtcgagctgcctgagagagccaagttatttcccaaaagattccttaggagtctttctgttcaagacctccgtgtgtgtgtgtgtgtgtttagggttccccagcaatggcccaggcatgtgaaggaaacaagcttcttcagggaatatttgttgaatgagttttcctgactcccaggctagaactgtttttgcaatttccaccctcttttctttcccccagagaactcctattcgtccttcaaaacccatcacggaaacccctcttggagaaaaccctccttccttcccctcaggactttcccagccaccgtctctcctccagtccagcctgatgccatgggactgggggtttctctgtccagctctgtttctcccagactggggtctgaggactctcaggacccccaactttacctagcacaggctgggcacaagtgggtgacagggagtctacgcctagtggaattatgtattggggcagggtcagtgtgagaatacacatccgcatgcatgtctgtccatgtctgtccgtaccaaccttccccttccacacggacctgggcacataggaggtgtctgagcctgacacatgggacagagagtggacatggctgagacacggacagagaaaagacaaggagtccagggggctgaaagccttttgaaatcaggaagttcctgtattggcagaacaaagcccagagaggagcagggctttcctcaacgccacccagcaagtggacacagagcccggccttggatgacacctccagggttctgaaccctggacctcgctttatgcaaggagctggccccacatttccatgaatcggggaaacagcacaagaaggttggcctgtggcagggcaagggttaaaggggtgacattgagggatgcctcagagtcaaagtcccctgaccaagaggaatagagtagaaaacacagagacagagggtgagatcacgccccgatgaggacggagagagacagagatggagagagacatagaggtggaaatatacagagaaagataaatgcagagaccaaggcagggagtgtcgggggaagtaaagagggtgtcctgaagaaagaaggatctgttcactcttaccagtctgtcctcgaatgatttgcataaaatgaggaggtgcctgtccacacccccaattcctctctcaggccccagagcctgagacctcaccatgcccccatcagagatgcaaaaaactaaacacccaactagaaatccttgggacctctctcggctgggatctcagagcctttctgtcccctacccctaccccatgtgctgtcgattttgcagatggggacaacctggggcctcccggaactctgccaccctggggaagttgggggagggccttagtcccggatcacaaccccgtctgctccccagaatcctttcctaagaatcgttgaggaccaaagttgtctttgctgacacgtgttgcttttctctttgccttttattgtttcagagaaaaatcaagttgactgtgtcaagtaacaccccaccccttacccccgtccagccatagtggctctctggagacacaggtcacaggcggagggtcccctgatcatccccaaccacacagccagggggacttgacccctgtccacccctgtctcgtgctccctcagacccccacaaaccggccaagcagtccggggaggcttcccctccacacaactcttagcatgtgattgcagatgtgaaatcaaaacgttgtttgttttttgttttgttttgattctaccccgtcggtccagtgtctgcacagacgccttcatttctctgtaaatatgtgacttggaacaaatgtttaacacaaacgagaagtggtcatgaatgcatggtgttgagatgttttgcactattctgactttttggtctctgtaaaaatattttattaacagcagacattaaaaaaagaaaaaccacacacagccttgga

SEQ ID NO: 36337 - protein, 1682 aa, Artificial Sequence
  derived and/or modified sequence
MHRAVDPPGARAAREAFALGGLSCAGAWSSCPPHPPPRSAWLPGGRCSASIGQPPLPAPLPPSHGSSSGHPSKPYYAPGAPTPRPLHGKLESLHGCVQALLREPAQPGLWEQLGQLYESEHDSEEATRCYHSALRYGGSFAELGPRIGRLQQAQLWNFHTGSCQHRAKVLPPLEQVWNLLHLEHKRNYGAKRGGPPVKRAAEPPVVQPVPPAALSGPSGEEGLSPGGKRRRGCNSEQTGLPPGLPLPPPPLPPPPPPPPPPPPPLPGLATSPPFQLTKPGLWSTLHGDAWGPERKGSAPPERQEQRHSLPHPYPYPAPAYTAHPPGHRLVPAAPPGPGPRPPGAESHGCLPATRPPGSDLRESRVQRSRMDSSVSPAATTACVPYAPSRPPGLPGTTTSSSSSSSSNTGLRGVEPNPGIPGADHYQTPALEVSHHGRLGPSAHSSRKPFLGAPAATPHLSLPPGPSSPPPPPCPRLLRPPPPPAWLKGPACRAAREDGEILEELFFGTEGPPRPAPPPLPHREGFLGPPASRFSVGTQDSHTPPTPPTPTTSSSNSNSGSHSSSPAGPVSFPPPPYLARSIDPLPRPPSPAQNPQDPPLVPLTLALPPAPPSSCHQNTSGSFRRPESPRPRVSFPKTPEVGPGPPPGPLSKAPQPVPPGVGELPARGPRLFDFPPTPLEDQFEEPAEFKILPDGLANIMKMLDESIRKEEEQQQHEAGVAPQPPLKEPFASLQSPFPTDTAPTTTAPAVAVTTTTTTTTTTTATQEEEKKPPPALPPPPPLAKFPPPSQPQPPPPPPPSPASLLKSLASVLEGQKYCYRGTGAAVSTRPGPLPTTQYSPGPPSGATALPPTSAAPSAQGSPQPSASSSSQFSTSGGPWARERRAGEEPVPGPMTPTQPPPPLSLPPARSESEVLEEISRACETLVERVGRSATDPADPVDTAEPADSGTERLLPPAQAKEEAGGVAAVSGSCKRRQKEHQKEHRRHRRACKDSVGRRPREGRAKAKAKVPKEKSRRVLGNLDLQSEEIQGREKSRPDLGGASKAKPPTAPAPPSAPAPSAQPTPPSASVPGKKAREEAPGPPGVSRADMLKLRSLSEGPPKELKIRLIKVESGDKETFIASEVEERRLRMADLTISHCAADVVRASRNAKVKGKFRESYLSPAQSVKPKINTEEKLPREKLNPPTPSIYLESKRDAFSPVLLQFCTDPRNPITVIRGLAGSLRLNLGLFSTKTLVEASGEHTVEVRTQVQQPSDENWDLTGTRQIWPCESSRSHTTIAKYAQYQASSFQESLQEEKESEDEESEEPDSTTGTPPSSAPDPKNHHIIKFGTNIDLSDAKRWKPQLQELLKLPAFMRVTSTGNMLSHVGHTILGMNTVQLYMKVPGSRTPGHQENNNFCSVNINIGPGDCEWFAVHEHYWETISAFCDRHGVDYLTGSWWPILDDLYASNIPVYRFVQRPGDLVWINAGTVHWVQATGWCNNIAWNVGPLTAYQYQLALERYEWNEVKNVKSIVPMIHVSWNVARTVKISDPDLFKMIKFCLLQSMKHCQVQRESLVRAGKKIAYQGRVKDEPAYYCNECDVEVFNILFVTSENGSRNTYLVHCEGCARRRSAGLQGVVVLEQYRTEELAQAYDAFTLVRARRARGQRRRALGQAAGTGFGSPAAPFPEPPPAFSPQAPASTSR

SEQ ID NO: 36338 - DNA, 5049 bp, Artificial Sequence
  derived and/or modified sequence
atgcatcgggccgtggatcctcctggagcgagggcggctagggaggccttcgcattaggcggactgtcttgtgcaggggcttggagtagttgcccgcctcaccctccgcctaggtcagcttggctgccaggtggaaggtgttccgcttcaattggccagcccccactccctgcccccctgcccccttcccatggctccagcagcggccatcccagcaagccttactacgcccccggggcacctacccccaggcccctgcatgggaaactggagtctttacatggatgtgttcaagctctcctccgcgagccggcccagcctgggttatgggagcagcttgggcaattatacgagagcgagcacgattcggaggaggctactagatgttaccactctgccctgaggtacggaggcagcttcgcagagttaggtcctagaattggccgccttcagcaggctcagctgtggaacttccataccggatcctgccagcaccgtgctaaagtgcttccaccattagagcaagtctggaacctcttgcatctggagcacaagcgtaactacggggctaaaagaggaggccctccagtgaagcgtgctgccgagccccccgtcgtacagcccgtgccgccagccgctcttagcggaccgtccggggaggaaggattgtcccctggaggcaaacgcaggaggggttgtaattctgaacagacaggcctgcccccggggctacctttgccgccccctccactccccccaccgcctccccctccccctcctcctcccccgcctctacccggactggcaacaagccctccgttccagctgaccaaacccggtctatggagcactctgcatggtgacgcttggggcccagaacggaagggatctgccccaccagagcgccaggagcagcgccactcactgccccacccctatccttaccccgctccagcatacacggcacaccctccaggccatcgtctggtccctgcagctccccccggacctggtccccgccctcccggggccgaatcccatgggtgtctgcctgcaactagaccccccgggtccgatctgagagaatcacgcgttcaacggtctagaatggattcctctgtttctcctgcggcaaccaccgcttgtgtaccctacgcaccgtctagacctcccggactgcccgggaccaccaccagttcatcatctagttcttcctcgaatacgggactgcggggggttgagcccaacccaggaatacccggtgccgatcactatcagacacctgcactggaagtgagtcaccatgggcgactggggccatcagcccacagttcacggaagcccttcttgggcgcccccgcggcaaccccccacctgtccctcccacccgggccaagttcacccccccctcccccctgtcctcggcttttgaggccgcctccccctccagcctggctcaaaggaccggcgtgcagggccgctcgcgaagatggtgaaattttagaggaactcttttttggcaccgagggcccaccccgacctgctcccccccccctgcctcacagggaggggtttctcggacctcctgcttcacgcttcagcgttgggacacaggattctcacaccccccctaccccgccaacacccacaacctcttcttctaattccaattcaggcagccattcttcatctcctgccggacccgtaagtttcccccctcccccctacctcgcacgctccattgaccccctaccccgccccccttcgccagcacagaaccctcaggaccctcctcttgtacctctcacactcgctttacctccagccccccctagctcctgccaccagaacacatccgggtccttccgtcggcctgagtccccacgacccagggtgtcattcccaaaaacccctgaagtggggccaggccctcctcctggccctctgagtaaagcccctcagcctgtaccccccggagtgggagaactcccagcccgggggccccgcctgttcgatttcccaccaactccactcgaagatcagttcgaagagccagccgagtttaaaatcctgcccgacgggttggccaatattatgaaaatgctcgacgaatccatccggaaagaggaggagcagcaacagcacgaagctggagtggcacctcagccaccccttaaagaacccttcgcgtctctccagagcccttttcctaccgatacagcacccacaacaaccgcaccagctgtggcggtgacgaccacgactacaactacaactacgactacagcgactcaggaagaggagaaaaagccccctcctgccctgccacctcctcctcctttagccaaattcccacctccatcccagccccaacctcccccacctcctccgcctagcccagcctcccttctgaaaagcctagcaagcgtcttggaaggtcagaagtactgttaccgcggcaccggcgctgctgtgtctactcgtcctggcccactgccaactacacagtatagccctggcccaccctctggcgcgaccgccttacctcctacttccgccgctccatccgcccagggctcaccacaaccaagcgctagttcctcaagccagttctcaacatctggtggcccatgggctagagagcggcgtgccggtgaggaacccgtacctgggcccatgaccccgacgcaaccgcccccgccacttagcctgcccccagctcggtctgaatcagaggtgctagaagagatctctagagcatgtgagactctggtggagagagtgggacgctctgccaccgatcctgccgatccggtcgatactgccgagccagccgattctgggaccgaaaggcttctccctccagcccaggcgaaagaagaggctggaggagtagcagccgtgtcgggcagctgcaagcggcgtcagaaggagcaccagaaggagcaccgccgacataggcgagcctgcaaggactctgtggggcgaagacctcgggaaggtcgtgctaaggcaaaagccaaggtgcccaaagaaaagagcagacgcgtattgggcaatctcgacctgcaatcagaggagattcagggacgggaaaaaagccgccccgaccttggtggagcgtcaaaagcaaagcctccaaccgcccctgcaccccccagcgccccggcgccttccgctcagcccacacctccttcagcttctgtgccggggaaaaaggctagggaagaggctcccggtccaccaggagtgtcccgggctgatatgcttaagctgcgaagtttgtctgaaggtccacctaaagaactgaaaattcgcctaataaaggtggagtcgggagacaaagagactttcatcgcttctgaagttgaggaacgacgcctgagaatggcagaccttacgatcagccattgcgccgccgacgtggtgagagcctccaggaatgctaaggtgaagggaaagttccgagaatcgtatctctcacctgctcagtctgtaaagcctaaaatcaacacggaggagaagctgccaagagagaaactgaaccccccaaccccgagtatctatctcgaatcgaagcgcgatgctttttcccctgtgttactgcagttctgtactgacccccgtaacccgataaccgttattcgcggtctagcaggcagtctgcggctcaacctaggactgttttctactaagacattggtggaagctagtggcgaacacaccgtagaggtcaggacccaggtccaacagccctctgatgaaaattgggacctgacgggaacacgccagatctggccttgtgagagcagtcgcagccacacgaccatcgcgaaatacgctcagtatcaggcttcaagtttccaggagagcttgcaggaagaaaaagagagcgaggacgaggagtcagaggagccagactcaacaactgggacacctccttcctcagcacccgacccaaaaaaccatcatattataaaatttgggaccaatatcgatttatcagacgcaaagagatggaagccccagctgcaagagctcctaaaattgcccgcattcatgcgggttaccagcaccgggaacatgctgtcgcatgtgggtcatactatactcggaatgaacacagtccagctttacatgaaagtccccggtagcagaacccctggtcatcaggaaaacaacaatttctgcagtgtaaacatcaatatcggccccggcgattgcgagtggttcgcggtccacgagcactattgggagaccataagcgctttttgcgatagacacggggttgattatcttactgggtcgtggtggcctatcttagatgacctgtacgcctcaaatattcccgtgtatcgattcgtacagagacccggagacctggtgtggatcaacgccggcactgtccattgggtgcaggccaccgggtggtgcaacaacatcgcttggaatgtcgggccgttaaccgcctaccaataccagctggctttagagcgctatgagtggaacgaggtgaagaatgtgaagagcatcgtgccaatgattcatgtctcttggaatgtggccaggaccgtcaaaattagcgacccggatctcttcaagatgattaaattttgtttgcttcagagtatgaagcactgtcaggtgcagcgggaatctctggtgcgggcaggaaagaaaattgcctaccaaggtcgagtcaaggacgagcctgcatactactgtaatgagtgtgacgtcgaagtgttcaatattttgtttgtcacctctgagaacggtagccgaaacacttatcttgtacactgtgaaggctgcgcacgacgacgatcagccggcctgcaaggggtggtggtcctcgagcaatacaggaccgaagaactggcgcaggcctacgatgcttttacactcgttcgcgctcgtagggctagaggtcagagaaggcgggccttagggcaagccgccggaacaggttttggttctcctgctgccccgttccctgagccaccgcccgcattctctccacaagccccggcaagcacctcaaggtag

SEQ ID NO: 36339 - DNA, 5049 bp, Artificial Sequence
  derived and/or modified sequence
atgcacagagctgtggaccccccaggggcccgggccgcccgggaggcctttgccctgggcggcctgagctgtgccggggcctggagcagctgccccccccaccccccacccaggtctgcctggctgcccggcggccgctgcagcgccagcatcggccagccccccctgcctgcccccctgccccccagccacggcagcagcagcggccaccccagcaagccctactatgcccctggggcccccaccccccggcccctgcacggcaagctggagagcctgcacggctgtgtgcaggccctgctgcgggagcccgcccagcccggcctgtgggagcagctgggccagctgtatgaaagtgaacatgattctgaggaggccacccgctgctaccacagcgccctgcgctatggaggcagctttgctgagctgggccccagaattggccgcctgcagcaggcccagctgtggaacttccacacaggcagctgccagcaccgggccaaggtgctgccccccctggagcaggtgtggaacctgctgcacctggagcacaagaggaactacggggccaagagaggaggcccccctgtgaagagagctgctgagccccctgtggtgcagcctgtgcccccagctgccctgagcggccccagcggggaggagggcctgagccctgggggcaagagaagaagaggctgcaacagcgagcagacaggcctgcccccaggcctgcccctgcccccaccacccctgcccccacctcctcctcctcctcctcctcctcctccacccctgcccggcctggccaccagcccccccttccagctgaccaagccaggcctgtggagcaccctgcatggagatgcctggggccctgagaggaaaggaagtgcccctcctgagcggcaggagcagaggcacagcctgccccacccctacccctacccagccccagcctacacagcccaccccccaggccaccggctggtgcctgctgcccctcctggccctggccccaggcctcctggagctgagagccacggctgcctgcctgccaccaggcctcctggcagtgacctgcgggagagccgggtgcagaggagcaggatggacagctctgtgtccccagctgccaccacagcctgtgtgccctatgcccccagccggcccccaggcctgcccggcaccaccaccagcagcagcagcagcagcagcagcaacacaggcctgcggggcgtggagcccaaccctggcatccctggagctgaccactaccagaccccagccctggaggtgagccaccacggccgcctgggccccagcgcccacagcagcaggaagcccttcctgggcgccccagctgccaccccccacctgagcctgcccccaggccccagcagccccccacctccaccctgcccccggctgctgcggcccccacctcctccagcctggctgaagggccctgcctgcagagctgcccgggaggatggagagatcctggaggagctgttcttcggcacagagggcccccccaggcctgcccccccacccctgccccaccgggagggcttcctgggccccccagccagccgcttctctgtgggcacccaggacagccacaccccacccaccccacccacccccaccaccagcagcagcaacagcaacagcggcagccacagcagcagccctgctggccctgtgtccttccccccaccaccctacctggcccggagcattgaccccctgcccaggcctcccagccctgcccagaacccccaggacccccccctggtgcccctgaccctggccctgcccccagccccacccagcagctgccaccagaacaccagcggcagcttcagaagacctgagagcccccggccccgggtgtccttccccaagaccccagaggtgggccctggccccccacctggccccctgagcaaggccccccagcctgtgcccccaggagtgggggagctgcctgcccggggcccccggctgtttgacttcccccccacccccctggaggaccagtttgaggagcctgctgagttcaagatcctgcctgatggcctggccaacatcatgaagatgctggatgagagcatcaggaaggaggaggagcagcagcagcatgaagctggggtggccccccagccccccctgaaggagccctttgccagcctgcagagccccttccccacagacacagcccccaccaccacagccccagctgtggccgtgaccaccaccaccaccaccaccaccaccaccacagccacccaggaggaggagaagaagcccccaccagccctgcccccacctccacccctggccaagtttcctccacccagccagccccagcccccacctcctcctccacccagccctgccagcctgctgaagagcctggcctctgtgctggagggccagaagtactgctaccggggcactggagctgctgtgtccaccaggcctggccccctgcccaccacccagtacagccctggccccccatctggggccacagccctgccccccaccagcgctgcccccagcgcccagggcagcccccagcccagcgccagcagcagcagccagttcagcaccagcggcggcccctgggcccgggagcggcgggccggggaggagcctgtgcccggccccatgacccccacccagcccccaccacccctgagcctgcccccagcccggtctgagagcgaggtgctggaggagatcagccgggcctgtgagaccctggtggagcgggtgggccgcagcgccacagatcctgctgaccctgtggacacagctgagcctgctgacagcggcacagagcggctgctgcccccagcccaggccaaggaggaggccggcggcgtggccgctgtgtctggcagctgcaagaggcggcagaaggagcaccagaaggagcaccggcggcacagaagagcctgcaaggacagcgtgggccggcggccccgggagggccgggccaaggccaaggccaaggtgcccaaggagaagagcagaagagtgctgggcaacctggacctgcagagcgaggagatccagggccgggagaagagcaggccagacctgggcggggccagcaaggccaagccacccacagccccagccccacccagcgccccagcccccagcgcccagcccaccccacccagcgcctctgtgcctgggaagaaggcccgggaggaggcccctggccccccaggagtgtccagagctgacatgctgaagctgcggagcctgtctgagggcccccccaaggagctgaagatccgcctcatcaaggtggagagcggggacaaggagaccttcatcgccagcgaggtggaggagcggcggctgaggatggctgacctgaccatcagccactgtgccgcagatgtggtgcgggccagcagaaatgccaaggtgaagggcaagttccgggagagctacctgagccctgcccagagcgtgaagcccaagatcaacacagaggagaagctgccccgggagaagctgaacccccccacccccagcatctacctggagagcaagagagatgccttcagccctgtgctgctgcagttctgcacagaccccaggaaccccatcaccgtcatccggggcctggccggcagcctgcggctgaacctgggcctcttcagcaccaagaccctggtggaggccagcggggagcacacagtggaggtgaggacccaggtgcagcagcccagtgatgagaactgggacctgaccggcacccggcagatctggccctgtgagagcagccgcagccacaccaccatcgccaagtatgcccagtaccaggccagcagcttccaggagagcctgcaggaggagaaggagagtgaagatgaggagagcgaggagccagacagcaccaccggcaccccacccagcagcgccccagaccccaagaaccaccacatcatcaagtttggcaccaacatcgacctgagtgatgccaagcgctggaagccccagctgcaggagctgctgaagctgcctgccttcatgagggtgaccagcactggaaacatgctgagccacgtgggccacaccatcctgggcatgaacacagtgcagctgtacatgaaggtgcccggcagcaggaccccaggccaccaggagaacaacaacttctgcagcgtgaacatcaacatcggccctggggactgtgagtggtttgctgtgcatgagcactactgggagaccatcagcgccttctgtgacagacatggagtggactacctgaccggctcctggtggcccatcctggatgacctgtatgccagcaacatccctgtgtacagatttgtgcagaggcctggggacctggtgtggatcaatgccggcaccgtgcactgggtgcaggccaccggctggtgcaacaacatcgcctggaatgtgggccccctgacagcctaccagtaccagctggccctggagagatatgagtggaatgaggtgaagaatgtgaagagcatcgtgcccatgatccacgtgtcctggaatgtggccaggacagtgaagatcagtgaccctgacctcttcaagatgatcaagttctgcctgctgcagagcatgaagcactgccaggtgcagcgggagagcctggtgcgggccggcaagaagatcgcctaccagggccgggtgaaggatgagcccgcctactactgcaatgaatgtgatgtggaggtgttcaacatcctgtttgtgaccagtgaaaatggcagcaggaacacctacctggtgcactgtgagggctgtgcccggcggcgctctgctggcctgcagggcgtggtggtgctggagcagtacagaacagaggagctggcccaggcctatgatgccttcaccctggtgcgggcccggcgggcccggggccagaggagaagagccctgggccaggccgccggcaccggcttcggcagccctgctgcccccttccctgagcccccaccagccttcagcccccaggccccagccagcaccagcaggtag

SEQ ID NO: 36340 - DNA, 6705 bp, Artificial Sequence
  derived and/or modified sequence
aggttccccccagggcaacatgccagccccgtagcactgcccaccccacccactgtggtctgttgtaccccactgctggggtggtggttccaatgagacagggcacaccaaactccatctggctgttactgaggcggagacacgggtgatgattggctttctggggagagaggaagtcctgtgattggccagatctctggagcttgccgacgcggtgtgaggacgctcccacggaggccggaattggctgtgaaaggactgaggcagccatctgggggtagcgggcactcttatcagagcggctggagccggaccatcgtcccagagagctggggcagggggccgtgcccaatctccagggctcctggggccactgctgacctggctggatgcatcgggcagtggaccctccaggggcccgcgctgcacgggaagcctttgcccttgggggcctgagctgtgctggggcctggagctcctgcccgcctcatccccctcctcgtagcgcatggctgcctggaggcagatgctcagccagcattgggcagcccccgcttcctgctcccctacccccttcacatggcagtagttctgggcaccccagcaaaccatattatgctccaggggcgcccactccaagacccctccatgggaagctggaatccctgcatggctgtgtgcaggcattgctccgggagccagcccagccagggctttgggaacagcttgggcaactgtacgagtcagagcacgatagtgaggaggccacacgctgctaccacagcgcccttcgatacggaggaagcttcgctgagctggggccccgcattggccgactgcagcaggcccagctctggaactttcatactggctcctgccagcaccgagccaaggtcctgcccccactggagcaagtgtggaacttgctacaccttgagcacaaacggaactatggagccaagcggggaggtcccccggtgaagcgagctgctgaacccccagtggtgcagcctgtgcctcctgcagcactctcaggcccctcaggggaggagggcctcagccctggaggcaagcgaaggagaggctgcaactctgaacagactggccttcccccagggctgccactgcctccaccaccattaccaccaccaccaccaccaccaccaccaccaccaccacccctgcctggcctggctaccagccccccatttcagctaaccaagccagggctgtggagtaccctgcatggagatgcctggggcccagagcgcaagggttcagcacccccagagcgccaggagcagcggcactcgctgcctcacccatatccatacccagctccagcgtacaccgcgcacccccctggccaccggctggtcccggctgctcccccaggcccaggcccccgccccccaggagcagagagccatggctgcctgcctgccacccgtccccccggaagtgaccttagagagagcagagttcagaggtcgcggatggactccagcgtttcaccagcagcaaccaccgcctgcgtgccttacgccccttcccggccccctggcctccccggcaccaccaccagcagcagcagtagcagcagcagcaacactggtctccggggcgtggagccgaacccaggcattcccggcgctgaccattaccaaactcccgcgctggaggtctctcaccatggccgcctggggccctcggcacacagcagtcggaaaccgttcttgggggctcccgctgccactccccacctatccctgccacctggaccttcctcaccccctccacccccctgtccccgcctcttacgccccccaccaccccctgcctggttgaagggtccggcctgccgggcagcccgagaggatggagagatcttagaagagctcttctttgggactgagggacccccccgccctgccccaccacccctcccccatcgcgagggcttcttggggcctccggcctcccgcttttctgtgggcactcaggattctcacacccctcccactcccccaaccccaaccaccagcagtagcaacagcaacagtggcagccacagcagcagccctgctgggcctgtgtcctttcccccaccaccctatctggccagaagtatagacccccttccccggcctcccagcccagcacagaacccccaggacccacctcttgtacccctgactcttgccctgcctccagcccctccttcctcctgccaccaaaatacctcaggaagcttcaggcgcccggagagcccccggcccagggtctccttcccaaagacccccgaggtggggccggggccacccccaggccccctgagtaaagccccccagcctgtgccgcccggggttggggagctgcctgcccgaggccctcgactctttgattttccccccactccgctggaggaccagtttgaggagccagccgaattcaagatcctacctgatgggctggccaacatcatgaagatgctggacgaatccattcgcaaggaagaggaacagcaacaacacgaagcaggcgtggccccccaacccccgctgaaggagccctttgcatctctgcagtctcctttccccaccgacacagcccccaccactactgctcctgctgtcgccgtcaccaccaccaccaccaccaccaccaccaccacggccacccaggaagaggagaagaagccaccaccagccctaccaccaccaccgcctctagccaagttccctccaccctctcagccacagccaccaccacccccaccccccagcccggccagcctgctcaaatccttggcctccgtgctggagggacaaaagtactgttatcgggggactggagcagctgtttccacccggcctgggcccttgcccaccactcagtattcccctggccccccatcaggtgctaccgccctgccgcccacctcagcggcccctagcgcccagggctccccacagccctctgcttcctcgtcatctcagttctctacctcaggcgggccctgggcccgggagcgcagggcgggcgaagagccagtcccgggccccatgacccccacccaaccgcccccacccctatctctgccccctgctcgctctgagtctgaggtgctagaagagatcagccgggcttgcgagacccttgtggagcgggtgggccggagtgccactgacccagccgacccagtggacacagcagagccagcggacagtgggactgagcgactgctgccccccgcacaggccaaggaggaggctggcggggtggcggcagtgtcaggcagctgtaagcggcgacagaaggagcatcagaaggagcatcggcggcacaggcgggcctgtaaggacagtgtgggtcgtcggccccgtgagggcagggcaaaggccaaggccaaggtccccaaagaaaagagccgccgggtgctggggaacctggacctgcagagcgaggagatccagggtcgtgagaagtcccggcccgatcttggcggggcctccaaggccaagccacccacagctccagcccctccatcagctcctgcaccttctgcccagcccacacccccgtcagcctctgtccctggaaagaaggctcgggaggaagccccagggccaccgggtgtcagccgggccgacatgctgaagctgcgctcacttagtgaggggccccccaaggagctgaagatccggctcatcaaggtagagagtggtgacaaggagacctttatcgcctctgaggtggaagagcggcggctgcgcatggcagacctcaccatcagccactgtgctgctgacgtcgtgcgcgccagcaggaatgccaaggtgaaagggaagtttcgagagtcctacctttcccctgcccagtctgtgaaaccgaagatcaacactgaggagaagctgccccgggaaaaactcaacccccctacacccagcatctatctggagagcaaacgggatgccttctcacctgtcctgctgcagttctgtacagaccctcgaaatcccatcacagtgatccggggcctggcgggctccctgcggctcaacttgggcctcttctccaccaagaccctggtggaagcgagtggcgaacacaccgtggaagttcgcacccaggtgcagcagccctcagatgagaactgggatctgacaggcactcggcagatctggccttgtgagagctcccgttcccacaccaccattgccaagtacgcacagtaccaggcctcatccttccaggagtctctgcaggaggagaaggagagtgaggatgaggagtcagaggagccagacagcaccactggaacccctcctagcagcgcaccagacccgaagaaccatcacatcatcaagtttggcaccaacatcgacttgtctgatgctaagcggtggaagccccagctgcaggagctgctgaagctgcccgccttcatgcgggtaacatccacgggcaacatgctgagccacgtgggccacaccatcctgggcatgaacacggtgcagctgtacatgaaggtgcccggcagccgaacgccaggccaccaggagaataacaacttctgctccgtcaacatcaacattggcccaggcgactgcgagtggttcgcggtgcacgagcactactgggagaccatcagcgctttctgtgatcggcacggcgtggactacttgacgggttcctggtggccaatcctggatgatctctatgcatccaatattcctgtgtaccgcttcgtgcagcgacccggagacctcgtgtggattaatgcggggactgtgcactgggtgcaggccaccggctggtgcaacaacattgcctggaacgtggggcccctcaccgcctatcagtaccagctggccctggaacgatacgagtggaatgaggtgaagaacgtcaaatccatcgtgcccatgattcacgtgtcatggaacgtggctcgcacggtcaaaatcagcgaccccgacttgttcaagatgatcaagttctgcctgctgcagtccatgaagcactgccaggtgcaacgcgagagcctggtgcgggcagggaagaaaatcgcttaccagggccgtgtcaaggacgagccagcctactactgcaacgagtgcgatgtggaggtgtttaacatcctgttcgtgacaagtgagaatggcagccgcaacacgtacctggtacactgcgagggctgtgcccggcgccgcagcgcaggcctgcagggcgtggtggtgctggagcagtaccgcactgaggagctggctcaggcctacgacgccttcacgctggtgagggcccggcgggcgcgcgggcagcggaggagggcactggggcaggctgcagggacgggcttcgggagcccggccgcgcctttccctgagcccccgccggctttctccccccaggccccagccagcacgtcgcgatgaggccggacgccccgcccgcctgcctgcccgcgcaaggcgccgcggggccaccagcacatgcctgggctggacctaggtcccgcctgtggccgagaagggggtcgggcccagcccttccaccccattggcagctcccctcacttaatttattaagaaaaactttttttttttttttagcaaatatgaggaaaaaaggaaaaaaaatgggagacgggggagggggctggcagcccctcgcccaccagcgcctcccctcaccgactttggcctttttagcaacagacacaaggaccaggctccggcggcggcgggggtcacatacgggttccctcaccctgccagccgcccgcccgcccggcgcagatgcacgcggctcgtgtatgtacatagacgttacggcagccgaggtttttaatgagattctttctatgggctttacccctcccccggaacctccttttttacttccaatgctagctgtgacccctgtacatgtctctttattcacttggttatgatttgtattttttgttcttttcttgtttttttgtttttaatttataacagtcccactcacctctatttattcatttttgggaaaacccgacctcccacacccccaagccatcctgcccgcccctccagggaccgcccgtcgccgggctctccccgcgccccagtgtgtgtccgggcccggcccgaccgtctccacccgtccgcccgcggctccagccgggttctcatggtgctcaaacccgctcccctcccctacgtcctgcactttctcggaccagtccccccactcccgacccgaccccagccccacctgagggtgagcaactcctgtactgtaggggaagaagtgggaactgaaatggtattttgtaaaaaaaataaataaaataaaaaaattaaaggttttaaagaaagaactatgaggaaaaggaaccccgtccttcccagccccggccaactttaaaaaacacagaccttcacccccacccccttttctttttaagtgtgaaacaacccagggccagggcctcactggggcagggacaccccggggtgagtttctctggggctttattttcgttttgttggttgttttttctccacgctggggctgcggaggggtggggggtttacagtcccgcaccctcgcactgcactgtctctctgccccaggggcagaggggtcttcccaaccctacccctattttcggtgatttttgtgtgagaatattaatattaaaaataaacggag

SEQ ID NO: 36341 - DNA, 5049 bp, Artificial Sequence
  derived and/or modified sequence
atgcaccgggccgtggacccccccggcgcccgggccgcccgggaggcctttgctctgggaggcctcagctgcgctggagcctggtcctcatgcccaccccaccctccacccaggtctgcctggctgcccggcggacgatgtagtgcttcgatcgggcaaccccctcttcccgctccactgccaccttcacacggttcttcatccggccacccgagtaaaccctattatgctccaggtgcccccacacccaggccacttcatggaaagcttgaatcactccatggttgtgtgcaggccctgctgcgcgagcctgcccagcccggcctgtgggaacaactgggtcagctctatgaaagcgagcacgattcagaagaagcaactcgctgctatcactcagccctgaggtacgggggtagtttcgccgaactggggccaaggattgggagattgcagcaggcccagctttggaatttccacacagggagttgtcagcaccgcgccaaggtgttacctcctctggaacaagtgtggaatctgcttcatctcgagcataaacggaactatggagctaagcggggcggaccccctgttaaaagggccgcagaacctccagttgtgcagcctgtgcccccagccgctcttagcggccctagtggcgaggaaggactatctccaggcgggaagcggagaaggggttgcaattccgaacagactgggctaccccctggactcccactcccacctcctcctctaccccccccacccccacccccccccccgccaccaccaccactccctgggctcgctacatccccaccattccagctgacaaaaccggggctttggagtactcttcacggcgacgcttggggaccagagaggaaggggagtgccccaccggaacgccaggagcagcggcactctctcccccatccctatccctacccggccccagcctacaccgcacatccaccagggcatcgccttgtaccagccgcccctcctggcccaggcccccgccctccaggcgccgaatcccacggatgcctgcctgccacccggccgccagggtcggatttgcgtgagagccgtgttcagcgatcacgcatggactccagcgtgtcccccgcggctaccaccgcatgcgttccctatgcaccatcgcgaccaccggggctgcccggcactacaacgtctagttctagctccagctcctctaatacggggctgaggggcgtcgagccaaatcccggcatccccggcgctgaccactatcagaccccagccttggaagtgtcccaccacggtcgcctcgggccatcagctcattccagccggaagccattcctgggtgcccctgccgccacccctcacctttcgttgcccccaggaccctcctctcccccccctcctccatgtcccaggttgttacgtcctcctcccccccccgcttggctgaaagggcccgcgtgtcgagcagcaagagaggatggcgaaatcctggaggaactgttcttcggaaccgagggcccgcctagacccgcccctccaccccttccccaccgtgagggatttttgggtccaccagccagtagatttagcgtggggacccaggattctcatacaccgcccacgccccctactccaacaacctccagcagcaatagtaacagcggatcgcactcaagtagcccagccggcccagtgtccttcccaccccccccctatcttgcacgtagcatagaccctctgccgcgtccaccctctcccgcccagaacccacaggatccaccacttgtgccactgactctggcactcccgcctgccccgccttcatcttgccatcagaacaccagtggctctttcagacgccctgaatctccccgtccgagggtctcattccccaaaacgcccgaggtgggccctgggccaccccctggccccctttccaaggctccccagccggtgccaccaggagtcggcgagctgcccgcacgcggcccaagactcttcgacttcccgcctaccccactcgaggaccagtttgaggaacctgccgaatttaaaatcctgcctgacggcttagccaatatcatgaaaatgttggacgagtccatccgaaaggaagaggagcaacagcagcacgaggctggcgtggccccacaacctcccttaaaggagcctttcgcctcgctgcagtcgccgtttcctactgatacggccccaacaactaccgctcccgccgtagcagtcaccactacaaccactacgaccactacaaccacagctacacaggaagaagaaaagaaacctcctcccgctcttccccctcctcctcccttagccaagttccctccaccaagtcagcctcaacctcctccaccgcctccacctagccccgccagcctcctcaaatctttggcctcggtcctagagggccagaaatattgctatcgcggaacaggggctgccgtctccacaagaccaggcccattgcctacgacccagtactcacctggaccaccctccggagccactgctctacctcctacatctgcagcccccagcgcgcagggctcaccccagccgtctgcctcatcaagcagtcaattcagtacttccggtgggccttgggcccgtgagagaagagccggagaggagcccgtgcccggcccgatgacaccaacccagcccccaccgccattgagccttcctccagctcggagcgaaagcgaggttctagaggagatcagccgagcctgtgagacactcgttgaaagggtgggaagatctgccactgaccccgcagatcccgtagataccgccgaacccgctgactctgggaccgagagactcttacctccggcacaagctaaggaagaagctggcggggtggccgctgtctccggaagctgcaaacgcaggcaaaaagaacatcaaaaggaacatagacggcaccggcgcgcctgcaaagatagtgttggcagaagaccaagggagggtcgggctaaagctaaagcaaaggtgcccaaagagaaaagtaggagggttctgggtaatctagatttgcagagcgaggagatacagggccgggaaaagagccggccagatctagggggagccagcaaggccaagcctccgaccgctccggcgcccccatccgctcctgcccctagtgcccaaccaaccccgccaagcgccagcgtacccggcaaaaaggccagagaggaagcacccggcccccccggggtgagtcgggctgatatgctgaagctacggtcactttccgagggacccccaaaggagctcaagattcgactcattaaggtagagagcggtgacaaggagacatttattgctagcgaggttgaagagcggagattgagaatggccgacctgacaatctctcactgcgccgctgatgtcgttcgcgcaagccggaacgccaaggttaaggggaaatttcgagaaagctacctgtcacctgcacagtccgtgaaaccaaaaataaacacggaggagaagctgcccagagagaaactgaaccctccaaccccctccatctatctcgaatccaaaagagatgcattttcgcctgtccttctgcagttctgcactgaccccaggaatcctattactgtaattcgggggctcgccggcagtttacgattaaatctgggcttattctcaactaaaaccctcgtggaggccagcggtgagcacacggtggaggttaggacccaagtgcagcagccctctgacgaaaattgggatctgactggaaccaggcagatctggccctgtgaaagcagtcggtcgcatacgacaattgccaaatatgcccaataccaggctagctcgttccaagaatctctgcaagaggaaaaggagagcgaggatgaagagtcagaggagccggacagcactaccggaacccctccgagtagcgctcccgatcccaaaaatcaccacatcatcaagttcggtaccaacattgacttgtccgacgcaaaacggtggaaacctcagcttcaggaactgctcaagctgccagcctttatgcgcgtcacaagcaccggtaacatgctgagccatgtaggccacactatactcggaatgaacaccgttcagttgtacatgaaagtccccggatcacggaccccaggccaccaggagaataacaatttctgcagtgtgaacataaatattggaccaggcgattgtgagtggttcgccgtgcatgagcattactgggaaacaattagtgcattctgtgatcggcatggagtggactaccttaccggctcatggtggcccattctcgacgatctctatgcctctaacatccccgtctatcgtttcgtgcagaggccaggggatctggtgtggattaacgccggtactgtccattgggtgcaggcgactggatggtgtaacaatatagcttggaatgtggggccactgaccgcttaccaataccagctcgcactcgagcgctatgagtggaacgaggtgaagaatgtgaagtctatcgttcctatgatccatgtttcatggaatgtggcccgtacagtgaagatcagcgaccctgacttattcaaaatgatcaagttctgccttctacagagcatgaagcactgccaagtgcagagagaatctctggtccgcgctggcaagaagatcgcatatcagggtcgggtgaaggatgagcccgcctactactgcaatgagtgtgatgtagaagtcttcaatattctgttcgtcacgagcgaaaacggcagtcgcaacacatatctcgtgcactgcgagggatgtgcccggcgccggtccgccggcctccagggggtggtggtactggagcaataccgcacggaggaattagcccaagcctacgacgcattcaccctcgtgcgggcccggagggctcgtggacagcgaagaagagcattgggtcaggccgcagggacgggcttcggttcaccggccgcgccctttcctgagccaccaccggcattctctccgcaggcgccagcctcaaccagtaggtag

SEQ ID NO: 36342 - DNA, 5049 bp, Artificial Sequence
  derived and/or modified sequence
atgcaccgggcagtcgacccacctggagcgagggctgctagggaagcattcgctctggggggtctctcctgtgcgggagcttggtcttcttgcccaccccatccccctccaagatctgcctggctccctggcggtaggtgtagcgctagcataggccagccccctctgcccgcaccgctgcctccatctcacggaagttctagtggccacccatccaagccatactacgccccaggtgctcccacgcctcgaccgctgcacgggaagttggagtccctccatggttgcgtgcaggccttactgagagaacctgctcagcccggtctgtgggaacaactcgggcagctttacgagagcgaacacgacagcgaggaggccacgaggtgctaccactccgctctcagatacggtggtagctttgcagagcttggaccccgaatcgggcgtctgcaacaggctcagctgtggaattttcacaccgggtcatgccagcatcgtgccaaagtcctgccaccactggagcaggtatggaacctgctgcatttagaacacaaacgcaattacggagccaagcggggaggcccacctgttaaacgcgctgctgaacctccggttgttcagcctgttcccccagccgcactcagcggcccttctggtgaagaggggttgagccccggtggtaaaaggagacgaggttgtaactccgagcagactggccttcccccaggtctacccctgcctcccccaccattgccccctcctcctcctccccctccaccgcctccgccaccacttccagggttagctacttccccaccattccaactcacgaaaccaggactctggtctacccttcacggagacgcttgggggccagaaaggaaaggtagcgcccctccggaaagacaagagcagcggcactcccttccccatccatacccatacccagctccagcctacacagcccatcccccaggccaccgtctggttcctgcagcccctccagggcctgggccaagaccgcctggcgcagagagccatgggtgtctgcctgcaacaagacctcccggatccgatctccgcgaaagtagagtgcagcgctccaggatggatagttccgtcagccccgctgccacaacagcctgcgtgccctacgccccaagccgcccaccgggactgccagggaccaccacatcctcatctagttcctccagcagtaatactggccttagaggcgtggaaccgaacccaggcatcccaggcgcagaccattaccaaacaccagccctggaagtctcacaccatggcaggttggggccttccgcccactcatcccgtaagccattcctgggagcacctgccgctacacctcacttaagtctgcccccaggacccagcagtccccctcctccgccatgtcctcgattgctcaggccaccaccaccccctgcttggctcaagggtccggcatgtcgagccgctagagaggacggagagatactcgaggagctgtttttcggtaccgaaggcccaccccgacctgctcctccccctttgccacaccgcgaagggttcctcggacctcctgcatctcggttttccgtgggtacacaagatagccatacgccccctacaccccctacacccactacatcgtcgagcaacagcaactcaggttcccatagctcttcacccgctggaccagtttcttttccccctcctccctacttagctcgaagcatagatccccttccgcgtcccccatcccctgctcagaaccctcaagatccgcctctggttccactgactcttgctcttccccctgcccctccatccagctgccatcagaatacctcgggatccttccggagaccagaatctccacgacccagggtcagctttcccaaaacaccggaggtgggccctgggccacctcccggtcctttatccaaggcacctcagcctgtgccccctggcgttggagagcttcctgccagaggccctagattatttgactttcccccaacccccttggaggatcaatttgaagaaccagcagaattcaagatcttaccagacggtctcgctaacatcatgaagatgctggatgagtccattagaaaagaagaggagcagcaacagcatgaggcgggagtggccccacaacccccactgaaggagccgttcgccagtctccagtccccatttcctactgacacagccccaactaccactgctcccgctgtagctgtgacgactactaccacaaccactacaaccacgactgccacccaggaggaggagaagaagccacccccagctctgcctccaccccctccgctggcaaagttcccaccaccttctcagccacaaccacctccaccaccccctcctagtcctgcctctcttctcaagtccctggcatctgttttggaaggtcaaaaatattgctacaggggaacaggagccgctgtgtcaacgcgtcctggccctctgccgaccactcagtattctcctggaccacctagcggggcaaccgctctgccgccaacttctgccgctcctagcgcacaaggatcaccccagccctctgcctcctcgagttctcagttttcaacctctggcggaccatgggctcgggagcgcagagcaggcgaagaacctgtgccgggacccatgactcctacacagccgcctccgccactctcactgccccctgcccgttcagaatccgaagtcctggaggaaatatcacgcgcttgcgaaactctggtggagcgggttggcaggtctgctacggaccccgctgatcctgtcgacaccgccgaacctgccgattcagggacagagcggttactcccccctgctcaggccaaagaggaagccggaggcgtcgccgcagtgagtgggagttgtaagcggagacagaaagagcatcaaaaggagcaccggagacacagacgggcttgtaaagattccgtaggccgaagacccagagagggcagggcaaaggccaaagctaaagtgcccaaggagaagtccaggcgagtgctgggtaaccttgatctgcaatccgaggaaatccagggtagggagaagagtcgacccgacctgggtggagccagcaaggccaagcccccaactgcccctgccccacccagtgccccagcaccaagcgcacagcccacacccccatccgctagtgtacctggcaagaaggcacgcgaggaggcccctggaccccctggcgtctctcgagcagacatgctgaaattgcggagtctgagtgaaggaccacctaaagagctaaaaattcgattgattaaggtggagtctggcgacaaggaaacctttattgccagtgaggtggaggaaagaagactaaggatggccgatctgacaatatcgcactgcgctgctgacgtcgtgcgggcatcaaggaatgctaaagtgaaggggaagttccgagagagttatctctctcctgcccagtccgtaaaacccaagatcaacaccgaggagaaactccctcgggagaaacttaatccccctacgccttcaatctacctggagagcaagcgagacgctttcagccccgtgctgctgcaattttgtacagacccacgtaaccccataaccgtcatcagaggactggcgggatcactgcgactcaacttggggcttttcagcaccaagactctggtcgaagcatccggtgagcatactgtagaggttcggacccaggtgcaacagcccagcgacgagaattgggacctgacaggcacgcggcaaatttggccatgtgaaagctctcggagccacactaccatcgcaaaatatgctcaataccaagcgtccagcttccaggagtccttacaagaggagaaggagtcagaagatgaggaatccgaagaaccagactctacgaccggtacccccccatcctctgcccctgacccaaagaatcatcacatcattaagttcggtactaatattgatctgtccgacgcaaagcgttggaaaccgcaactgcaggaactcttgaagctgcccgcatttatgagggtcacaagcactgggaacatgctgagtcacgtagggcataccattctgggcatgaacactgttcagctctatatgaaggtccccggatccagaactccaggacatcaagaaaacaataatttctgtagcgtgaacattaatattggcccaggtgattgcgaatggtttgccgtccacgaacactactgggagaccattagcgctttctgtgatagacatggggttgattacttgacgggctcctggtggcctatcctggatgacttgtacgcttctaacattcctgtctaccgcttcgtgcagaggccgggagatctggtgtggattaacgcgggaacagtgcattgggttcaggccaccgggtggtgcaacaatatcgcgtggaacgttggtcccctgacagcgtaccagtatcagttggcgctcgaaagatatgaatggaacgaagtgaaaaatgttaagtccatcgtgccgatgatccatgtcagctggaacgttgcacgcaccgtgaaaatatctgacccagatctcttcaagatgataaagttctgtctgcttcagagcatgaagcattgtcaggtccagagagaatctctggtgcgggctggtaagaagatcgcataccagggccgtgtaaaggacgaaccagcatattactgtaatgagtgtgatgtggaggtgttcaacatactgttcgtgacaagcgaaaatggctctaggaacacatacctggtgcattgtgagggatgcgcccgacgacggtcagcgggacttcagggtgtggtcgtgttggagcagtataggaccgaagagcttgctcaggcgtatgacgccttcacactagtccgcgctcgtagggcacgaggacagcgtcggagagctctgggccaggctgcgggaactggatttggatctcctgcagcgccattccccgaaccccctcctgcgttttcccctcaggctcccgcatccaccagccgctaa

SEQ ID NO: 36343 - DNA, 5049 bp, Artificial Sequence
  derived and/or modified sequence
atgcacagagccgtggacccccccggcgccagagccgccagagaggccttcgccctgggcggcctgagctgcgccggcgcctggagcagctgccccccccaccccccccccagaagcgcctggctgcccggcggcagatgcagcgccagcatcggccagccccccctgcccgcccccctgccccccagccacggcagcagcagcggccaccccagcaagccctactacgcccccggcgcccccacccccagacccctgcacggcaagctggagagcctgcacggctgcgtgcaggccctgctgagagagcccgcccagcccggcctgtgggagcagctgggccagctgtacgagagcgagcacgacagcgaggaggccaccagatgctaccacagcgccctgagatacggcggcagcttcgccgagctgggccccagaatcggcagactgcagcaggcccagctgtggaacttccacaccggcagctgccagcacagagccaaggtgctgccccccctggagcaggtgtggaacctgctgcacctggagcacaagagaaactacggcgccaagagaggcggcccccccgtgaagagagccgccgagccccccgtggtgcagcccgtgccccccgccgccctgagcggccccagcggcgaggagggcctgagccccggcggcaagagaagaagaggctgcaacagcgagcagaccggcctgccccccggcctgcccctgccccccccccccctgcccccccccccccccccccccccccccccccccccccccctgcccggcctggccaccagcccccccttccagctgaccaagcccggcctgtggagcaccctgcacggcgacgcctggggccccgagagaaagggcagcgccccccccgagagacaggagcagagacacagcctgccccacccctacccctaccccgcccccgcctacaccgcccacccccccggccacagactggtgcccgccgccccccccggccccggccccagaccccccggcgccgagagccacggctgcctgcccgccaccagaccccccggcagcgacctgagagagagcagagtgcagagaagcagaatggacagcagcgtgagccccgccgccaccaccgcctgcgtgccctacgcccccagcagaccccccggcctgcccggcaccaccaccagcagcagcagcagcagcagcagcaacaccggcctgagaggcgtggagcccaaccccggcatccccggcgccgaccactaccagacccccgccctggaggtgagccaccacggcagactgggccccagcgcccacagcagcagaaagcccttcctgggcgcccccgccgccaccccccacctgagcctgccccccggccccagcagcccccccccccccccctgccccagactgctgagacccccccccccccccgcctggctgaagggccccgcctgcagagccgccagagaggacggcgagatcctggaggagctgttcttcggcaccgagggcccccccagacccgcccccccccccctgccccacagagagggcttcctgggcccccccgccagcagattcagcgtgggcacccaggacagccacaccccccccaccccccccacccccaccaccagcagcagcaacagcaacagcggcagccacagcagcagccccgccggccccgtgagcttccccccccccccctacctggccagaagcatcgaccccctgcccagaccccccagccccgcccagaacccccaggacccccccctggtgcccctgaccctggccctgccccccgccccccccagcagctgccaccagaacaccagcggcagcttcagaagacccgagagccccagacccagagtgagcttccccaagacccccgaggtgggccccggccccccccccggccccctgagcaaggccccccagcccgtgccccccggcgtgggcgagctgcccgccagaggccccagactgttcgacttcccccccacccccctggaggaccagttcgaggagcccgccgagttcaagatcctgcccgacggcctggccaacatcatgaagatgctggacgagagcatcagaaaggaggaggagcagcagcagcacgaggccggcgtggccccccagccccccctgaaggagcccttcgccagcctgcagagccccttccccaccgacaccgcccccaccaccaccgcccccgccgtggccgtgaccaccaccaccaccaccaccaccaccaccaccgccacccaggaggaggagaagaagcccccccccgccctgcccccccccccccccctggccaagttccccccccccagccagccccagcccccccccccccccccccccagccccgccagcctgctgaagagcctggccagcgtgctggagggccagaagtactgctacagaggcaccggcgccgccgtgagcaccagacccggccccctgcccaccacccagtacagccccggcccccccagcggcgccaccgccctgccccccaccagcgccgcccccagcgcccagggcagcccccagcccagcgccagcagcagcagccagttcagcaccagcggcggcccctgggccagagagagaagagccggcgaggagcccgtgcccggccccatgacccccacccagccccccccccccctgagcctgccccccgccagaagcgagagcgaggtgctggaggagatcagcagagcctgcgagaccctggtggagagagtgggcagaagcgccaccgaccccgccgaccccgtggacaccgccgagcccgccgacagcggcaccgagagactgctgccccccgcccaggccaaggaggaggccggcggcgtggccgccgtgagcggcagctgcaagagaagacagaaggagcaccagaaggagcacagaagacacagaagagcctgcaaggacagcgtgggcagaagacccagagagggcagagccaaggccaaggccaaggtgcccaaggagaagagcagaagagtgctgggcaacctggacctgcagagcgaggagatccagggcagagagaagagcagacccgacctgggcggcgccagcaaggccaagccccccaccgcccccgccccccccagcgcccccgcccccagcgcccagcccaccccccccagcgccagcgtgcccggcaagaaggccagagaggaggcccccggcccccccggcgtgagcagagccgacatgctgaagctgagaagcctgagcgagggcccccccaaggagctgaagatcagactgatcaaggtggagagcggcgacaaggagaccttcatcgccagcgaggtggaggagagaagactgagaatggccgacctgaccatcagccactgcgccgccgacgtggtgagagccagcagaaacgccaaggtgaagggcaagttcagagagagctacctgagccccgcccagagcgtgaagcccaagatcaacaccgaggagaagctgcccagagagaagctgaacccccccacccccagcatctacctggagagcaagagagacgccttcagccccgtgctgctgcagttctgcaccgaccccagaaaccccatcaccgtgatcagaggcctggccggcagcctgagactgaacctgggcctgttcagcaccaagaccctggtggaggccagcggcgagcacaccgtggaggtgagaacccaggtgcagcagcccagcgacgagaactgggacctgaccggcaccagacagatctggccctgcgagagcagcagaagccacaccaccatcgccaagtacgcccagtaccaggccagcagcttccaggagagcctgcaggaggagaaggagagcgaggacgaggagagcgaggagcccgacagcaccaccggcaccccccccagcagcgcccccgaccccaagaaccaccacatcatcaagttcggcaccaacatcgacctgagcgacgccaagagatggaagccccagctgcaggagctgctgaagctgcccgccttcatgagagtgaccagcaccggcaacatgctgagccacgtgggccacaccatcctgggcatgaacaccgtgcagctgtacatgaaggtgcccggcagcagaacccccggccaccaggagaacaacaacttctgcagcgtgaacatcaacatcggccccggcgactgcgagtggttcgccgtgcacgagcactactgggagaccatcagcgccttctgcgacagacacggcgtggactacctgaccggcagctggtggcccatcctggacgacctgtacgccagcaacatccccgtgtacagattcgtgcagagacccggcgacctggtgtggatcaacgccggcaccgtgcactgggtgcaggccaccggctggtgcaacaacatcgcctggaacgtgggccccctgaccgcctaccagtaccagctggccctggagagatacgagtggaacgaggtgaagaacgtgaagagcatcgtgcccatgatccacgtgagctggaacgtggccagaaccgtgaagatcagcgaccccgacctgttcaagatgatcaagttctgcctgctgcagagcatgaagcactgccaggtgcagagagagagcctggtgagagccggcaagaagatcgcctaccagggcagagtgaaggacgagcccgcctactactgcaacgagtgcgacgtggaggtgttcaacatcctgttcgtgaccagcgagaacggcagcagaaacacctacctggtgcactgcgagggctgcgccagaagaagaagcgccggcctgcagggcgtggtggtgctggagcagtacagaaccgaggagctggcccaggcctacgacgccttcaccctggtgagagccagaagagccagaggccagagaagaagagccctgggccaggccgccggcaccggcttcggcagccccgccgcccccttccccgagcccccccccgccttcagcccccaggcccccgccagcaccagcagatag

SEQ ID NO: 36344 - protein, 120 aa, Artificial Sequence
  derived and/or modified sequence
MESKEELAANNLNGENAQQENEGGEQAPTQNEEESRHLGGGEGQKPGGNIRRGRVRRLVPNFRWAIPNRHIEHNEARDDVERFVGQMMEIKRKTREQQMRHYMRFQTPEPDNHYDFCLIP

SEQ ID NO: 36345 - DNA, 363 bp, Artificial Sequence
  derived and/or modified sequence
atggagagcaaggaggagctagccgcaaacaacctgaacggggaaaatgcccagcaggaaaacgaggggggagaacaagcacctactcagaacgaggaagagtctcggcatctgggggggggggaaggtcagaagccgggcgggaacatcaggagggggcgggtccgcagattagtccctaactttaggtgggcaatcccgaatcgccacatcgaacataatgaagccagagacgacgtcgaacgattcgttggacagatgatggagatcaagcgtaagaccagggaacaacagatgaggcactatatgaggttccagacgccagagccagacaatcactacgacttctgcctcatcccatag

SEQ ID NO: 36346 - DNA, 363 bp, Artificial Sequence
  derived and/or modified sequence
atggagagtaaggaagagctagcagctaacaatcttaacggcgagaatgcacagcaggagaacgaaggaggagaacaggcacctacacagaacgaggaggagtctaggcacttaggcggcggcgaaggccagaaacccggaggaaatatcagaagggggcgagtcagaagactcgtgcctaactttcgctgggctattcccaaccgccacatcgagcataacgaggcacgggacgatgttgagagatttgtagggcaaatgatggagattaagcgcaagactagggaacagcagatgcgtcactatatgcgcttccagacaccagaacccgacaatcattatgatttctgcctcataccgtag

SEQ ID NO: 36347 - DNA, 363 bp, Artificial Sequence
  derived and/or modified sequence
atggagagcaaggaggagctggccgccaacaacctgaatggagaaaatgcccagcaggagaatgaaggaggagagcaggcccccacccagaatgaggaggagagccgccacctgggcggcggggagggccagaagccaggcggcaacatcagaagaggccgggtgcggcggctggtgcccaacttccgctgggccatccccaacagacacatcgagcacaatgaggccagagatgatgtggagagatttgtgggccagatgatggagatcaagaggaagacccgggagcagcagatgaggcactacatgaggttccagaccccagagccagacaaccactatgacttctgcctgatcccctag

SEQ ID NO: 36348 - DNA, 363 bp, Artificial Sequence
  derived and/or modified sequence
atggagagcaaggaggagctggccgccaacaacctgaacggcgagaatgcgcaacaagagaatgagggaggagagcaggctcccacgcagaatgaggaagagtcccgacacctcggaggcggcgaagggcagaaacccggagggaacattagacgcggcagggtgagaagactggtaccaaatttcagatgggctatccccaaccggcatattgagcataatgaagccagagacgacgttgagaggttcgtgggacagatgatggagattaaacgcaaaacgcgggagcaacagatgaggcactacatgaggtttcagacgcctgaacccgacaaccactacgatttctgtctgattccgtag

SEQ ID NO: 36349 - DNA, 363 bp, Artificial Sequence
  derived and/or modified sequence
atggagagcaaggaggagctggccgccaacaacctgaacggcgagaacgctcagcaggaaaatgagggaggcgaacaggccccaacccaaaacgaggaagagtctagacacctcggaggcggagagggccagaagccagggggaaacatcaggcgaggcagagtgcgccggctggtgccaaattttcgatgggctatcccaaataggcatattgaacacaatgaagcccgcgatgacgtcgaacgcttcgttggccaaatgatggaaatcaaaaggaaaactcgggaacagcagatgaggcattatatgaggttccagactcctgagccggataatcactatgacttctgcttgatcccctag

SEQ ID NO: 36350 - DNA, 363 bp, Artificial Sequence
  derived and/or modified sequence
atggaatctaaggaggagttagcagccaataatctcaacggcgaaaatgcccagcaggaaaacgaaggcggtgagcaagcccctacccaaaatgaggaagagagtaggcacctcggcggtggtgaagggcagaagccaggcggaaatattagaagagggcgagtacgaagactcgtgccaaacttccgttgggcgattcccaataggcacatcgagcataacgaggctcgggatgacgtggagcgttttgttgggcagatgatggagataaagaggaaaacaagagagcagcagatgcgtcattacatgcggttccagacccccgaacccgacaatcactatgacttctgtttgatcccttag

SEQ ID NO: 36351 - DNA, 363 bp, Artificial Sequence
  derived and/or modified sequence
atggagtcaaaggaggagctcgccgctaataacctgaatggtgagaatgcccagcaggaaaacgaggggggagagcaggcccctacacagaatgaggaagaatcaagacacttaggcggaggggaaggacaaaaacccggtggaaacattcgaagagggagagttagacggctcgtgcccaatttccgctgggctattccaaacagacatattgagcacaacgaagccagagatgatgttgaaaggttcgtcggacaaatgatggagattaagcggaagacccgggaacagcagatgcgccattacatgagattccaaacacccgaacctgacaaccattatgatttttgtctgattccatag

SEQ ID NO: 36352 - DNA, 1066 bp, Artificial Sequence
  derived and/or modified sequence
tggcgtcagagccgtcgtggctcgttccattctcggcggtggtacctgctcccggtggccctgaggacgtgtgggccaggggcggccccgaaattaggaagcggagggggagcaggagtaatggagtccaaagaggaactagcggcaaacaatctcaacggggaaaatgcccaacaagaaaacgaaggaggggagcaggcccccacgcagaatgaagaagaatcccgccatttgggagggggtgaaggccagaagcctggaggaaatatcaggcgggggcgagttaggcgacttgtccctaattttcgatgggccatacctaataggcatattgagcacaatgaagcgagagatgatgtagaaaggtttgtagggcagatgatggaaatcaagagaaagactagggaacagcagatgaggcactatatgcgcttccaaactcctgaacctgacaaccattatgacttttgcctcataccttgaatcctaaaagttttcgctgaggttaatgtgaacactgctttacaagcttgtatttttgtgatttactttttctgtaagccttttggggtttacacttaccagtttctaatggaaattagaattctaattgaatattgttttgtctcagcctaaaagttacggtcagcatggcaattcacctattttaggaaaaatactcttttcataatatgaaatgcataaagcagttcaaaaagcagtctgtattccatcatcttcctttttcattccagtccttatttttgtaagtattacttttcctcctccggctacctggactcaaaatctcagttgtctttgacagtttttttcttgtccctgaccaaaaaagaatgatcatacccagaattcaatgtttgatattttaagaatgtatgttctagtgtttttcagagtgagtctaccatctgtataaaaacaccttgggggcaggcaggggcatttaaaaatgtaggacctatcgtccagactcacagagtggggctccagaatctccatttttaacaaactctcttaagtaattctgatgtgtaccaaaatcagt

SEQ ID NO: 36353 - DNA, 1328 bp, Artificial Sequence
  derived and/or modified sequence
gtgaccggccaacactgagtgttgtctcgctctggcgtcagagccgtcgtggctcgttccattctcggcggtggtacctgctcccggtggccctgaggacgtgtgggccaggggcggccccgaaattaggaagcggagggggagcagtctgcaggtctgcggggctaagtgtcgcggcggcgcacctcgcgtcaagaatccggaggaggagactgcaaggataggcccaggagtaatggagtccaaagaggaactagcggcaaacaatctcaacggggaaaatgcccaacaagaaaacgaaggaggggagcaggcccccacgcagaatgaagaagaatcccgccatttgggagggggtgaaggccagaagcctggaggaaatatcaggcgggggcgagttaggcgacttgtccctaattttcgatgggccatacctaataggcatattgagcacaatgaagcgagagatgatgtagaaaggtttgtagggcagatgatggaaatcaagagaaagactagggaacagcagatgaggcactatatgcgcttccaaactcctgaacctgacaaccattatgacttttgcctcataccttgaatcctaaaagttttcgctgaggttaatgtgaacactgctttacaagcttgtatttttgtgatttactttttctgtaagccttttggggtttacacttaccagtttctaatggaaattagaattctaattgaatattgttttgtctcagcctaaaagttacggtcagcatggcaattcacctattttaggaaaaatactcttttcataatatgaaatgcataaagcagttcaaaaagcagtctgtattccatcatcttcctttttcattccagtccttatttttgtaagtattacttttcctcctccggctacctggactcaaaatctcagttgtctttgacagtttttttcttgtccctgaccaaaaaagaatgatcatacccagaattcaatgtttgatattttaagaatgtatgttctagtgtttttcagagtgagtctaccatctgtataaaaacaccttgggggcaggcaggggcatttaaaaatgtaggacctatcgtccagactcacagagtggggctccagaatctccatttttaacaaactctcttaagtaattctgatgtgtaccaaaatcagtgccattggtgtgtgtgtacgtaactatatacatatgtgtgtgtgtgtatatatataatgtgtcataaccgtaaacaataaacaatatcaagataaatctgactttgatgggcaagtaattaaaaaagaaaagtatgagaccttaaaa

SEQ ID NO: 36354 - DNA, 363 bp, Artificial Sequence
  derived and/or modified sequence
atggagagcaaggaggagctggccgccaacaacctgaacggcgagaacgcccagcaggagaacgagggcggcgagcaggcccccacccagaacgaggaggagagcagacacctgggcggcggcgagggccagaagcccggcggcaacatcagaagaggcagagtgagaagactggtgcccaacttcagatgggccatccccaacagacacatcgagcacaacgaggccagagacgacgtggagagattcgtgggccagatgatggagatcaagagaaagaccagagagcagcagatgagacactacatgagattccagacccccgagcccgacaaccactacgacttctgcctgatcccctag

SEQ ID NO: 36355 - protein, 576 aa, Artificial Sequence
  derived and/or modified sequence
MDVRFYPAAAGDPASLDFAQCLGYYGYSKFGNNNNYMNMAEANNAFFAASEQTFHTPSLGDEEFEIPPITPPPESDPALGMPDVLLPFQALSDPLPSQGSEFTPQFPPQSLDLPSITISRNLVEQDGVLHSSGLHMDQSHTQVSQYRQDPSLIMRSIVHMTDAARSGVMPPAQLTTINQSQLSAQLGLNLGGASMPHTSPSPPASKSATPSPSSSINEEDADEANRAIGEKRAAPDSGKKPKTPKKKKKKDPNEPQKPVSAYALFFRDTQAAIKGQNPNATFGEVSKIVASMWDSLGEEQKQVYKRKTEAAKKEYLKALAAYRASLVSKAAAESAEAQTIRSVQQTLASTNLTSSLLLNTPLSQHGTVSASPQTLQQSLPRSIAPKPLTMRLPMNQIVTSVTIAANMPSNIGAPLISSMGTTMVGSAPSTQVSPSVQTQQHQMQLQQQQQQQQQQMQQMQQQQLQQHQMHQQIQQQMQQQHFQHHMQQHLQQQQQHLQQQINQQQLQQQLQQRLQLQQLQHMQHQSQPSPRQHSPVASQITSPIPAIGSPQPASQQHQSQIQSQTQTQVLSQVSIF

SEQ ID NO: 36356 - DNA, 3121 bp, Artificial Sequence
  derived and/or modified sequence
gcggccgcggctcccgagctcctcgggctctgggtcccggcgcccctccggccgcgagtcccacgcgccacccccgggcgccctcgacggtggatctagcggcggcgaggaggcgggtcccggccccggcgaaccccagtcccggcccccggccccgggcccagcttcggcatggatgtgaggttctaccccgcggcggccggggaccctgccagcctggacttcgcgcagtgcctggggtactacggctacagcaagtttggaaataataataactatatgaatatggctgaggcgaacaatgcgttcttcgctgccagtgagcagacattccacacaccaagccttggggacgaggaattcgaaattccaccaatcacgcctcctccagagtcagaccctgccctaggcatgccggatgtactgctaccctttcaagccctcagcgatccattgccttcccagggaagtgaattcacaccccagtttccccctcaaagcctggacctcccttccattacaatctcaagaaatctcgtggaacaagatggcgtgcttcatagcagtgggttgcatatggatcagagccacacacaagtgtcccagtaccggcaggatccctccctgatcatgcggtccatcgtccacatgaccgatgctgcgcgttctggggtcatgcctcctgcccagctcaccaccatcaaccagtctcagctcagcgcccagttggggttgaatttgggaggtgccagtatgcctcacacatctccttcacctccagcaagcaaatcagccactccctccccttccagctccatcaatgaagaggatgctgatgaagccaacagagccattggagagaaaagagctgctccagactctggcaagaagcccaagactccaaagaaaaagaaaaagaaagatcccaatgagccacagaagccagtgtcagcatatgccctgtttttcagagacacacaggctgcaattaaaggtcaaaaccccaatgcaacctttggagaggtctcaaaaattgtagcatctatgtgggacagccttggagaagaacaaaagcaggtatataaaaggaaaacagaagctgccaaaaaagaatacctgaaggccctggcggcatacagggccagcctcgtttctaaggctgctgctgagtcagcagaagcccagaccatccgttctgttcagcagaccctggcgtcgaccaatctaacatcctctctccttctcaacactccactgtctcaacatggaacagtgtcagcatcacctcagactctccagcaatccctccctaggtcaatcgctcccaaacccttaaccatgagactccccatgaaccagattgtcacatcagtcaccattgcagccaacatgccctcgaacattggggctccactgataagctccatgggaacgaccatggttggctcagcaccctccacccaagtgagtccttcggtgcaaacccagcagcatcagatgcaattgcagcagcagcagcagcagcaacaacaacagatgcaacagatgcagcagcagcaactccagcagcaccaaatgcatcagcaaatccagcagcagatgcagcagcagcatttccagcaccacatgcagcagcacctgcagcagcagcagcagcatctccagcagcaaattaatcaacagcagctgcagcagcagctgcagcagcgcctccagctgcagcagctgcaacacatgcagcaccagtctcagccttctcctcggcagcactcccctgtcgcctctcagataacatcccccatccctgccatcgggagcccccagccagcctctcagcagcaccagtcgcaaatacagtctcagacacagactcaagtattatcgcaggtcagtattttctgaagacgcatatggcagacggatttgcgtataccaaggagagtggcataggagggaaaagcatatgtggctgaaacctgtaagttggtgttggttatgcagaaatgtgtaacagatcaaacggtcctctcaagtgtctattagataggcaataagaactgcagtgtagctgagtaacatcttttagctgactataaatcactttgtttttaaacaagaaaagctgtgctcttttatgtgatgccttttttatttattcaggctatacctacaatatgtgaatcaaactgtttaatgaatcctgggacatactgatgactataaactggcctctctgagtcatagaaaaatggccttatttctccagaagtgagtaaaccacacttccaggctatctgaactcctgaagccctaaaaataaaaagcacagttgtaactacctgaaatatgaagatccagtttcatacaaacatttgtatgacgtgaatagttgatggcatttttttgtcatgaaaaaaataatgtaaatcacagacttttgccaaagctcttattttttttcctaaatctctccagaaaaaaaatgcaagtgactaaattcaattattgactaatttccactttttatccatgacttctccaaatcaaaccacagtatatgttgtaacaatatctatgaccactgttagcccattatattcattccaattagaagaaatgtgaatactatattccgtgttttgagtgacaagtttcgaaaaataaaaacactgtatttttaaaagggaaatgcacttaaatgaaaacagttattacaaaagttaagatttaaaaagaaaaagcaagagtttttattatgatgtaataccagtagaatatttaaaaggcacaccacatctgaataatcaatgtaaatattttctttcaaagttgtaagttttcatatcatgtgctgtaaagttttcctaaatgaggctttaacgtaaacactggtgacataaaccattcattgctacgttgcttattgtgtttttatgctgttttatacttttttatgagttatgatagcagcaattaagttgtttgtattttgcttaactaaaacaaaaatgcttttatcttgctatagaataaacacatttcagtaaaaactgtggactgtattttgatgcaacaacaaagaaactgttcacttttcaaataaaatgatatgtcagatttc

SEQ ID NO: 36357 - DNA, 1731 bp, Artificial Sequence
  derived and/or modified sequence
atggacgtgagattctaccccgccgccgccggcgaccccgccagcctggacttcgcccagtgcctgggctactacggctacagcaagttcggcaacaacaacaactacatgaacatggccgaggccaacaacgccttcttcgccgccagcgagcagaccttccacacccccagcctgggcgacgaggagttcgagatcccccccatcacccccccccccgagagcgaccccgccctgggcatgcccgacgtgctgctgcccttccaggccctgagcgaccccctgcccagccagggcagcgagttcaccccccagttccccccccagagcctggacctgcccagcatcaccatcagcagaaacctggtggagcaggacggcgtgctgcacagcagcggcctgcacatggaccagagccacacccaggtgagccagtacagacaggaccccagcctgatcatgagaagcatcgtgcacatgaccgacgccgccagaagcggcgtgatgccccccgcccagctgaccaccatcaaccagagccagctgagcgcccagctgggcctgaacctgggcggcgccagcatgccccacaccagccccagcccccccgccagcaagagcgccacccccagccccagcagcagcatcaacgaggaggacgccgacgaggccaacagagccatcggcgagaagagagccgcccccgacagcggcaagaagcccaagacccccaagaagaagaagaagaaggaccccaacgagccccagaagcccgtgagcgcctacgccctgttcttcagagacacccaggccgccatcaagggccagaaccccaacgccaccttcggcgaggtgagcaagatcgtggccagcatgtgggacagcctgggcgaggagcagaagcaggtgtacaagagaaagaccgaggccgccaagaaggagtacctgaaggccctggccgcctacagagccagcctggtgagcaaggccgccgccgagagcgccgaggcccagaccatcagaagcgtgcagcagaccctggccagcaccaacctgaccagcagcctgctgctgaacacccccctgagccagcacggcaccgtgagcgccagcccccagaccctgcagcagagcctgcccagaagcatcgcccccaagcccctgaccatgagactgcccatgaaccagatcgtgaccagcgtgaccatcgccgccaacatgcccagcaacatcggcgcccccctgatcagcagcatgggcaccaccatggtgggcagcgcccccagcacccaggtgagccccagcgtgcagacccagcagcaccagatgcagctgcagcagcagcagcagcagcagcagcagcagatgcagcagatgcagcagcagcagctgcagcagcaccagatgcaccagcagatccagcagcagatgcagcagcagcacttccagcaccacatgcagcagcacctgcagcagcagcagcagcacctgcagcagcagatcaaccagcagcagctgcagcagcagctgcagcagagactgcagctgcagcagctgcagcacatgcagcaccagagccagcccagccccagacagcacagccccgtggccagccagatcaccagccccatccccgccatcggcagcccccagcccgccagccagcagcaccagagccagatccagagccagacccagacccaggtgctgagccaggtgagcatcttctag

SEQ ID NO: 36358 - DNA, 1731 bp, Artificial Sequence
  derived and/or modified sequence
atggacgtcagattctatcctgccgcagctggagacccagcctcactggactttgcacagtgcctaggctactacggttactcaaagtttgggaacaacaataattacatgaacatggcggaagccaataacgccttcttcgctgcctccgagcagacttttcatactccatccttaggagatgaagagttcgaaatcccacctattactccccctcccgaatcagatccagccctcggcatgcctgacgtgctactgccctttcaggccctttcagaccctctgcccagccagggtagtgaattcactcctcagttccccccccagtctctggacttaccctccatcaccatcagtcggaacctggtcgaacaggacggtgtgcttcactcctccgggctccatatggatcagtctcatacccaggtttctcagtatcggcaggatccatcactgattatgcgttctatcgtgcatatgaccgatgcagcgaggagcggcgtcatgccaccagcccaactaacaactatcaatcagagccagctgagtgcccagctcggtttgaacttgggaggtgccagtatgccccatacaagtcctagcccccccgcgtccaagagtgccactccaagtccttctagctccatcaatgaggaggacgccgacgaagctaatcgcgcaattggtgagaaaagagccgcccccgattctggaaaaaaaccaaagaccccgaagaagaaaaaaaagaaggacccaaatgaaccccagaaacccgtttccgcctacgcgctgttctttcgagatacacaagcagcaattaaaggccagaatcccaatgcaacttttggcgaggtatctaaaatcgtggccagcatgtgggacagcctgggtgaggaacagaaacaggtctataagcggaaaacggaggccgctaaaaaagaatatctgaaggcgctggccgcctacagagcctccttggtgtccaaagcggctgccgagtcggccgaggctcagaccatccggagcgtccagcagacactggcttccacgaacctaacgtcctctctgttgctgaatactccgttgtcccagcacggcacggtgtccgctagtccccaaaccttgcaacagagtctcccccgcagtattgctccgaaaccactcacgatgagattgccaatgaaccagatcgtgacgagtgttaccatagctgcaaacatgccgagcaacataggcgctccgctgatttctagcatggggactaccatggtcggcagtgctcccagcacacaggtctcaccatcggtccaaacgcagcagcatcaaatgcagctgcagcagcagcagcagcaacagcagcaacagatgcagcagatgcagcagcagcagctccaacagcaccagatgcaccaacaaattcaacaacagatgcagcaacagcattttcagcaccatatgcaacagcacctgcaacagcagcagcagcatttacagcaacagattaaccagcagcaactccagcagcagcttcagcagagattgcagcttcagcagcttcagcacatgcagcatcaatcacagccctcaccccgccagcacagtccggtcgcgtcacaaattacatcaccaattcccgcaatcggttctcctcagccagcttcacaacagcatcagagtcaaatccagtcccagactcagacacaggtgctctcccaagtgagtattttctag

SEQ ID NO: 36359 - DNA, 1731 bp, Artificial Sequence
  derived and/or modified sequence
atggatgtgcgcttctacccagctgctgctggggaccctgccagcctggactttgcccagtgcctgggctactacggctacagcaagtttggaaacaacaacaactacatgaacatggccgaggccaacaatgccttctttgctgccagcgagcagaccttccacacccccagcctgggagatgaggagtttgagatcccccccatcaccccacctcctgagagtgaccctgccctgggcatgccagatgtgctgctgcccttccaggccctgagtgaccccctgcccagccagggcagcgagttcaccccccagtttcctccccagagcctggacctgcccagcatcaccatcagcaggaacctggtggagcaggatggagtgctgcacagcagcggcctgcacatggaccagagccacacccaggtgtcccagtaccggcaggaccccagcctcatcatgaggagcatcgtgcacatgacagatgctgcccggtctggagtgatgcccccagcccagctgaccaccatcaaccagagccagctgagcgcccagctgggcctgaacctgggcggggcctccatgccccacaccagccccagccccccagccagcaagagcgccacccccagccccagcagcagcatcaatgaagaagatgctgatgaggccaacagagccatcggggagaagagagctgccccagattctgggaagaagcccaagacccccaagaagaagaagaagaaggaccccaatgagccccagaagcctgtgtctgcctatgccctcttcttccgggacacccaggccgccatcaagggccagaaccccaatgccaccttcggggaggtgtccaagatcgtggcctccatgtgggacagcctgggggaggagcagaagcaggtgtacaagaggaagacagaggccgccaagaaggagtacctgaaggccctggccgcctaccgggccagcctggtgtccaaggctgctgctgagagcgctgaggcccagaccatccgctctgtgcagcagaccctggccagcaccaacctgaccagcagcctgctgctgaacacccccctgagccagcacggcaccgtgtctgccagcccccagaccctgcagcagagcctgcccaggagcatcgcccccaagcccctgaccatgaggctgcccatgaaccagatcgtgacctctgtgaccatcgccgccaacatgcccagcaacattggagcccccctcatcagctccatgggcaccaccatggtgggcagcgcccccagcacccaggtgagccccagcgtgcagacccagcagcaccagatgcagctgcagcagcagcagcagcagcagcagcagcagatgcagcagatgcagcagcagcagctgcagcagcaccagatgcaccagcagatccagcagcagatgcagcagcagcacttccagcaccacatgcagcagcacctgcagcagcagcagcagcacctgcagcagcagatcaaccagcagcagctgcagcagcagctgcagcagaggctgcagctgcagcagctgcagcacatgcagcaccagagccagcccagcccccggcagcacagccctgtggccagccagatcaccagccccatcccagccatcggcagcccccagcctgccagccagcagcaccagagccagatccagagccagacccagacccaggtgctgagccaggtgtccatcttctag

SEQ ID NO: 36360 - DNA, 1731 bp, Artificial Sequence
  derived and/or modified sequence
atggacgtgcggttctaccccgccgccgccggcgaccccgccagcctagacttcgcacagtgcctgggttactatggttacagtaagtttggtaacaacaacaactacatgaatatggccgaggctaacaacgcatttttcgctgcctcagagcagacatttcataccccatcgctgggagacgaggaatttgagatccccccaatcacccccccacccgagtctgatccggctctcggtatgcccgatgtcctattgccatttcaggccttgtccgatcccttgccatctcaaggcagtgagtttaccccccagttccctccacagtcccttgatttgccctctatcacaatcagtcgtaatttagtggagcaggacggagttctacattcctccgggcttcacatggatcaatcacatacgcaagtgtcacaataccgacaggatccatctctcattatgagatccattgttcacatgaccgacgctgcgcgcagtggtgtgatgccacctgcccagctgaccacaattaaccagagtcagctatccgcccagcttggactgaatctcggcggagcctcaatgccgcatacttctccaagtcctccagcctccaaaagcgctactccaagcccctcctcctctataaatgaagaggacgcagacgaggccaaccgcgccataggcgaaaagcgagctgctcctgattccggaaaaaaacccaaaactcctaagaaaaaaaagaaaaaggatcccaacgagccgcagaaaccagtgagcgcctacgctctcttctttcgcgacacccaggcggccatcaaaggtcaaaaccccaatgcaacatttggcgaggtgtcgaagatagtggcctctatgtgggattccctgggggaagagcagaagcaagtgtataagcggaaaactgaagcagccaagaaggagtatctgaaagccctcgcagcttaccgggcctcactggtttctaaagcagcagccgagtcagccgaggcacagactattagatcggtccaacaaaccctggctagcactaatttgacgtcctccttgttgctaaacacccccctgtctcagcatggtactgtgagcgccagcccacagactctccagcagtccctgccacgcagtattgcgccaaaaccccttactatgagactgccaatgaatcagatcgttacttcggtaaccattgcagccaatatgccctcgaacattggggctccactgatcagctccatgggtaccaccatggttggcagtgcaccttccacccaggtttccccatcagttcagacccagcagcatcagatgcagctgcagcaacagcagcagcagcagcaacagcaaatgcagcagatgcagcagcagcagctgcagcagcaccaaatgcatcaacagatccagcagcaaatgcagcaacagcattttcagcatcatatgcagcagcacctgcagcagcaacagcaacacctgcaacagcagatcaaccaacaacagctgcagcagcagctgcagcagcggttgcagctgcagcaactgcagcatatgcagcaccagtcacagccatctcctagacagcattcccccgtggcctctcagatcacaagccccatccccgcaattggttcaccgcaaccggccagtcagcaacatcagtcacagatacaatctcagacacagactcaggttctgtcacaggtctctatattttag

SEQ ID NO: 36361 - DNA, 1731 bp, Artificial Sequence
  derived and/or modified sequence
atggacgtgaggttctatcccgctgcggctggcgatcctgctagcctggacttcgcccagtgcctgggctattacggatacagcaaatttgggaacaataacaactacatgaacatggcggaagccaataatgccttcttcgcagccagcgagcagacatttcacaccccctctctgggcgatgaagagtttgaaattccaccaatcacaccccctccagaatcagaccccgctctgggcatgcccgatgtcctgctgccgtttcaagcgttgtccgacccccttccaagccagggcagcgaatttacaccccaattcccccctcagtcactggaccttccctctatcaccatttcaagaaatttggtcgagcaggatggtgtacttcacagtagcggcctccacatggatcagtcccacacccaggtgtcccagtacaggcaggacccctcacttatcatgcgttcgatagtccacatgacagatgccgctcggtctggagtaatgccgccagcccagctgaccactatcaatcagagtcagctttccgcccagctcggcctgaacctgggtggggcatcgatgcctcatacgtccccaagccccccagccagcaaatctgccactcccagcccctcctcttctattaacgaagaagacgcggacgaagccaatcgagcaatcggcgagaagcgcgctgcacctgattctggcaagaagcccaaaactccaaaaaagaagaaaaagaaagaccccaacgaaccccaaaagccagtgtcagcgtacgcactgtttttcagagacacccaggctgccattaagggccagaatccaaatgccacctttggggaggtgagcaaaatcgtcgcctctatgtgggattcactaggcgaggagcagaagcaagtgtacaaacggaagaccgaggctgctaaaaaggagtacttgaaagccttagccgcatacagagcttcactagtatccaaagccgctgctgagagtgctgaggcccagacaatccgatctgtgcaacagaccttagccagtaccaatctgacctcttcgttgctactgaataccccgctgagccagcatggtaccgtgagtgcatcaccccagacattgcagcaaagcttgcctcgatcaatcgcaccaaagccgctgacaatgaggttgcccatgaaccaaattgtcacatccgtcaccattgcagcaaacatgcctagtaacatcggagccccactcatctcctccatggggacaactatggtggggagcgcacctagtacccaggtttcaccatccgtgcaaacacagcaacaccagatgcagctccagcaacagcagcagcagcagcagcaacaaatgcagcagatgcagcagcagcaactgcagcagcatcagatgcatcagcaaatacagcagcagatgcagcaacagcatttccagcaccatatgcagcagcacctacagcagcaacagcagcatttgcagcagcagattaaccaacaacaactgcaacaacagctccagcaacggctgcagctccagcaactccagcacatgcagcatcagagccagccatctcccaggcagcactctcccgtggcatcccagataacgtcccccatccccgctataggcagccctcaaccagcaagccagcaacatcaaagtcaaatccaatctcaaacacagacacaagtgctaagtcaggtgtccatcttctag

SEQ ID NO: 36362 - protein, 798 aa, Artificial Sequence
  derived and/or modified sequence
MGKASPASGLSRPKTLVSPLRSNQWSLQKGLPEQYYSLTWFLSPILGLIFTPLIGSASDRCTLSWGRRRPFILALCVGVLFGVALFLNGSAIGLALGDVPNRQPIGIVLTVLGVVVLDFSADATEGPIRAYLLDVVDSEEQDMALNIHAFSAGLGGAIGYVLGGLDWTQTFLGSWFRTQNQVLFFFAAIIFTVSVALHLFSIDEEQYSPQQERSAEEPGALDGGEPHGVPAFPDEVQSEHELALDYPDVDIMRSKSDSALHVPDTALDLEPELLFLHDIEPSIFHDASYPATPRSTSQELAKTKLPRLATFLKEAAKEDETLLDNHLNEAKVPNGSGSPTKDALGGYTRVDTKPSATSSSMRRRRHAFRRQASSTFSYYGKLGSHCYRYRRANAVVLIKPSRSMSDLYDMQKRQRQHRHRNQSGATTSSGDTESEEGEGETTVRLLWLSMLKMPRELMRLCLCHLLTWFSVIAEAVFYTDFMGQVIFEGDPKAPSNSTAWQAYNAGVKMGCWGLVIYAATGAICSALLQKYLDNYDLSVRVIYVLGTLGFSVGTAVMAMFPNVYVAMVTISTMGIVSMSISYCPYALLGQYHDIKQYIHHSPGNSKRGFGIDCAILSCQVYISQILVASALGGVVDAVGTVRVIPMVASVGSFLGFLTATFLVIYPNVSEEAKEEQKGLSSPLAGEGRAGGNSEKPTVLKLTRKEGLQGPVETERLQVLTSVRSRHIGWCRSCWRVFFFMIILEKKFSFPQCGSLRRMTYLLFLSELDTLCPGQPCPWAATAHQSWEEAGPGGLGRRQ

SEQ ID NO: 36363 - DNA, 2397 bp, Artificial Sequence
  derived and/or modified sequence
atgggcaaggccagccccgccagcggcctgagcagacccaagaccctggtgagccccctgagaagcaaccagtggagcctgcagaagggcctgcccgagcagtactacagcctgacctggttcctgagccccatcctgggcctgatcttcacccccctgatcggcagcgccagcgacagatgcaccctgagctggggcagaagaagacccttcatcctggccctgtgcgtgggcgtgctgttcggcgtggccctgttcctgaacggcagcgccatcggcctggccctgggcgacgtgcccaacagacagcccatcggcatcgtgctgaccgtgctgggcgtggtggtgctggacttcagcgccgacgccaccgagggccccatcagagcctacctgctggacgtggtggacagcgaggagcaggacatggccctgaacatccacgccttcagcgccggcctgggcggcgccatcggctacgtgctgggcggcctggactggacccagaccttcctgggcagctggttcagaacccagaaccaggtgctgttcttcttcgccgccatcatcttcaccgtgagcgtggccctgcacctgttcagcatcgacgaggagcagtacagcccccagcaggagagaagcgccgaggagcccggcgccctggacggcggcgagccccacggcgtgcccgccttccccgacgaggtgcagagcgagcacgagctggccctggactaccccgacgtggacatcatgagaagcaagagcgacagcgccctgcacgtgcccgacaccgccctggacctggagcccgagctgctgttcctgcacgacatcgagcccagcatcttccacgacgccagctaccccgccacccccagaagcaccagccaggagctggccaagaccaagctgcccagactggccaccttcctgaaggaggccgccaaggaggacgagaccctgctggacaaccacctgaacgaggccaaggtgcccaacggcagcggcagccccaccaaggacgccctgggcggctacaccagagtggacaccaagcccagcgccaccagcagcagcatgagaagaagaagacacgccttcagaagacaggccagcagcaccttcagctactacggcaagctgggcagccactgctacagatacagaagagccaacgccgtggtgctgatcaagcccagcagaagcatgagcgacctgtacgacatgcagaagagacagagacagcacagacacagaaaccagagcggcgccaccaccagcagcggcgacaccgagagcgaggagggcgagggcgagaccaccgtgagactgctgtggctgagcatgctgaagatgcccagagagctgatgagactgtgcctgtgccacctgctgacctggttcagcgtgatcgccgaggccgtgttctacaccgacttcatgggccaggtgatcttcgagggcgaccccaaggcccccagcaacagcaccgcctggcaggcctacaacgccggcgtgaagatgggctgctggggcctggtgatctacgccgccaccggcgccatctgcagcgccctgctgcagaagtacctggacaactacgacctgagcgtgagagtgatctacgtgctgggcaccctgggcttcagcgtgggcaccgccgtgatggccatgttccccaacgtgtacgtggccatggtgaccatcagcaccatgggcatcgtgagcatgagcatcagctactgcccctacgccctgctgggccagtaccacgacatcaagcagtacatccaccacagccccggcaacagcaagagaggcttcggcatcgactgcgccatcctgagctgccaggtgtacatcagccagatcctggtggccagcgccctgggcggcgtggtggacgccgtgggcaccgtgagagtgatccccatggtggccagcgtgggcagcttcctgggcttcctgaccgccaccttcctggtgatctaccccaacgtgagcgaggaggccaaggaggagcagaagggcctgagcagccccctggccggcgagggcagagccggcggcaacagcgagaagcccaccgtgctgaagctgaccagaaaggagggcctgcagggccccgtggagaccgagagactgcaggtgctgaccagcgtgagaagcagacacatcggctggtgcagaagctgctggagagtgttcttcttcatgatcatcctggagaagaagttcagcttcccccagtgcggcagcctgagaagaatgacctacctgctgttcctgagcgagctggacaccctgtgccccggccagccctgcccctgggccgccaccgcccaccagagctgggaggaggccggccccggcggcctgggcagaagacagtag

SEQ ID NO: 36364 - DNA, 2397 bp, Artificial Sequence
  derived and/or modified sequence
atgggtaaggctagccccgctagcgggctgagccgcccgaagacactagttagcccactgcggagcaatcagtggtctttgcagaagggacttcccgagcagtattattccctgacctggtttttgtccccaatcctgggccttatctttacaccactgattggatctgcatccgacaggtgcactctgagttgggggagacggcgcccatttattctggccctgtgcgtgggcgtgttatttggtgttgcccttttcctcaacggatctgcaattgggctggccctcggagacgtgcccaatagacagccaatagggatcgttctgaccgtgctgggagtggtcgtgctggacttttccgctgacgcaaccgagggcccgatacgggcttatctacttgatgtggtggatagcgaggagcaggacatggcgctcaacatccacgcttttagcgccgggttgggcggcgcaatagggtacgtcctcggaggcctcgattggactcagacattcctggggtcatggttcaggactcagaatcaggtcctattcttcttcgccgctattatctttaccgtgagcgttgcactacatttattctccatagacgaggaacagtactcaccacaacaggaaagaagcgctgaggagccaggcgctctggatggcggcgaaccccacggagtccctgcctttcctgatgaggtccagagtgagcacgaacttgccctagattaccccgatgtcgatattatgaggtctaagtccgattccgcactgcatgtgccagacactgcactggacctcgaacccgaactactgtttctgcacgacatcgagccaagtatttttcatgacgcaagttacccggcaacaccccgcagcacctcccaggagttggcgaagaccaaactgccacgcctggcaaccttcctgaaggaagcggcaaaggaggacgagactttgctcgacaatcacctgaatgaagcaaaggtgcctaatggtagcggtagcccaaccaaagatgcactcggcggctatactcgcgtagacacaaagccatccgctaccagctcctccatgcgcagacggaggcacgccttcagaaggcaggcgtcctctacctttagttattacggaaaactgggttcccattgttaccgctacagacgcgcaaatgctgtggtactgatcaaaccctctcggtccatgtcagacctgtatgatatgcaaaagaggcagcggcagcaccgccaccggaatcagtcgggagcaacaacttcttcaggcgatactgaatctgaggagggtgaaggggaaaccacagtgagactactgtggctgagtatgctgaaaatgccaagagagttgatgaggctgtgtctatgtcatctgctcacatggttcagcgtgattgccgaggctgtattctacactgattttatggggcaagtcatctttgaaggtgacccaaaggccccatcaaactccactgcctggcaggcctacaatgccggggtgaaaatgggatgctggggccttgtcatctacgcggcaaccggcgcgatttgctccgccctgctgcagaagtatctagacaactacgatctgtccgtccgcgtaatttacgtgctgggaactctggggtttagcgtcgggactgcagtgatggccatgttcccgaatgtgtatgttgccatggtaactatttctactatgggcattgtgtcgatgagtatatcatactgcccgtacgccctactcggccagtatcatgatatcaagcagtacatacaccatagccctggtaattctaagagaggatttgggatcgactgcgctatcctatcttgccaagtgtatatttcgcagatcttggtagcttcagccctggggggcgtggtagatgcggtgggtacggtacgagtgattcccatggtggcaagtgtgggatcttttctgggttttctgacagcgacattcctggtgatctatcccaacgtatctgaggaagccaaggaagaacaaaaagggcttagttcacccctcgctggagaagggcgcgctggcggtaattctgagaaacccacagtcctcaagctgacacgtaaagagggtctccagggaccagttgagacagaaaggctccaggtcctgacttctgtcaggtcccgacacatagggtggtgccgatcatgctggagggttttctttttcatgataattctagaaaagaagttttccttcccacaatgtgggagtttgcgccggatgacctatctccttttcctgtccgagctcgacaccttgtgtccaggacaaccctgcccgtgggcagccacagcccatcagagttgggaagaggctggtccggggggtctcggtagacgtcaatag

SEQ ID NO: 36365 - DNA, 2397 bp, Artificial Sequence
  derived and/or modified sequence
atgggcaaggccagccctgccagcggcctgagccggcccaagaccctggtgagccccctgcggagcaaccagtggagcctgcagaagggcctgcctgagcagtactacagcctgacctggttcctgagccccatcctgggcctcatcttcacccccctcatcggcagcgccagtgaccgctgcaccctgtcctggggcagaagaagacccttcatcctggccctgtgtgtgggcgtgctgtttggagtggccctcttcctgaatggcagcgccatcggcctggccctgggagatgtgcccaaccggcagcccatcggcatcgtgctgactgtgctgggcgtggtggtgctggacttcagcgcagatgccacagagggccccatccgggcctacctgctggatgtggtggacagcgaggagcaggacatggccctgaacatccacgccttctctgctggcctgggcggggccatcggctacgtgctgggcggcctggactggacccagaccttcctgggctcctggttccgcacccagaaccaggtgctcttcttctttgctgccatcatcttcaccgtgtctgtggccctgcacctgttcagcattgatgaggagcagtacagcccccagcaggagaggtctgctgaggagcccggggccctggatggaggagagccccatggagtgcctgccttcccagatgaggtgcagagcgagcacgagctggccctggactacccagatgtggacatcatgaggagcaagagtgacagcgccctgcacgtgcctgacacagccctggacctggagcctgagctgctcttcctgcatgacatcgagcccagcatcttccatgatgccagctacccagccacccccaggagcaccagccaggagctggccaagaccaagctgccccggctggccaccttcctgaaggaggccgccaaggaggatgagaccctgctggacaaccacctgaatgaggccaaggtgcccaacggcagcggcagccccaccaaggatgccctgggcggctacaccagggtggacaccaagcccagcgccaccagcagctccatgagaagaagaagacatgccttccggcggcaggccagcagcaccttctcctactacggcaagctgggcagccactgctaccgctaccgccgggccaatgctgtggtgctgatcaagcccagccgctccatgtctgacctgtatgacatgcagaagaggcagaggcagcaccgccacaggaaccagagcggggccaccaccagcagcggggacacagagagcgaggagggggagggggagaccaccgtgcggctgctgtggctgtccatgctgaagatgccccgggagctgatgaggctgtgcctgtgccacctgctgacctggttctctgtgattgctgaggccgtgttctacacagacttcatgggccaggtgatctttgaaggagaccccaaggcccccagcaacagcacagcctggcaggcctacaatgccggcgtgaagatgggctgctggggcctggtgatctatgctgccaccggggccatctgcagcgccctgctgcagaagtacctggacaactatgacctgtctgtgcgggtcatctacgtgctgggcaccctgggcttctctgtgggcacagctgtgatggccatgttccccaacgtgtatgtggccatggtgaccatcagcaccatgggcatcgtgtccatgagcatctcctactgcccctatgccctgctgggccagtaccatgacatcaagcagtacatccaccacagccctggcaacagcaagaggggctttggaattgactgtgccatcctgagctgccaggtgtacatcagccagatcctggtggccagcgccctgggcggcgtggtggatgctgtgggcaccgtgcgggtcatccccatggtggcctctgtgggcagcttcctgggcttcctgacagccaccttcctggtgatctacccaaatgtgtctgaggaggccaaggaggagcagaagggcctgagcagccccctggccggggagggccgggccggcggcaacagcgagaagcccaccgtgctgaagctgaccaggaaggagggcctgcagggccctgtggagacagagcggctgcaggtgctgacctctgtgcgcagccgccacatcggctggtgccgcagctgctggagggtcttcttcttcatgatcatcctggagaagaagttctccttcccccagtgtggcagcctgcggaggatgacctacctgctcttcctgtctgagctggacaccctgtgccccggccagccctgcccctgggccgccacagcccaccagagctgggaggaggccggccctgggggcctgggccggcggcagtag

SEQ ID NO: 36366 - DNA, 2397 bp, Artificial Sequence
  derived and/or modified sequence
atgggcaaggccagccccgccagcggcctgagccggcccaagaccttggtgtctccactgaggtcaaatcagtggagtctgcaaaagggtcttcctgaacagtattacagtctaacatggttcttgtcacctatcctaggtcttattttcaccccactcatcggatccgcctcggacagatgtacactctcctggggtcggaggagaccgtttatactcgccctttgcgtgggtgttctcttcggagtcgccttgtttctcaatggcagtgccattggacttgcccttggtgatgtgcccaacaggcagcccatcgggatagtgcttaccgtgctgggagtagtcgttttggatttcagcgctgatgccacggaaggccctatccgcgcctacctactggacgtggttgatagcgaagagcaggacatggccctgaacattcatgcattcagcgccggcctgggcggcgctatcggctacgtgctgggcggcctggattggacccaaaccttcctcggtagctggtttcgcacccaaaatcaggtattgtttttctttgcagccatcatatttaccgtgtccgtcgctctccatttgttcagcatcgatgaagagcagtattctccgcagcaggagagaagtgcagaggagcccggcgcactcgacggcggggaaccccacggcgtgcccgccttcccggatgaagttcagtccgaacatgaactggccctggactacccggacgtcgacatcatgcggtccaaatcggacagtgccctgcatgtgcccgatacagccctggatctggaacctgagcttttgtttctgcatgacattgaaccatcaatcttccatgatgctagctaccccgccacgcccaggagcacctctcaagagttggccaaaaccaagctgccacggctggcaactttcctgaaggaagcagctaaggaggacgagacactgttagataatcatctcaatgaggcaaaggtgcccaatggtagtggttccccaaccaaggatgcactgggggggtacacacgggtggacactaaaccttcagccacttcatcctcaatgaggaggaggcgacatgccttccgacgacaggcctctagtactttcagttattacggtaagctgggcagtcactgctataggtataggagagctaacgccgtcgtccttatcaaacccagtcgatcaatgagcgacctttacgacatgcaaaagcgccaacggcagcaccgtcacaggaatcagagtggcgccaccacaagctctggagacacggaatccgaggaaggtgagggagagactaccgtaaggcttttgtggcttagtatgctcaaaatgccaagagagctcatgcgactgtgtctgtgtcaccttctcacctggttttccgtaatcgccgaagctgtcttctataccgacttcatgggtcaggtcatcttcgaaggcgatcccaaggctccttcaaacagcaccgcttggcaggcatacaatgccggggtaaagatgggttgttggggactcgtgatctatgctgccacaggtgccatttgtagcgcattgctccaaaagtatttggacaattatgacttgagtgtacgagtcatctatgttctggggactctgggattctctgtaggcactgcggtgatggcgatgttccctaacgtttacgtggcgatggttacaatttccacgatgggcatcgtgtctatgtcaataagttattgcccttatgcccttcttggccagtatcacgatattaaacagtacatacatcacagccctgggaacagcaaaagggggttcgggatagactgtgcaattctgagttgccaggtatatatatcccagatcctggttgcatctgcactaggaggtgtcgtcgatgcggttgggacggtgagggttatccccatggtcgcgtcggttggctcttttctgggctttctcacagctacttttctagtgatttatcctaacgtgtctgaagaagctaaagaggagcagaagggacttagttctcccctcgcgggcgaaggtcgcgctggtggtaactcggagaaacccacagttttaaagctgacgcggaaggaagggcttcagggacccgtggaaaccgagcggctgcaggtgctgacctccgtccgttctaggcacataggctggtgtcggagctgctggagagtcttcttttttatgatcatcctggagaaaaagttcagcttcccgcagtgtggctcactgagaagaatgacatacctgctcttcttgtcagagctggatactctctgtcctggtcagccctgtccctgggctgcgactgcacatcagagttgggaagaggccggaccgggtgggctgggccgacgccagtag

SEQ ID NO: 36367 - DNA, 2397 bp, Artificial Sequence
  derived and/or modified sequence
atgggtaaggcctctcccgcaagcgggctgagtcgtcccaaaaccctggtgtctcctctccggagcaaccagtggtctctgcagaagggattacccgagcagtattactcactgacctggttcttatccccaatccttggcctgatattcactcccttaatagggtccgcaagcgacaggtgcaccctttcttgggggaggagaagacctttcatcctggcgctctgcgtcggtgtgctctttggagtagccttgttccttaacggatccgccatcggtctggccctcggagacgtaccaaaccggcagcctataggcattgtcctgactgtgctgggggtagtggtccttgatttcagtgctgatgccacggaaggcccaatacgggcttacttgcttgacgttgtggactccgaagagcaagacatggctcttaacattcacgccttcagtgcgggattgggcggagctataggttatgtgcttggtggacttgactggacacagacgttcctcggctcctggttcagaacacagaaccaggttctgtttttctttgctgctatcatattcaccgtgtcagtagcccttcacttgttcagcattgatgaggagcaatattctccccagcaagagcggtccgctgaagaaccaggcgctttggacggcggtgagccgcacggagtgcctgcatttcccgacgaggtgcagtccgaacacgaacttgctcttgactacccagacgtggatatcatgcgttccaagtctgattccgcgctgcacgtgccagataccgcactggatctagagcccgaacttttatttttgcacgatatcgagccttccatcttccatgacgcatcctaccccgctaccccgagaagcacgagccaggagcttgcgaagaccaagctgcctcgtttagccactttccttaaagaggccgcaaaggaggatgagaccctgctcgacaatcatttaaacgaggcgaaagtgcccaacgggagcgggagccccactaaagatgcccttggagggtacactcgcgttgacacaaaacccagcgcaacgtcgagttcaatgagaaggcggaggcacgcttttaggaggcaagcctctagcactttctcgtactacggcaagctggggagccactgttaccggtacaggcgcgcaaatgctgtggtgctcattaaacctagtcgctcaatgtctgacctgtacgacatgcaaaagcggcagaggcagcacagacaccggaatcagagtggggcaacaacctctagcggggatactgaatcggaagaaggagagggagagactactgtgagactgctctggctctctatgctgaaaatgccgcgtgaactgatgcgactgtgcctctgccacctgctgacttggttctctgtgatcgctgaagcagtgttttatacagatttcatgggccaagtgatttttgaaggtgatccaaaagcaccttctaatagcacagcttggcaagcttacaacgccggagtaaagatgggatgttgggggctggtcatctacgccgcaacaggggcaatctgcagcgcactcctccaaaaatatctggataattacgacctgagcgtccgcgtgatttacgtgcttgggaccctcgggttttcagtcgggacagccgttatggcaatgttccctaatgtgtatgtagccatggtcactatatctacgatgggcatagtaagcatgagcatatcgtattgcccatacgccctattagggcaatatcacgatattaagcagtatatccaccacagtcctggtaatagcaaacgcggtttcggcatagattgcgccatcctgtcttgccaagtatacattagccaaatactggtagcgagcgctcttggcggtgtcgtggacgctgtcggaacggtgcgcgtgataccaatggtggcatccgtgggatcatttctaggatttctcactgccacctttctagtgatctaccccaacgtttcagaggaggctaaggaggaacagaaggggctgtccagccctctggctggagaagggagggctggcggtaacagcgagaagccaacagtgctgaaactaactagaaaggagggcttgcagggccctgtggagactgagcgccttcaggtcctcacgtctgtgcgcagcaggcacataggctggtgcagatcatgttggcgcgttttctttttcatgataattttggagaaaaagttcagcttccctcagtgcgggtctctgcgcaggatgacgtacctcctgtttttatcggaactcgatacgttgtgtcccggtcagccatgcccatgggccgcaacggcacaccagtcatgggaggaagccggacctggcggactcggacggagacaatag

SEQ ID NO: 36368 - DNA, 2397 bp, Artificial Sequence
  derived and/or modified sequence
atgggtaaggcctccccagcctccggactctcacgccctaaaacacttgtctccccgctgcgatccaaccagtggtcactacagaagggtctgccggaacaatactactctctgacgtggttcctctcccccatactcggactcatcttcactcccctaatcgggtcggcctccgatcgatgcacacttagctggggtcgaaggcggccgttcatacttgctttgtgtgttggagtcctattcggggtcgcacttttcctaaacggctcggcaattggcctggcattgggtgacgtacctaatcgccagcccattgggatcgtgcttactgtcctgggggtcgttgtgctagacttttcagccgatgccaccgagggccctatccgggcttatctcctagacgtcgtggattccgaggagcaggatatggctctcaacattcacgcctttagcgccggtttggggggcgcgatcgggtacgtcctcgggggactggactggacccagacatttctgggcagttggtttaggacgcagaaccaggtgctgttttttttcgctgccatcatttttacagtgtctgttgccttacatctcttcagtatcgatgaagaacagtactccccccaacaggagcgatccgcagaagagcctggagccctggatggaggggagccacacggagtgcctgccttcccagacgaggttcagtcagagcatgagctcgccctagactacccagatgtggatattatgagatcaaagagcgactcagccctgcatgttcctgataccgcgctggacttagaaccagagctactgttcctccatgacatcgagccttccattttccacgatgcatcctaccccgccaccccgaggtccacctcacaagagcttgccaagaccaagctgccacggttggcaactttcctgaaagaagccgccaaagaagatgaaactctcctggacaaccacttaaacgaggccaaagtacccaatggctccgggtcgcctacgaaagatgcccttggaggttacacacgtgtcgatacgaaaccatcagctacaagtagcagcatgcggcgtcgccgccacgccttccgccgccaggcttcttcgacatttagttactacggcaagctgggatcccactgctataggtataggagagccaacgcagtggtgctcatcaagccttcaagatccatgtctgatttgtacgatatgcaaaagagacagcgccaacacagacaccggaaccagtctggagccactacttcttctggcgatacagaatctgaagagggtgagggtgaaactacagttagattgctctggctgagcatgctgaaaatgcctagggagctaatgaggctgtgcctgtgtcacctgttgacctggttttctgtcattgctgaagctgtgttttatactgactttatgggccaggtgatttttgagggggatcctaaggcccccagcaacagtactgcgtggcaagcatataacgcaggtgtgaagatgggatgctggggattggtgatttacgccgccacgggtgctatctgctccgctctcctgcagaaatacctggacaactacgacctgtctgtgagggtaatctatgtcttagggacactcggcttttcagtagggactgccgtcatggctatgttcccaaacgtctacgttgctatggtgactatcagtaccatggggatcgtgtccatgtccataagctattgtccatacgcgttattgggtcagtaccacgacattaaacagtatatccaccatagccccggcaattccaagcgtgggtttggcatcgactgcgctatcctctcttgccaggtgtacatctctcagattcttgtggcatctgccctggggggcgtggtggacgccgtaggcaccgtaagagttattccgatggtcgcatcagtcgggtcttttttgggatttcttaccgccacttttttagtaatttatccaaatgtgagcgaggaggccaaggaagaacagaaaggacttagttctccactggccggcgaaggaagggcgggcggcaattcagaaaaaccaactgtactcaaactcactagaaaggaggggctacagggccccgtcgaaaccgagagactgcaggtgctcacctccgtccgatctcgccacattggctggtgcaggtcttgttggagggtgttcttttttatgattatccttgagaagaagttttcttttccacaatgtggatcactgcggcgcatgacctacttactgttcctttccgaactcgatactctgtgccccggccaaccctgtccttgggccgccaccgcccatcaatcgtgggaggaggccgggcctggtggtctcggaaggcggcaatag

SEQ ID NO: 36369 - DNA, 2397 bp, Artificial Sequence
  derived and/or modified sequence
atgggtaaggcctccccagcctccggactctcacgccctaaaacacttgtctccccgctgcgatccaaccagtggtcactacagaagggtctgccggaacaatactactctctgacgtggttcctctcccccatactcggactcatcttcactcccctaatcgggtcggcctccgatcgatgcacacttagctggggtcgaaggcggccgttcatacttgctttgtgtgttggagtcctattcggggtcgcacttttcctaaacggctcggcaattggcctggcattgggtgacgtacctaaccgacagcctatagggatagtgctcacagtgttaggagttgtggtcttggatttttctgccgacgctacagagggacctattagggcttacttgttggacgttgtggactctgaagaacaggacatggcattgaatatccatgcattttccgccggtcttggcggtgctataggatacgtcttgggtggcctcgattggactcagacattcctgggaagctggtttagaactcagaaccaggtgctgtttttctttgctgcaatcatctttaccgtgtctgtcgcactgcatctgttctcaatcgatgaagaacaatattcaccccaacaagagcgaagcgctgaggagcccggcgctctcgacggtggagagccccatggcgtgcccgcgttccctgacgaagtccagagtgaacatgagctagccctggactatcccgatgttgatattatgcgatcaaaaagtgactcggcactacacgtgcctgacacagccctagacctggagcccgaacttctcttcctccatgacatagaaccctctattttccatgacgcaagctaccccgcaacaccccgatccactagccaggagctcgccaagaccaaactgcccaggttggctactttcctcaaagaggctgcaaaggaagatgagacgttactcgacaaccatcttaatgaagcaaaagttccaaacggcagcggttcccccacgaaggatgccctcggcgggtacactcgagtagacacaaagccgtctgccacaagctcatccatgcgaagacgcagacacgcttttcgacgccaggccagcagcacattcagctactacggaaaattgggaagtcactgctacaggtatagacgagctaatgcagtggtgctcattaagccgtcccgcagcatgagcgacctgtacgatatgcagaaaagacagagacagcaccgacacagaaaccagtccggggccacaacttcgagtggagataccgagagcgaggagggagaaggggagactacagtgagactcctgtggttaagtatgctgaaaatgccaagagagctgatgcgcttgtgcctctgccatctcttaacctggttcagcgttattgccgaagcagtgttctacaccgactttatgggacaggtgatctttgagggggaccccaaagctccaagtaattccacggcctggcaagcttacaatgccggcgtgaaaatgggttgttggggattagtgatttacgccgctacgggcgctatatgtagcgcgcttttacaaaagtatctcgataactacgacctttccgtgcgtgtaatttatgtgctaggtacactcggcttttcagtgggcacagccgttatggccatgtttccaaacgtttacgttgcaatggtgaccataagcacgatgggtattgtatctatgtctatttcatactgcccttatgctctgttaggacaataccatgatatcaagcagtacattcaccatagcccaggaaatagtaagcgtggatttggtatcgactgtgctatcctcagttgtcaagtgtacatatcccaaatcctagtggcaagtgctcttggtggcgtggtcgacgctgtggggacggtacgcgtcattcctatggtcgcttccgttggatcgtttttaggcttcctcaccgccactttcctggtcatctacccgaatgtttctgaggaggctaaggaggaacagaaaggcttgtctagccctcttgccggtgaaggtagagctggtggtaactctgaaaagcccacagtgctaaaattaaccagaaaggaaggcctacagggaccagttgagaccgaacgactgcaagttctaacaagtgtgagatcccgccatatcgggtggtgtcgaagttgttggcgcgtgtttttttttatgattatcctcgaaaaaaaatttagttttcctcagtgtggatctttgagaaggatgacttacttactttttctgtcggagctcgacacattgtgtccgggccagccttgcccttgggccgcaactgctcaccaaagctgggaagaagccggccccggtggcctgggccgacggcagtag

SEQ ID NO: 36370 - DNA, 3546 bp, Artificial Sequence
  derived and/or modified sequence
tgatagggcagagaggagcccatgctccagctgcggggagtgcctgcccgaggagctggccagtgaagacaggtgcctgccagtgaagacaggtgcccacaagctggacacagggtcggccctgagacaggacagcagctgcggaatgttcccgctggctttctggagcgccagcgtcctgcttgggtctggccaggggcctctagccaggctgttgaggcgcccctccttgttgaagaggagaaacagtggccccctgggagttgctgggaggtgcctggcacagggcggcagggacagcatcatctatggggaaagcaagcccagcctcagggctgtcccgtccaaagacccttgtgagtccactgaggtcaaatcaatggagtcttcagaaaggccttccggagcagtactacagcctcacctggttcctgagccccatccttggcctcatcttcacacctctcattgggtctgcgagtgaccggtgcaccctgagctggggccgccggcggcccttcatcctcgccctctgcgttggcgtcctctttggcgttgcacttttccttaacggctctgccatcggtctggccctcggcgatgtccccaaccggcagcccattggcatcgtgctcacggtgctgggagtggtggtcctggacttcagcgccgatgccaccgaggggcccatccgtgcctatctgctggacgtggtggacagcgaggagcaggacatggccctcaacatccacgccttctctgccggcctcggcggagccatcggctacgtgctgggtgggctggactggacccagaccttcctgggcagctggttccggacccagaaccaggtgctcttcttctttgccgccatcatcttcacggtgtccgtggccctgcacctgttcagcatcgacgaggagcagtacagcccgcagcaggagcgcagcgctgaggagcccggcgccctggatgggggcgagccgcacggcgtccctgccttcccagacgaggtacagtcggagcacgagctggccctggactacccggacgtggacatcatgcgcagcaaaagcgactcggcattgcacgtgccggacaccgcgctggacctggagcccgagctgctgttcctgcacgacatcgagccctccatcttccacgacgcctcctaccccgccaccccccgcagcaccagccaggagctcgccaagaccaagctgccccgcctggccaccttcctcaaggaagccgccaaggaggacgagaccttgctggataatcacttgaatgaagctaaagtcccaaacggaagtggctcccccacaaaagacgccctcggcggctacaccagggtggacacgaagccctcggccacgtcgagctccatgcggcggcggcggcacgcgttccgcaggcaggcctccagcaccttctcctactacggcaagcttgggtcccactgctaccgctaccggcgcgccaacgccgtggtgctgatcaagccgtcgcgcagcatgagcgacctgtacgacatgcagaagcggcagcggcagcaccggcaccggaaccagagcggggccaccacctccagcggggacaccgagagtgaggagggggagggcgagaccacggtgcgcctgctgtggctctccatgctgaagatgcccagggagctgatgcggctgtgcctctgccacctcctcacctggttctctgtcatcgccgaggccgtgttctacaccgacttcatgggccaggtcatcttcgaaggcgaccccaaggccccctcgaactcgaccgcctggcaagcctacaacgccggggtcaagatgggctgctggggcctggtcatttatgccgccactggtgctatttgttcagccctgttacagaagtacttggacaactacgacctgagcgtcagggtgatctacgtgctggggacgctgggcttctctgtcggcacagccgtgatggccatgtttcccaacgtctacgtcgccatggtcaccatcagcaccatgggcatcgtctccatgagcatctcctactgcccgtacgccctgctgggccagtaccatgacatcaagcagtacatccaccacagccccgggaactccaagcgagggtttggcatagattgtgccatcctgtcctgccaagtgtacatctcgcagatcctggtggcctctgcccttgggggcgtggtcgacgccgtggggactgtccgcgtcatccccatggtggcctctgtgggctctttcctgggcttcctgacggccacattcctggtgatctatcccaacgtgtcagaggaggccaaggaggagcagaaaggcctgtcttccccgttggccggcgaaggcagggccggtgggaacagcgaaaagcccaccgtgctgaagctcacgcggaaggagggcctgcagggaccggtggagacagaacgcctgcaggtattgacgtctgtcagatctcgtcacattggctggtgccgcagctgttggagagtatttttctttatgattattttagaaaaaaaattttcttttccacaatgtggttctcttagaagaatgacgtatcttcttttcctcagcgagttggacacattgtgcccagggcagccctgtccttgggcagcgaccgcacaccaaagctgggaggaggctggtccggggggcctgggcagaagacagtgatttgcaggggtggctcccagacaccctgcccagggatgggctgggcaccacctgggggcggagcgtgagctccagacgagctcctgcgtgcgcgtgtgagtgtgtctgcgcccagccatgtgaccccgctcgtcccgtctgaaggactctcctaggaggccaggttgcccctccagaccgctcccaacgtcagggggaaggaaacgttgactttcactgcactttgattcgtctctaaaccatttgctggggattcctgagagcagagctcccagcgggccctgcctcccaagtcccgccgcaaggctacctcgggtgtgtggatgtgcgagggcctcccccgcttgcgaaggggacatgcgtgctggaacctgtcggaactccatgccttcctcgcctgctcacctgctcgacgctggaatcgggacaggtgcaaagggacgcagacgtctgggacagctaaggcccgtgtcaccggagggctccgcacagtcgttctggtttcaacgaataagcaaaactcgggcaagtactgcagctatttggaaatgttttccaaaccacagtctctttagaactaagcctatttgaaacggtcggtgtaggcttactgagatcaggagacagggaggccccgcacatcacacagataaagtcagacaattgtaattaatacttttgctgcctcaagttgttttttaaataaagtactttgaaatgcatgagaatcatgctgcaatatgatcattctagagcaaatatatatatacacgtatatatatttcaagatgaaactaaagcagtttttaaataaattacttgaattttctgtgtatttaaa

SEQ ID NO: 36371 - protein, 60 aa, Artificial Sequence
  derived and/or modified sequence
MACQGREECWCQSRIARTLPADQKPECRPYWEKDDASMPLPFDLTDIVSELRGQLLEAKP

SEQ ID NO: 36372 - protein, 209 aa, Artificial Sequence
  derived and/or modified sequence
MLDDLNATHQHCVLAGSQPRFSSTHRVAECSTGTLDYILQRCQLALQNVCDDVDNDDVSLKSFEPAVLKQGEEIHNEVEFEWLRQFWFQGNRYRKCTDWWCQPMAQLEALWKKMEGVTNAVLHEVKREGLPVEQRNEILTAILASLTARQNLRREWHARCQSRIARTLPADQKPECRPYWEKDDASMPLPFDLTDIVSELRGQLLEAKP

SEQ ID NO: 36373 - protein, 106 aa, Artificial Sequence
  derived and/or modified sequence
MAQLEALWKKMEGVTNAVLHEVKREGLPVEQRNEILTAILASLTARQNLRREWHARCQSRIARTLPADQKPECRPYWEKDDASMPLPFDLTDIVSELRGQLLEAKP

SEQ ID NO: 36374 - protein, 505 aa, Artificial Sequence
  derived and/or modified sequence
MKRTPTAEEREREAKKLRLLEELEDTWLPYLTPKDDEFYQQWQLKYPKLILREASSVSEELHKEVQEAFLTLHKHGCLFRDLVRIQGKDLLTPVSRILIGNPGCTYKYLNTRLFTVPWPVKGSNIKHTEAEIAAACETFLKLNDYLQIETIQALEELAAKEKANEDAVPLCMSADFPRVGMGSSYNGQDEVDIKSRAAYNVTLLNFMDPQKMPYLKEEPYFGMGKMAVSWHHDENLVDRSAVAVYSYSCEGPEEESEDDSHLEGRDPDIWHVGFKISWDIETPGLAIPLHQGDCYFMLDDLNATHQHCVLAGSQPRFSSTHRVAECSTGTLDYILQRCQLALQNVCDDVDNDDVSLKSFEPAVLKQGEEIHNEVEFEWLRQFWFQGNRYRKCTDWWCQPMAQLEALWKKMEGVTNAVLHEVKREGLPVEQRNEILTAILASLTARQNLRREWHARCQSRIARTLPADQKPECRPYWEKDDASMPLPFDLTDIVSELRGQLLEAKP

SEQ ID NO: 36375 - DNA, 1065 bp, Artificial Sequence
  derived and/or modified sequence
agcatgaagcgcaccccgactgccgaggaacgagagcgcgaagctaagaaactgaggcttcttgaagagcttgaagacacttggctcccttatctgacccccaaagatgatgaattctatcagcaggccctgaagaggaaagtgaggatgactctcatctcgaaggcagggatcctgatatttggcatgttggttttaagatctcatgggacatagagacacctggtttggcgataccccttcaccaaggagactgctatttcatgcttgatgatctcaatgccacccaccaacactgtgttttggccggttcacaacctcggtttagttccacccaccgagtggcagagtgctcaacaggaaccttggattatattttacaacgctgtcagttggctctgcagaatgtctgtgacgatgtggacaatgatgatgtctctttgaaatcctttgagcctgcagttttgaaacaaggagaagaaattcataatgaggtcgagtttgagtggctgaggcagttttggtttcaaggcaatcgatacagaaagtgcactgactggtggtgtcaacccatggctcaactggaagcactgtggaagaagatggagggtgtgacaaatgctgtgcttcatgaagttaaaagagaggggctccccgtggaacaaaggaatgaaatcttgactgccatccttgcctcgctcactgcacgccagaacctgaggagagaatggcatgccaggtgccagtcacgaattgcccgaacattacctgctgatcagaagccagaatgtcggccatactgggaaaaggatgatgcttcgatgcctctgccgtttgacctcacagacatcgtttcagaactcagaggtcagcttctggaagcaaaaccctagaaggagcacaagtctcaggcggaggagaaaaagagatcggcttttctcctccaacgttgtcatgggcttaagcaagagcagtggagacttctcttggcccctagattgtagcacccgggtcccaatccaaaacagctaggaaatggtgcccatgaagttttaaatgttttaa

SEQ ID NO: 36376 - DNA, 707 bp, Artificial Sequence
  derived and/or modified sequence
aagctgtggtggctccacgtttctttagcgggcagtgttttatatatataggttaagattatcaccagctcctcctggcccatgggtcgagtttgagtggctgaggcagttttggtttcaaggcaatcgatacagaaagtgcactgactggtggtgtcaacccatggctcaactggaagcactgtggaagaagatggagggtgtgacaaatgctgtgcttcatgaagttaaaagagaggggctccccgtggaacaaaggaatgaaatcttgactgccatccttgcctcgctcactgcacgccagaacctgaggagagaatggcatgccaggtgccagtcacgaattgcccgaacattacctgctgatcagaagccagaatgtcggccatactgggaaaaggatgatgcttcgatgcctctgccgtttgacctcacagacatcgtttcagaactcagaggtcagcttctggaagcaaaaccctagaaggagcacaagtctcaggcggaggagaaaaagagatcggcttttctcctccaacgttgtcatgggcttaagcaagagcagtggagacttctcttggcccctagattgtagcacccgggtcccaatccaaaacagctaggaaatggtgcccatgaagttttaaatgttttaaaatgaccctgtgttatagtctgatttggtgttaaacaggaccttcttcccc

SEQ ID NO: 36377 - DNA, 1517 bp, Artificial Sequence
  derived and/or modified sequence
tccacgtttctttagcgggcagtggtaaaaagagtatttaagatcggtcgagtttgagtggctgaggcagttttggtttcaaggcaatcgatacagaaagtgcactgactggtggtgtcaacccatggctcaactggaagcactgtggaagaagatggagggtgtgacaaatgctgtgcttcatgaagttaaaagagaggggctccccgtggaacaaaggaatgaaatcttgactgccatccttgcctcgctcactgcacgccagaacctgaggagagaatggcatgccaggtgccagtcacgaattgcccgaacattacctgctgatcagaagccagaatgtcggccatactgggaaaaggatgatgcttcgatgcctctgccgtttgacctcacagacatcgtttcagaactcagaggtcagcttctggaagcaaaaccctagaaggagcacaagtctcaggcggaggagaaaaagagatcggcttttctcctccaacgttgtcatgggcttaagcaagagcagtggagacttctcttggcccctagattgtagcacccgggtcccaatccaaaacagctaggaaatggtgcccatgaagttttaaatgttttaaaatgaccctgtgttatagtctgatttggtgttaaacaggaccttcttcccccaaaattgttcagattataaaatgtgagccattcagcccccaaggtccagggcaggcgacaggaacgagcccagcgtgtgacaaagcctaacctactttcctctttcccaagctttttcagagactctggagtggacccagccctctggggaaagacagaacttagagacatcccagttactcaccacacccatagtgctgtccaatatggtagccactagctagctgtggctacttcaatttaaattcagttttaattttaattaaaaatgcagctcttcagtcgccctggccacatttcaagtgcttaacagcctcatgtggctagtgactgctgtattggacggtacagatatggaacattttcatcatcgaagaaagtcctattggacaacacttctataaaaagtttgagagcaggaattctcatttccattcgtctgtagcttctatccccaaaggcaaagaaactaaaagagaaatgactcattgaagattggcctctttcctttctctaagacaaacctaagtaaaagcctgagctttgagtcctatgctcagcacacgggaaggagatgttaataattaaaataaagttgatatcctgtctttagggagttcccttgatctcttgaaagagacacagccccatttacattatttcgtggatttcaccagcatagtatagtttttttctgtaagtccctcattcttatgtaataacaggtggaactgaggtttgaagaacctcagtggcccatcctgatgacattggagactcaaagagacaagagagagtagggtttaaaacctgagctttaagactcccactagcttcgtgtcctttgg

SEQ ID NO: 36378 - DNA, 3056 bp, Artificial Sequence
  derived and/or modified sequence
gtttcaagagtaaaggagaacaaagtagggtgacctagtctgaaggacaggcgcagaacagtcagtggaacagccagagatagcagcgagagaggtgagaagaggaccaggagtaggtggtagaatggagtggaggaaagtcagcgaatgtaatagtgtcgaaccctgcagggaagttaagaagtggccataccgttgcattcatcatgggaagaatttcagtagaatgacaaatgctgtgcttcatgaagttaaaagagaggggctccccgtggaacaaaggaatgaaatcttgactgccatccttgcctcgctcactgcacgccagaacctgaggagagaatggcatgccaggtgccagtcacgaattgcccgaacattacctgctgatcagaagccagaatgtcggccatactgggaaaaggatgatgcttcgatgcctctgccgtttgacctcacagacatcgtttcagaactcagaggtcagcttctggaagcaaaaccctagaaggagcacaagtctcaggcggaggagaaaaagagatcggcttttctcctccaacgttgtcatgggcttaagcaagagcagtggagacttctcttggcccctagattgtagcacccgggtcccaatccaaaacagctaggaaatggtgcccatgaagttttaaatgttttaaaatgaccctgtgttatagtctgatttggtgttaaacaggaccttcttcccccaaaattgttcagattataaaatgtgagccattcagcccccaaggtccagggcaggcgacaggaacgagcccagcgtgtgacaaagcctaacctactttcctctttcccaagctttttcagagactctggagtggacccagccctctggggaaagacagaacttagagacatcccagttactcaccacacccatagtgctgtccaatatggtagccactagctagctgtggctacttcaatttaaattcagttttaattttaattaaaaatgcagctcttcagtcgccctggccacatttcaagtgcttaacagcctcatgtggctagtgactgctgtattggacggtacagatatggaacattttcatcatcgaagaaagtcctattggacaacacttctataaaaagtttgagagcaggaattctcatttccattcgtctgtagcttctatccccaaaggcaaagaaactaaaagagaaatgactcattgaagattggcctctttcctttctctaagacaaacctaagtaaaagcctgagctttgagtcctatgctcagcacacgggaaggagatgttaataattaaaataaagttgatatcctgtctttagggagttcccttgatctcttgaaagagacacagccccatttacattatttcgtggatttcaccagcatagtatagtttttttctgtaagtccctcattcttatgtaataacaggtggaactgaggtttgaagaacctcagtggcccatcctgatgacattggagactcaaagagacaagagagagtagggtttaaaacctgagctttaagactcccactagcttcgtgtcctttggcatgttaacgtgcctcagtttcctcatctgtataatggggatatatgaaaggcaccagtcctaaggtgaacattaagtgagatgattctagttacagacttagaacaatttccagcacatagttaaatatccaggaaattctggtactgttatgtgtgggtgagctgacctggatgtagatgttttcctctctcttgctgacccctccgccagttttgtcttgtgatgccattaacacatctctccctttctgacctggctcctgcccattggtgtcccaagaaatcgtgagaatagttagccccccgtctccccagcctgttgctttctcgtgtagttgttcacagtagttgagaagttgaagagcttttgcctattgaaggtgcactgagaataaactctttcctgccaccagaattgcagtggttcacggcctgcactcattcccatgaatgcagttaatagccacagaaatgtcacattaagcaaagcagccagggtctcatcgtgttgagactcgagtctctcagaccttggattcattccctggtgtctttgagcctcagtttcctcattggtaaaagagaagtgaagcagtgtctcacagggtcattacagagattaaatgaaataaatgaaataacatagaccaggagggcgtggtgtttaaaagtcacagatggggcaccctcgggccatccagcccagtgttttctttagcccctatgatgttcattttttgttatatcccattaggtgcccatatttaaaaattgggagatttcacataaaattaaaaggtctgcattttcttttttcttttctttttttttttttttgagacacagtctcactctgtcaccaggctagagtgcagtggcacgatctcagctcactgcaacctctgcctcccaggttcaagtaattctcctgcctcagcctcccaagtagctgggactacaggcacgtgccaccacgcccagctaatttttgtatttttagcagagatggggtttcaccacattggccaggatggtctcgatctcaacctcgtgatccacccacctcggtctcccaaagcgctgggattacaggcgtgagccaccgcgccaagccaaggtctgcatttttctttagaactcagaacacccaatagtcctaggcccccatcctcgcatggcagcaagctaaataagcatcttcccactgcgagttggggcatgacccagcctatggtttgccatactccctctttttctccgttttttcattaattgtgaacctgacctgcatcaccctttcatgtcagtgctctccaaacctgcttgcttgcacccctctagtcgaaatattttgtgcttaccccaatatatgtgtgtgactattgaactctattcgtagactgcttgtactaatgtcatttgcatcataaaatattcatatccaataaacatattaaaaggatgagataagaaa

SEQ ID NO: 36379 - DNA, 11766 bp, Artificial Sequence
  derived and/or modified sequence
ctacgctcttccagctgtcggacctgggaaattctcctgtgctaaatcccgtggcgctcgcgggtgtcgccgcggtgcatcctgggagttgtagttttttctactcagagggagaatagctccagacgggagcaggacgctgagagaactacatgcaggaggcggggtccagggcgagggatctacgcagcttgcggtggcgaaggcggctttagtggcagcatgaagcgcaccccgactgccgaggaacgagagcgcgaagctaagaaactgaggcttcttgaagagcttgaagacacttggctcccttatctgacccccaaagatgatgaattctatcagcagtggcagctgaaatatcctaaactaattctccgagaagccagcagtgtatctgaggagctccataaagaggttcaagaagcctttctcacactgcacaagcatggctgcttatttcgggacctggttaggatccaaggcaaagatctgctcactccggtatctcgcatcctcattggtaatccaggctgcacctacaagtacctgaacaccaggctctttacggtcccctggccagtgaaagggtctaatataaaacacaccgaggctgaaatagccgctgcttgtgagaccttcctcaagctcaatgactacctgcagatagaaaccatccaggctttggaagaacttgctgccaaagagaaggctaatgaggatgctgtgccattgtgtatgtctgcagatttccccagggttgggatgggttcatcctacaacggacaagatgaagtggacattaagagcagagcagcatacaacgtaactttgctgaatttcatggatcctcagaaaatgccatacctgaaagaggaaccttattttggcatggggaaaatggcagtgagctggcatcatgatgaaaatctggtggacaggtcagcggtggcagtgtacagttatagctgtgaaggccctgaagaggaaagtgaggatgactctcatctcgaaggcagggatcctgatatttggcatgttggttttaagatctcatgggacatagagacacctggtttggcgataccccttcaccaaggagactgctatttcatgcttgatgatctcaatgccacccaccaacactgtgttttggccggttcacaacctcggtttagttccacccaccgagtggcagagtgctcaacaggaaccttggattatattttacaacgctgtcagttggctctgcagaatgtctgtgacgatgtggacaatgatgatgtctctttgaaatcctttgagcctgcagttttgaaacaaggagaagaaattcataatgaggtcgagtttgagtggctgaggcagttttggtttcaaggcaatcgatacagaaagtgcactgactggtggtgtcaacccatggctcaactggaagcactgtggaagaagatggagggtgtgacaaatgctgtgcttcatgaagttaaaagagaggggctccccgtggaacaaaggaatgaaatcttgactgccatccttgcctcgctcactgcacgccagaacctgaggagagaatggcatgccaggtgccagtcacgaattgcccgaacattacctgctgatcagaagccagaatgtcggccatactgggaaaaggatgatgcttcgatgcctctgccgtttgacctcacagacatcgtttcagaactcagaggtcagcttctggaagcaaaaccctagaaggagcacaagtctcaggcggaggagaaaaagagatcggcttttctcctccaacgttgtcatgggcttaagcaagagcagtggagacttctcttggcccctagattgtagcacccgggtcccaatccaaaacagctaggaaatggtgcccatgaagttttaaatgttttaaaatgaccctgtgttatagtctgatttggtgttaaacaggaccttcttcccccaaaattgttcagattataaaatgtgagccattcagcccccaaggtccagggcaggcgacaggaacgagcccagcgtgtgacaaagcctaacctactttcctctttcccaagctttttcagagactctggagtggacccagccctctggggaaagacagaacttagagacatcccagttactcaccacacccatagtgctgtccaatatggtagccactagctagctgtggctacttcaatttaaattcagttttaattttaattaaaaatgcagctcttcagtcgccctggccacatttcaagtgcttaacagcctcatgtggctagtgactgctgtattggacggtacagatatggaacattttcatcatcgaagaaagtcctattggacaacacttctataaaaagtttgagagcaggaattctcatttccattcgtctgtagcttctatccccaaaggcaaagaaactaaaagagaaatgactcattgaagattggcctctttcctttctctaagacaaacctaagtaaaagcctgagctttgagtcctatgctcagcacacgggaaggagatgttaataattaaaataaagttgatatcctgtctttagggagttcccttgatctcttgaaagagacacagccccatttacattatttcgtggatttcaccagcatagtatagtttttttctgtaagtccctcattcttatgtaataacaggtggaactgaggtttgaagaacctcagtggcccatcctgatgacattggagactcaaagagacaagagagagtagggtttaaaacctgagctttaagactcccactagcttcgtgtcctttggcatgttaacgtgcctcagtttcctcatctgtataatggggatatatgaaaggcaccagtcctaaggtgaacattaagtgagatgattctagttacagacttagaacaatttccagcacatagttaaatatccaggaaattctggtactgttatgtgtgggtgagctgacctggatgtagatgttttcctctctcttgctgacccctccgccagttttgtcttgtgatgccattaacacatctctccctttctgacctggctcctgcccattggtgtcccaagaaatcgtgagaatagttagccccccgtctccccagcctgttgctttctcgtgtagttgttcacagtagttgagaagttgaagagcttttgcctattgaaggtgcactgagaataaactctttcctgccaccagaattgcagtggttcacggcctgcactcattcccatgaatgcagttaatagccacagaaatgtcacattaagcaaagcagccagggtctcatcgtgttgagactcgagtctctcagaccttggattcattccctggtgtctttgagcctcagtttcctcattggtaaaagagaagtgaagcagtgtctcacagggtcattacagagattaaatgaaataaatgaaataacatagaccaggagggcgtggtgtttaaaagtcacagatggggcaccctcgggccatccagcccagtgttttctttagcccctatgatgttcattttttgttatatcccattaggtgcccatatttaaaaattgggagatttcacataaaattaaaaggtctgcattttcttttttcttttctttttttttttttttgagacacagtctcactctgtcaccaggctagagtgcagtggcacgatctcagctcactgcaacctctgcctcccaggttcaagtaattctcctgcctcagcctcccaagtagctgggactacaggcacgtgccaccacgcccagctaatttttgtatttttagcagagatggggtttcaccacattggccaggatggtctcgatctcaacctcgtgatccacccacctcggtctcccaaagcgctgggattacaggcgtgagccaccgcgccaagccaaggtctgcatttttctttagaactcagaacacccaatagtcctaggcccccatcctcgcatggcagcaagctaaataagcatcttcccactgcgagttggggcatgacccagcctatggtttgccatactccctctttttctccgttttttcattaattgtgaacctgacctgcatcaccctttcatgtcagtgctctccaaacctgcttgcttgcacccctctagtcgaaatattttgtgcttaccccaatatatgtgtgtgactattgaactctattcgtagactgcttgtactaatgtcatttgcatcataaaatattcatatccaataaacatattaaaaggatgagataagaaaccgagagattttgctgtttttttccttttgcatggatgagccagcttcactgtcctgggtggggcccaggtggaattagttctcaaagtcctccaggtggagtcagggaatgtgcaacagggttggagaaatcactactttaagtgaatccgaaaggtgagatcacatttgctctaaagaaatggtgatcccagcactttgggaggctgaggcagcagatcactggaggtcaggagttcgagaccagcctggccaacacggtgaaaccccgtctctactgaaaacacaaaaattagctgggtgtggtggtgtgtgcctgtaatcccagctactcgggaggctgaggcaggcaaatcgcttggcccgggaggcggaggttgcagtgagccgagatcatgccactgcactccagcctgggccacggagcgagagaagaaagaaatggtgactttcattgatcatgtgtttgaggatttcatgtgctctccagggaggtttcaggtgggtagaaggaggtgggcaagacccaataaaaaagcagctggtgcgggcaatgacaatgaactcgtatcctgcagggtcaaaggaaggcttgcttctgctgtgaattggagaaggactttcctggaagcacaggcccagaaatcgcacccttctccccatgtgtgcggataagggaccacttccatcagcagcagccccctcctgctttcctgccagtcctccctgtggtcccaggtctcttgagaaaagtgatctaagagatccctttgcaatgaggtgctactgactgccctacctccctcccttcctcccatgaatgtttcttggtgctgaccacagcctcagcaatgaggcaagcctggggacccaagacagatctctgcctcccaggctagtggatgccctgggatatgtagtcaccaaaataggaacttaccccatagtggggaaatagacagtaagcagcaaatcaataacaagagtgttccagatggttgtaagtgccaggaagggaaccaactgggagagggacaagaggagatggtgactgaccaaggggaccttgatcaggctgtggggaagggaggtggttgggaagagcttcccaggaaaggggacggcgggcccaggcaggagagccttgggagggggtgcccaaggaaggaaaagggccctgagcctgaagccgagaagaccaggaggggagaaggggagatgtagggcagagcagacgggagccgctcgggttttattccacacaccccaggaagcatgagagggtttcaagcagcaagggcatggaagtaacttggtgagatatttttatgcattagatcatcgctctatctggattccagagggtctctgagagagcaaacagcttaatccaaaggagcggctttccaactgggaatgtccccctggctgggtgagatctcaagatggcctgcggcccctctagattgcctgcctacagagttcactctaaacagcccctcccctccacaccccagcagatccattcctgacgccctcactggcaggctccagccccacagagctttctagacataaaagagcagggtcatggcatcattggtgacacaattttagtaataagcttcaaaacccatcactccactgaatccagggatgccagaattgagagtccataggacccgtttaacggatcccacattcagtagacggttttttgtatgcttcgagggaaggaaggtattttcaaatgcaacttcttttttttttttcttgctctagttagggctgattttaccactgggcaaattgcatacatttggatccatgccacgctaaaaactgtttattttggagatctgtcagaggcaagcacatggaagacaaggggattctggtttgaaaaggcaattctcatccagacagattcagatggagaggagcggtgtggattaaaatgcgccgaagtggtaatgccgtttatcccgtttgcctttgttactctgtgattaaatggtatttttaattaagtttcattgggagccataggtatcgcggtggtgaaatcaatttgacaaccataaaggggagagacggcacaggcgtgttgtgatgattgcggctgtagggaaagccgggcagcttgcagaggatgggtgggaggaggggaagccggctaagaatgacttcctgcaagacagcaagggcacccctgggccactgctgtgtttgggaggcaggttttgggggttgtcagaaggcattcacctggttctctcgctcacctgagacacccgatagattcctggaaactccaggaaagtatctgaagatctggttctccattctctcttattaacaaggagaaccacaagtgccccccagatcccggctagaaggaccagacagctttccaccccggttcccaggcagccctgctcccatagtcctgtgtcccatcggccccatgctcccaggacagtcctaattcccacctctcagaaccttgtcagccaagttcttcctgctctctggcccaaatcctcctcctacattggaaactgagcctctctgcatcctctgctctttctatcccgctgtcattcatcagattttccaaatctttggattcctgagtggcagaagaggttttctgagtttaagttctgattctgtgtgtgattctcactctaccacctcttcaaacctttgttgtcttatctacaaaatagaatagtagtaatccatcacctaaggttgttgtgaaggttcaataagttaatgcgtatttaaaatgcctcccacagtacctgacatatactgggcttcagtgaggtactagctattattattaaccaagtttcctgtggtaacagttgtagctttgtgactgggccaaatcacttaacccctctgcgctccagtctttgtttctataatggggatgatgataatgcctagctcattggattgttctgtcccctacgatcagccatgttaagtgattcatatcatgtctggtacttaaaaatcacgccacgcatgtacattattatgatgaaaaatatgatccgtgatatcctgaccaaaatattaaagggactaaagatagctgtggcttgttcaagaagaatattgtgtcactatcccatatattatcccatttgctcttcacagcttccatttttcgctaggcggatggcatggaactttttataaatgagatattatgaaaaatgatgttttaggactctcatttctacagtgggagtaggtcacccattgcaattttggatttgcttaaaaaaattcttgccatcaccttctaatggatgatctgtgtacaacaattgtttattgactctgaatgtctaagtaccagggtcagtctatttcaaggggagggaagcattaattaacctccagcattagattcagtgattcttttccaatgatgcagttcatgactttgctcgcatttacttttcatcaatcctgaaagaattgaggtaaaatagttcctctgcacatgtgtgtcaagctaaatggataacagcagatacagatctgtttgcctgtctgcacttgcctttagacaaaattcatcaattttacaaaagccactgactaaacatggcaccaatacaaatgaagcacttctagcaggcggagattccctttgtttctgatctggtaaatgcggtagtttcctgctgagagatgggaagtgctggcctaggacagcaaggtgccctacaggtggggccaaaagggtcaagaccgttctacaggaagtttaggagaagttcaatggttccagatcctgtgtgcttcgggtaattctgaccctcttcattagtgataatggcatgaagctctttcacacagtcttttttttttttctttttttttttcagacagggtctcaccctgtcacgtaggctggagtgcagtggtgagatcacggctcactgcagcctcgacttcatgggctcaagcgattctcctgcctcagcctcctaagtagtcgggatcataggcacttgccaccacatccggctaatttttttgtagagacaggatttcaccacattacacaggctggtttcaaactccgaggctcaagtgatctgcctgcatcggcctcccaaagcgctgagattacaagcgtgagccactacgccttgccctccacacagccttgcttggtgttaaagattaaacaaagaccacaggtgatcactgtcttcgtggtgccagtttcaagggcacccttcttcccttcccagcctccgagagaaggagagagggtccacaagccagatccatccccatccacacaggtaaaaccacgactgtgcagctagcaggtggagataacatttggaaaaaggctttgtaaatgctaaagtcctactcaagtccaagggagagaaattattattattcgttttgtgaaaccaatttagtttggctgggtaatggaagaatttctacatacattcattacttctgatcaggcaagaccagtctgacacaggaacagtctatggctcactcttaaagccacagcaggctgccagggcttggagaaatagaaacctctcttgcacaagaatagtctcaatgaatcatgttaaggcctctttaggtttttcagactccatgcaccctgtggaaactgcctttcttgagtagaggtacgttcagcacttcataaaataatcttggagcctccagacacacggatggaggagcatgatttcatttgtttctttgcaaaactgctgtccccaactgaaaaacctgattatcctttcaaatagggaattcggctttccacgttggaaccagaacagttaaccttcaaacccccaaggcttgcaagagatgaatcagtttctcagacagccaaagccgtggcttataactcatccaacccagaaaactggaccgctggtcaccttccttccccctgcccccaactctgcagacagaggtttcccgttgattatgccttgattagagtcaggagagaagcaaaccaggtatataggattccattatccttccctcctctgctcccaaccagggtcacgctgagagggatctcggtgaacatgtgaacaatcaagccatgtttaccatggacgtttagttttcttttctcaaaatcaaaacagagtttagtaggcagcgtatttcatacatgccccttgatcaatggaatgatctgtcagaagccattaaagcccccattagcttgaatgcattcaaagctaaactattggatcatttaagggctgcagtgattgtttttaatataccgtacattgatttctccctgtgagcagcaacataagtttgaaactaactgtgtatgactaaggctccatttgctgtctccaaccctctgtgagaagcatggtttcacttcgaccagaaatgtctgtgtatagttttcaaagagatgcagaccctgttcgatttcccaagatttagactgggtcgggttgttatttcttttttccctgagctttctcccatttctttgtgcccattaagtgagctgtgcgtgcagaatgggagaggcatccctgccaaggacttcaagtgaaaggcggtgggagaaattgttctgaaagcatgaagcccagctgaggccaaaatcaaagtgaatttgacagccttgggccagcaaaactctgtacccagcagaaaacaatagatgtgtggctgtgtcaggggcatcctcactgggacatagcttggggagctgaaggtaccttggaagggccagatgaggaagctagccaaggccacaggccttcctttgactgccatattgccagctcttcatagtattgactcttcagtcttagccaacacacacttgttgattccttccggaatgtcagactctgctagcaacacaaggtccctgtcctcaaaatcctattcttaatcagcatttctaatttctgccctttgctcattttaatacagagcctgaggataggagagcagcgtggtgaaagaagcaatagttaccacatttgcaaaggcacataccccaaagagaagtttttaatatgtcacacccatattttatagatggggcaatggaagtccagatgggagaagttatttcaggtgaattatagaaactggatttcaagtttctgataagtattgaatttgggaaggctgtgaacattcttgagcccccctcccaagttcaccttcaacatcctaaagcaggttgaagaggaagatggttccaggtcacttacaagaacaggaacagcccctccctccaaatttgagcccagaaaggagaacctttgttactctagaaaacagtgtgtgtgctattgttttctccataggtcacaaacatccacaagatattggtgattttacatattattagagccactgaaatttatgatgcaggatattaacgtcaaagaggccaagatgcatcattcagaacactggcaggtcaagcagaaaccaccgtagtaaaattgaaagctggagtcagcaaagtatagcccacagccaaatctggcccatcccctgttcttataaagttttattggaacgcagccatgctcatcggtttatgtattatctatggctgtttccaactacagtggcagagctgaatagttgcaaaggaccatagggctatcaaagccccaaatagtcattgtctgacccttcatagaaaaattttgctgaactgtagtctagctccaaggattgttgtatcacctgtgatcgtgcctattaagcaattaacgtcatgtctagtacttagtaatgactcagcatgtatcaattacgatgataaatattatcatggcatccaaaccaaaatactcatgccaacatctctctgtacagaaacatggaaaaagagcgatgctattaaggaggaaaatggagccaggagcaaaacctaaggctatttctgaactaaagaggcctgaataaggtagtgaaaggaccagggaaagccttcccacggggatggagagccacctcctccccggctttctggttcagatgtcttgtctcaacagacggcagattcgcagggaagcaggccgagcctgatcttttctccgctagaactgctcaacaggtgaagaatctttttccagcactcctgagcccttcgggtcgcggaacagtgcgaagattattccaatgcctcattcggagaggtgataatctggtctgtggtttctttttcggtggggcatggggtgggggtgagtgtcatgctttctaaggcacagggctgactaaagggtgtcctatttataagtcagtaaaacacagcggcttcatactctgtgcttattacccagaagccccggctcttagagtttctattaagatgtacctcataaatatatacgcctcctatgtacccacaaaaattaaaaataaaaaaattgaaatca

SEQ ID NO: 36380 - DNA, 1499 bp, Artificial Sequence
  derived and/or modified sequence
tccacgtttctttagcgggcagtggtcgagtttgagtggctgaggcagttttggtttcaaggcaatcgatacagaaagtgcactgactggtggtgtcaacccatggctcaactggaagcactgtggaagaagatggagggtgtgacaaatgctgtgcttcatgaagttaaaagagaggggctccccgtggaacaaaggaatgaaatcttgactgccatccttgcctcgctcactgcacgccagaacctgaggagagaatggcatgccaggtgccagtcacgaattgcccgaacattacctgctgatcagaagccagaatgtcggccatactgggaaaaggatgatgcttcgatgcctctgccgtttgacctcacagacatcgtttcagaactcagaggtcagcttctggaagcaaaaccctagaaggagcacaagtctcaggcggaggagaaaaagagatcggcttttctcctccaacgttgtcatgggcttaagcaagagcagtggagacttctcttggcccctagattgtagcacccgggtcccaatccaaaacagctaggaaatggtgcccatgaagttttaaatgttttaaaatgaccctgtgttatagtctgatttggtgttaaacaggaccttcttcccccaaaattgttcagattataaaatgtgagccattcagcccccaaggtccagggcaggcgacaggaacgagcccagcgtgtgacaaagcctaacctactttcctctttcccaagctttttcagagactctggagtggacccagccctctggggaaagacagaacttagagacatcccagttactcaccacacccatagtgctgtccaatatggtagccactagctagctgtggctacttcaatttaaattcagttttaattttaattaaaaatgcagctcttcagtcgccctggccacatttcaagtgcttaacagcctcatgtggctagtgactgctgtattggacggtacagatatggaacattttcatcatcgaagaaagtcctattggacaacacttctataaaaagtttgagagcaggaattctcatttccattcgtctgtagcttctatccccaaaggcaaagaaactaaaagagaaatgactcattgaagattggcctctttcctttctctaagacaaacctaagtaaaagcctgagctttgagtcctatgctcagcacacgggaaggagatgttaataattaaaataaagttgatatcctgtctttagggagttcccttgatctcttgaaagagacacagccccatttacattatttcgtggatttcaccagcatagtatagtttttttctgtaagtccctcattcttatgtaataacaggtggaactgaggtttgaagaacctcagtggcccatcctgatgacattggagactcaaagagacaagagagagtagggtttaaaacctgagctttaagactcccactagcttcgtgtcctttggcatg

SEQ ID NO: 36381 - DNA, 183 bp, Artificial Sequence
  derived and/or modified sequence
atggcatgccaaggtcgcgaggagtgctggtgccaatctaggattgctcgcacactgcctgctgaccaaaaacccgaatgtcgcccatactgggagaaagatgacgcgtcgatgccacttccatttgatctgactgatatagtgtcagaacttcgaggccagctgctggaagccaaaccatag

SEQ ID NO: 36382 - DNA, 630 bp, Artificial Sequence
  derived and/or modified sequence
atgttggatgatctaaacgcaacacatcaacactgcgtgctggccggcagtcaaccaaggtttagctcgacgcaccgagtggcggaatgttccactggaaccttggactatattttacaaagatgccagcttgccctgcagaacgtctgcgacgacgtggataatgatgatgttagcctgaaatcctttgagcccgccgtcctgaagcagggggaggagatccataatgaagtggagttcgagtggcttcgacagttttggttccagggcaaccgatatcggaagtgcacagactggtggtgtcagcccatggcccaactagaggctctgtggaagaaaatggaaggcgtgaccaacgctgtgttgcacgaggtgaagcgggagggcctgcctgtggagcagcggaatgaaatcctgaccgcgattcttgccagtctgacggcacgccagaacctaaggcgggagtggcacgcccgctgtcaatcacgcatcgcacggacactgcccgccgatcagaaacctgagtgccgaccttactgggaaaaggatgatgcttccatgcctctgcctttcgacctgaccgacattgtgagtgagcttcgtggacagctgctcgaagctaagccttag

SEQ ID NO: 36383 - DNA, 321 bp, Artificial Sequence
  derived and/or modified sequence
atggcacagctagaggctctttggaagaaaatggagggtgttaccaatgctgtcctgcatgaggtcaaaagagaaggattgcccgtggaacagcggaacgaaatattgacagctatccttgcgtccctgaccgcccggcagaaccttcgccgagaatggcacgcccggtgccagtcgcggatagcccggacacttcctgccgaccagaagccagaatgccgaccctactgggaaaaagatgacgcaagcatgcccctcccttttgacctgactgacatcgtctctgagttaagggggcagctccttgaagccaaaccttag

SEQ ID NO: 36384 - DNA, 321 bp, Artificial Sequence
  derived and/or modified sequence
atggctcaattggaggccctgtggaagaagatggaaggagtgactaatgctgtcttacacgaggtgaagcgggaggggctcccggtggaacagcggaacgagattctgacagctatcctcgcctccctgaccgcccgccagaatctgcgacgggagtggcatgcacgctgccaatctcggatagccaggacgttacccgccgatcagaagcccgagtgtcggccctattgggaaaaagatgacgcaagcatgccgctccccttcgatttgaccgacattgtgagtgagcttcgcggccaactgctggaggcgaagccctag

SEQ ID NO: 36385 - DNA, 384 bp, Artificial Sequence
  derived and/or modified sequence
atggaatggcgaaaagtgtccgagtgtaactctgtggagccctgtagggaggtaaaaaagtggccctaccggtgcattcaccacggaaaaaatttttctcggatgacaaatgccgtgctccacgaggtaaagcgcgaagggctgcctgtggagcagcgaaacgaaatcttgacggccattctggccagtctcactgctagacagaacctgaggagagaatggcatgctcggtgtcaatcgcgaatcgcacgaacgctcccagcggaccaaaagcctgaatgtcggccttactgggagaaggacgatgcaagtatgccattaccatttgatttgactgatatagtcagcgagctccgagggcagttgctggaggctaagccatag

SEQ ID NO: 36386 - DNA, 1518 bp, Artificial Sequence
  derived and/or modified sequence
atgaagcgcacacctaccgccgaggagagggagagagaggctaagaaactgcggctcctagaagaattagaggatacatggctcccttacttgactcctaaagatgatgagttctatcagcagtggcagctgaaatacccaaaactcattttgcgcgaagcgagttctgtgtcagaggagctgcacaaggaggtgcaggaggccttcttgacgctgcacaaacacggatgcttgtttagagacctggtccgcatccaggggaaggacctccttacacccgtttctcggattctcattggtaaccccggctgcacatataaatatctgaatactaggctcttcaccgtgccatggcccgtgaagggcagtaacatcaaacacactgaggcagagattgccgccgcctgcgagacatttctcaagctgaatgactatctgcagatcgagacgatccaagcgttggaggagttggctgcgaaagagaaggccaacgaggatgccgtcccactgtgcatgtctgctgacttcccccgcgtgggaatgggaagctcttacaacggccaagatgaggttgacataaaatctcgggccgcctataacgttacccttctcaatttcatggatccacagaaaatgccctacctgaaagaggaaccctatttcggcatgggcaaaatggccgttagctggcaccacgatgaaaacttggtcgacaggtctgccgtcgcagtttactcgtattcctgcgagggacccgaagaggagtcagaggacgactcccacctcgaagggagagatcccgatatttggcacgtggggtttaaaatctcttgggatatcgagacacccgggttggccatcccgctccatcaaggcgattgttatttcatgctggatgatctcaatgccactcatcaacactgtgtgctcgccggttcccaaccccggttttcctcgacacatcgtgtcgctgaatgctccacaggtacactggattacatcttacagaggtgccagctggctctgcagaatgtgtgtgacgatgtggataatgatgatgtatctttgaagagcttcgaaccagcagttctgaagcagggcgaggaaattcacaatgaagtcgagttcgaatggctgcggcagttttggtttcaaggcaacagataccgtaaatgcaccgattggtggtgtcagccgatggcccaacttgaggccttatggaaaaaaatggaaggtgtgaccaacgcagttttacacgaagtgaagagagagggactccctgttgagcagcggaatgagatccttacagcaatcctggccagcctgactgctcgtcagaatcttcgaagagaatggcacgcgaggtgtcaatctagaatcgctcggacactgccagcagaccagaagcccgaatgccgaccatactgggagaaagacgatgcctcaatgcctctcccatttgatctgaccgacatagtttcagagctccggggccagttgctcgaagctaaaccatag

SEQ ID NO: 36387 - DNA, 321 bp, Artificial Sequence
  derived and/or modified sequence
atggctcaactcgaggccctgtggaagaagatggaaggagtgaccaacgcagtgctgcacgaggtcaaacgggagggcctgcccgtggagcaaagaaacgaaattctgactgcaatcctggctagcctgaccgcgagacagaatctgaggcgagagtggcatgcacggtgtcagagcagaattgccaggaccttacccgcagaccagaagcccgagtgccgcccttactgggaaaaagacgacgcctctatgcccctgccctttgacttgaccgacattgtctcggagctgcgaggacaactactcgaagcaaagccatag

SEQ ID NO: 36388 - DNA, 183 bp, Artificial Sequence
  derived and/or modified sequence
atggcctgccagggccgggaggagtgctggtgccagagcagaattgcccggaccctgcctgctgaccagaagccagagtgccggccctactgggagaaggatgatgcctccatgcccctgccctttgacctgacagacatcgtgtctgagctgcggggccagctgctggaggccaagccctag

SEQ ID NO: 36389 - DNA, 630 bp, Artificial Sequence
  derived and/or modified sequence
atgctggatgacctgaatgccacccaccagcactgtgtgctggccggcagccagccccgcttcagcagcacccaccgggtggctgaatgttccacaggcaccctggactacatcctgcagcgctgccagctggccctgcagaatgtgtgtgatgatgtggacaatgatgatgtgtccctgaagagctttgagcctgctgtgctgaagcagggcgaggagatccacaatgaggtggagtttgagtggctgcggcagttctggttccagggcaaccgctacagaaaatgtacagactggtggtgccagcccatggcccagctggaggccctgtggaagaagatggagggcgtgaccaatgctgtgctgcacgaggtgaagcgggagggcctgcctgtggagcagagaaatgagatcctgacagccatcctggccagcctgacagcccggcagaacctgcggcgggagtggcacgcccgctgccagagccgcatcgcccggaccctgcctgctgaccagaagccagaatgtcggccctactgggagaaggatgatgcctccatgcccctgccctttgacctgacagacatcgtgtctgagctgcggggccagctgctggaggccaagccctag

SEQ ID NO: 36390 - DNA, 321 bp, Artificial Sequence
  derived and/or modified sequence
atggcccagctggaggccctgtggaagaagatggagggcgtgaccaatgctgtgctgcacgaggtgaagcgggagggcctgcctgtggagcagagaaatgagatcctgacagccatcctggccagcctgacagcccggcagaacctgcggcgggagtggcacgcccgctgccagagcagaattgcccggaccctgcctgctgaccagaagccagagtgccggccctactgggagaaggatgatgcctccatgcccctgccctttgacctgacagacatcgtgtctgagctgcggggccagctgctggaggccaagccctag

SEQ ID NO: 36391 - DNA, 384 bp, Artificial Sequence
  derived and/or modified sequence
atggagtggaggaaggtgtctgagtgcaacagcgtggagccctgccgggaggtgaagaagtggccctaccgctgcatccaccacggcaagaacttcagcaggatgaccaatgctgtgctgcacgaggtgaagcgggagggcctgcctgtggagcagagaaatgagatcctgacagccatcctggccagcctgacagcccggcagaacctgcggcgggagtggcacgcccgctgccagagccgcatcgcccggaccctgcctgctgaccagaagccagaatgtcggccctactgggagaaggatgatgcctccatgcccctgccctttgacctgacagacatcgtgtctgagctgcggggccagctgctggaggccaagccctag

SEQ ID NO: 36392 - DNA, 1518 bp, Artificial Sequence
  derived and/or modified sequence
atgaagaggacccccacagctgaggagcgggagcgggaggccaagaagctgcggctgctggaggagctggaggacacctggctgccctacctgacccccaaggatgatgagttctaccagcagtggcagctgaagtaccccaagctgatcctgcgggaggccagctctgtgtctgaggagctgcacaaggaggtgcaggaggccttcctgaccctgcacaagcacggctgcctcttccgggacctggtgcgcatccagggcaaggacctgctgacccctgtgagccgcatcctgattggcaaccctggctgcacctacaagtacctgaacaccaggctcttcaccgtgccctggcctgtgaagggcagcaacatcaagcacacagaggccgagattgctgctgcctgtgagaccttcctgaagctgaatgactacctgcagatcgagaccatccaggccctggaggagctggccgccaaggagaaggccaatgaagatgctgtgcccctgtgcatgtctgctgacttcccccgggtgggcatgggcagcagctacaacggccaggatgaggtggacatcaagagcagagctgcctacaacgtgaccctgctgaacttcatggacccccagaagatgccctacctgaaggaggagccctacttcggcatgggcaagatggctgtgtcctggcaccatgatgagaacctggtggacagatctgctgtggccgtgtacagctacagctgtgagggccctgaggaggagagtgaagatgacagccacctggagggccgggaccctgacatctggcacgtgggcttcaagatctcctgggacatcgagaccccaggcctggccatccccctgcaccagggcgactgctacttcatgctggatgacctgaatgccacccaccagcactgtgtgctggccggcagccagccccgcttcagcagcacccaccgggtggctgaatgttccacaggcaccctggactacatcctgcagcgctgccagctggccctgcagaatgtgtgtgatgatgtggacaatgatgatgtgtccctgaagagctttgagcctgctgtgctgaagcagggcgaggagatccacaatgaggtggagtttgagtggctgcggcagttctggttccagggcaaccgctacagaaaatgtacagactggtggtgccagcccatggcccagctggaggccctgtggaagaagatggagggcgtgaccaatgctgtgctgcacgaggtgaagcgggagggcctgcctgtggagcagagaaatgagatcctgacagccatcctggccagcctgacagcccggcagaacctgcggcgggagtggcacgcccgctgccagagccgcatcgcccggaccctgcctgctgaccagaagccagaatgtcggccctactgggagaaggatgatgcctccatgcccctgccctttgacctgacagacatcgtgtctgagctgcggggccagctgctggaggccaagccctag

SEQ ID NO: 36393 - DNA, 183 bp, Artificial Sequence
  derived and/or modified sequence
atggcctgccagggccgggaggagtgctggtgccagagccggatcgcacgcacattgcctgctgatcaaaagcctgaatgccggccctattgggaaaaggacgacgcttctatgccactccctttcgatttgacagacattgtcagtgaattgagagggcaactgctggaggccaaaccttag

SEQ ID NO: 36394 - DNA, 630 bp, Artificial Sequence
  derived and/or modified sequence
atgctggacgacctgaacgccacccaccagcactgcgtgctggccggctctcagcctcgattctcaagcacccaccgcgtcgcagaatgttccaccggcaccctggactacatcctgcagaggtgtcaactggccctccagaacgtgtgtgacgatgtcgataacgatgacgtaagcctgaagtcttttgagcccgccgtgctgaagcagggcgaagaaatccacaatgaagttgaatttgagtggctgaggcagttctggtttcagggcaaccggtaccgaaagtgtaccgactggtggtgccagcctatggcccagctcgaggccctttggaagaagatggagggggttaccaacgcggtgttgcatgaagtcaagagggagggcttgccggttgaacaaaggaatgagattttgaccgcaatactggcctcccttacggcccggcagaaccttcggagagaatggcacgcaaggtgccagtcccgaattgcaaggacactgccagctgaccagaagccagaatgcaggccgtattgggagaaagacgatgcctcaatgccgttgcctttcgatctgaccgacatcgtgagcgaattacgggggcaactgctcgaggcaaagccttag

SEQ ID NO: 36395 - DNA, 321 bp, Artificial Sequence
  derived and/or modified sequence
atggcccagctggaggccctgtggaagaagatggagggcgtgaccaatgctgtcctgcatgaggttaaaagggaaggcttaccagtggaacagcgtaacgagattctaaccgccatcctggcttcccttaccgctcggcagaatctgagacgcgagtggcatgctaggtgccagtcaaggattgctcgtacgctgccagctgatcagaagcctgaatgccgcccatattgggaaaaggacgacgccagcatgcccctcccttttgatctgacagatattgtatctgagcttagaggtcagctgctggaagccaagccttag

SEQ ID NO: 36396 - DNA, 321 bp, Artificial Sequence
  derived and/or modified sequence
atggcccagctggaggccctgtggaagaagatggagggcgtgaccaacgcagtcctccacgaagtaaagagagaaggattacctgtcgagcaacgaaatgagattttgaccgcgattctcgcctctctgaccgcacgccagaacctccggcgagaatggcatgcccgatgtcaatcaagaatcgctcggacacttcctgccgaccagaagcccgagtgccgcccttattgggagaaggatgatgctagtatgcctctgccctttgacctaacggacatcgtatctgaactgcggggtcagctgttagaggcaaagccttag

SEQ ID NO: 36397 - DNA, 384 bp, Artificial Sequence
  derived and/or modified sequence
atggagtggcggaaggtgagcgagtgcaacagcgtggagccctgccgtgaggttaaaaagtggccttaccgatgtatccatcatggcaagaacttcagtagaatgactaacgcggtgttgcatgaagtcaagcgcgaaggattgcccgtggagcagaggaacgaaattctgaccgctatacttgcttcccttacagctcgccagaatctacgtcgggagtggcacgcaaggtgccaatcccggattgcacgcacccttcctgcagaccagaaacctgagtgccggccatactgggagaaagatgacgccagtatgccactgccttttgaccttacagatattgtgagcgaattgcgaggacagttgctagaagccaagccttag

SEQ ID NO: 36398 - DNA, 1518 bp, Artificial Sequence
  derived and/or modified sequence
atgaagcggacccccaccgccgaggagcgggagcgggaggccaagaagttgagactcctggaggaactagaagatacatggctgccctatcttacacccaaagatgacgagttttatcagcagtggcagctcaagtaccccaagcttattttgcgcgaggcatcatccgtgtcagaggagctgcacaaggaggtgcaggaggcctttctgaccctgcacaagcacgggtgtttgtttagagatctagtccgaatccaagggaaagatctgctgactccagtgtccagaattctcattggcaatcccggctgtacctacaagtatctaaatacaaggttgttcaccgtgccatggcctgtaaaggggagcaacattaagcatacggaagctgagattgcggcggcttgcgaaacattcctaaagctgaatgactacctgcagatagagaccatccaggctttggaggaattggctgccaaagagaaggctaacgaagatgccgttcccctgtgtatgtctgcagattttcccagagtggggatgggatcttcctacaacgggcaagacgaagttgacattaaaagtcgagcagcttacaatgtaaccctgctcaactttatggatccgcagaagatgccctatctgaaagaagagccttactttggcatgggcaaaatggcagtgtcatggcatcacgacgaaaacctcgtcgataggagcgctgtggctgtgtattcctactcctgcgaaggcccggaggaggaaagtgaagacgactcccacctagaaggtagggacccagatatttggcacgttggcttcaagataagttgggacattgagacaccagggctcgccatacccctgcaccagggggactgctactttatgctagacgatctgaatgccactcaccaacactgtgtcctcgccggctcccaacctcgattttcatctacccacagggtcgccgaatgttctacaggaactctggactatattctgcaacgatgtcaattggccctccagaacgtatgtgatgatgtggataacgacgacgtgtcactgaagtccttcgaacccgcagtgcttaagcaaggtgaagaaattcataacgaggtggagttcgagtggctgcgacaattctggttccaaggaaatcggtacaggaaatgtaccgattggtggtgtcaaccgatggcccaactcgaggcgctctggaaaaagatggaaggcgtcacaaatgcggtgctgcacgaagtgaaaagagaggggctccccgttgaacagcggaatgagattttgacagccattcttgcttccctgactgctcgccagaatttgcggagggaatggcatgcaaggtgccagtccagaatagcacggacacttcctgccgaccagaagcctgaatgccgaccgtattgggagaaggacgacgcctccatgccattgccattcgaccttaccgacattgtgagcgaattgagaggccagcttttggaagcaaagccctag

SEQ ID NO: 36399 - DNA, 321 bp, Artificial Sequence
  derived and/or modified sequence
atggcccagctggaggccctgtggaagaagatggagggcgtgaccaatgccgtactccacgaagtgaagagagagggcctacctgtcgagcagcgtaatgagattctgactgccatattagcttcccttaccgctcgacagaacctgagaagggagtggcatgcaagatgccaaagccgtattgcccggacgttgccggccgaccagaaacctgagtgtcgcccctactgggaaaaggacgatgctagtatgccgcttccctttgatctcacggatatcgtttcggaacttcgcgggcaattactagaggcgaaaccttag

SEQ ID NO: 36400 - DNA, 183 bp, Artificial Sequence
  derived and/or modified sequence
atggcctgccaaggccgtgaggaatgctggtgccagtctcgaattgcaagaactcttcccgcagatcagaagccagaatgtcgcccttattgggaaaaggacgacgcatctatgcctctgccctttgaccttaccgacatagtttcggagcttcgcggacagctgctggaggccaagccctag

SEQ ID NO: 36401 - DNA, 630 bp, Artificial Sequence
  derived and/or modified sequence
atgctagacgacttgaatgctacccaccaacactgtgtcctggcaggctcgcaaccacgctttagttctacccacagggtagcagagtgttcgacgggcaccctggattatattttgcaacgctgtcaattggccttacagaacgtttgcgatgatgtcgacaacgatgacgtctccctgaagtcgtttgagccagcggtgctgaagcagggcgaggagatccacaacgaggttgagtttgagtggctgaggcagttttggttccagggcaaccgctatcgaaagtgtactgactggtggtgtcaaccaatggctcagctggaggccctgtggaaaaaaatggaaggagtgacgaacgccgtccttcacgaggtgaaaagagaagggctccccgttgaacagcggaacgagatcctgaccgccatattagcctcgctcaccgcccgtcagaacctacggagagagtggcacgcccgatgtcagagtaggattgcgaggacactgcccgctgatcaaaagcccgagtgtcggccttattgggaaaaagatgacgccagtatgcccctgccttttgacttgactgacatcgtgagcgagcttcgtgggcaacttctcgaggccaagccatag

SEQ ID NO: 36402 - DNA, 321 bp, Artificial Sequence
  derived and/or modified sequence
atggctcagttagaggcactctggaagaaaatggagggggtcacaaatgcagtcctgcacgaggtcaaacgagaaggactgcccgtcgaacaaaggaacgaaatccttaccgcgatcctagctagcctcactgcacgacagaacctgcgcagagagtggcatgctcgatgtcagtctagaattgctcgcactctcccagcggatcagaagcctgagtgcaggccttattgggagaaagacgacgcctctatgcctctgccctttgacctgaccgacatcgtaagtgaactgcgcggacagctgctggaagccaagccatag

SEQ ID NO: 36403 - DNA, 321 bp, Artificial Sequence
  derived and/or modified sequence
atggcccagctggaagcgctatggaagaaaatggagggtgttactaacgcagtgttacacgaggtgaaacgggaggggttgccagtggaacaacgcaacgagatcctgaccgctattctggcctcccttacagcccgacagaatctcaggcgggagtggcacgccagatgccaatcacgcatcgcacggacgttacctgccgaccagaaaccagaatgcaggccttactgggagaaggatgacgcctccatgccactccctttcgatctgacagacattgtgtccgagttgcgtggtcagctgctggaagcaaaaccttag

SEQ ID NO: 36404 - DNA, 384 bp, Artificial Sequence
  derived and/or modified sequence
atggaatggcgaaaagtttccgaatgtaacagcgtcgaaccatgcagggaggtgaagaagtggccctacaggtgcatccaccatgggaagaacttctcacgaatgacaaacgccgtgctgcacgaagtaaagcgcgagggccttcctgtcgagcagaggaatgagatcctaaccgccattctcgcctctctgactgcacgccaaaatttgcgccgtgaatggcatgccagatgccagtcccggatcgcaagaacattgccagccgatcaaaagcccgaatgtcgtccttattgggaaaaggacgacgcctctatgcctctgccgtttgatttgaccgatattgtctcagaattgcggggacagttactcgaggccaagccttag

SEQ ID NO: 36405 - DNA, 1518 bp, Artificial Sequence
  derived and/or modified sequence
atgaagagaacacccacagcggaggagcgtgagagagaggcgaaaaagctgagactgttagaggagttggaagatacctggctcccttatttgaccccaaaagatgatgagttttatcaacagtggcagctcaaataccctaaactgattctgcgggaagcttcgtccgtgtctgaagagctacataaagaggtgcaagaggcatttttaacactgcataaacatggttgcctgttccgagatctcgtgcgcatccaaggaaaggatctactcactcctgtgtctagaatcctgataggcaatcccggttgcacgtataaatatctgaatacccgcctatttacggtcccctggcccgtgaagggatccaatatcaaacacacagaggccgagatagccgcagcatgcgaaacttttctcaaactcaacgattacctacagattgaaacaatccaggctttagaagaactagctgcaaaggaaaaagctaacgaagatgccgtgcccttgtgcatgtccgccgacttcccaagagtcggaatgggcagctcttataatggtcaggatgaggtggacattaaatctcgcgctgcctacaacgttacccttctgaactttatggatccgcagaagatgccttacttaaaggaagaaccctacttcgggatgggcaaaatggctgtaagctggcatcatgacgagaatctcgttgatcgatctgccgtggctgtgtatagctacagctgcgaagggccagaggaagaaagcgaggatgattcccacctcgaagggagagaccccgatatttggcacgtgggttttaaaatctcatgggatatcgagacacctggactggctatcccgctccaccagggtgattgctacttcatgctggacgatctgaatgcaactcatcagcattgtgtcctcgccggaagccagccaagattttcatctacccaccgagtcgcagagtgttcaacgggcacactggattatattttgcaaaggtgtcagctggcactgcagaatgtgtgcgacgatgtggataatgatgacgtgtcgttaaaatccttcgagcctgctgtgctgaaacagggggaggaaatccacaatgaagtagaatttgagtggcttcggcagttctggttccaaggtaacagatacaggaaatgtactgactggtggtgccaacctatggcccagcttgaggccctgtggaagaagatggagggagtaactaacgcggtgcttcatgaggtaaagcgcgaagggttgcccgtagaacagcgtaacgagattctgactgcgattctagccagcctgaccgcccgacagaaccttcggagagagtggcacgccaggtgccagtctagaatagcgcgaacactgcctgccgaccagaagcccgagtgccggccttattgggagaaagacgatgcctccatgcctttgccatttgacttgactgatatagtgtctgagctccgtgggcagctgctggaggcaaagccttag

SEQ ID NO: 36406 - DNA, 321 bp, Artificial Sequence
  derived and/or modified sequence
atggcacagttggaggccctgtggaaaaaaatggaaggcgtcactaacgccgttctacatgaggtcaaaagggagggactgcccgtagagcagcgaaatgaaattttgacagcaatccttgcctccctgacagcaaggcagaacctgcggcgagagtggcacgccaggtgtcaatccagaatcgctcgcacactccccgctgaccagaagccagagtgccgaccttattgggaaaaagatgacgcaagcatgccactgccttttgatctcacagacattgtgtccgaattaagaggccagctgctggaggccaaaccctag

SEQ ID NO: 36407 - DNA, 183 bp, Artificial Sequence
  derived and/or modified sequence
atggcctgccagggcagagaggagtgctggtgccagagcagaatcgccagaaccctgcccgccgaccagaagcccgagtgcagaccctactgggagaaggacgacgccagcatgcccctgcccttcgacctgaccgacatcgtgagcgagctgagaggccagctgctggaggccaagccctag

SEQ ID NO: 36408 - DNA, 630 bp, Artificial Sequence
  derived and/or modified sequence
atgctggacgacctgaacgccacccaccagcactgcgtgctggccggcagccagcccagattcagcagcacccacagagtggccgagtgcagcaccggcaccctggactacatcctgcagagatgccagctggccctgcagaacgtgtgcgacgacgtggacaacgacgacgtgagcctgaagagcttcgagcccgccgtgctgaagcagggcgaggagatccacaacgaggtggagttcgagtggctgagacagttctggttccagggcaacagatacagaaagtgcaccgactggtggtgccagcccatggcccagctggaggccctgtggaagaagatggagggcgtgaccaacgccgtgctgcacgaggtgaagagagagggcctgcccgtggagcagagaaacgagatcctgaccgccatcctggccagcctgaccgccagacagaacctgagaagagagtggcacgccagatgccagagcagaatcgccagaaccctgcccgccgaccagaagcccgagtgcagaccctactgggagaaggacgacgccagcatgcccctgcccttcgacctgaccgacatcgtgagcgagctgagaggccagctgctggaggccaagccctag

SEQ ID NO: 36409 - DNA, 321 bp, Artificial Sequence
  derived and/or modified sequence
atggcccagctggaggccctgtggaagaagatggagggcgtgaccaacgccgtgctgcacgaggtgaagagagagggcctgcccgtggagcagagaaacgagatcctgaccgccatcctggccagcctgaccgccagacagaacctgagaagagagtggcacgccagatgccagagcagaatcgccagaaccctgcccgccgaccagaagcccgagtgcagaccctactgggagaaggacgacgccagcatgcccctgcccttcgacctgaccgacatcgtgagcgagctgagaggccagctgctggaggccaagccctag

SEQ ID NO: 36410 - DNA, 384 bp, Artificial Sequence
  derived and/or modified sequence
atggagtggagaaaggtgagcgagtgcaacagcgtggagccctgcagagaggtgaagaagtggccctacagatgcatccaccacggcaagaacttcagcagaatgaccaacgccgtgctgcacgaggtgaagagagagggcctgcccgtggagcagagaaacgagatcctgaccgccatcctggccagcctgaccgccagacagaacctgagaagagagtggcacgccagatgccagagcagaatcgccagaaccctgcccgccgaccagaagcccgagtgcagaccctactgggagaaggacgacgccagcatgcccctgcccttcgacctgaccgacatcgtgagcgagctgagaggccagctgctggaggccaagccctag

SEQ ID NO: 36411 - DNA, 1518 bp, Artificial Sequence
  derived and/or modified sequence
atgaagagaacccccaccgccgaggagagagagagagaggccaagaagctgagactgctggaggagctggaggacacctggctgccctacctgacccccaaggacgacgagttctaccagcagtggcagctgaagtaccccaagctgatcctgagagaggccagcagcgtgagcgaggagctgcacaaggaggtgcaggaggccttcctgaccctgcacaagcacggctgcctgttcagagacctggtgagaatccagggcaaggacctgctgacccccgtgagcagaatcctgatcggcaaccccggctgcacctacaagtacctgaacaccagactgttcaccgtgccctggcccgtgaagggcagcaacatcaagcacaccgaggccgagatcgccgccgcctgcgagaccttcctgaagctgaacgactacctgcagatcgagaccatccaggccctggaggagctggccgccaaggagaaggccaacgaggacgccgtgcccctgtgcatgagcgccgacttccccagagtgggcatgggcagcagctacaacggccaggacgaggtggacatcaagagcagagccgcctacaacgtgaccctgctgaacttcatggacccccagaagatgccctacctgaaggaggagccctacttcggcatgggcaagatggccgtgagctggcaccacgacgagaacctggtggacagaagcgccgtggccgtgtacagctacagctgcgagggccccgaggaggagagcgaggacgacagccacctggagggcagagaccccgacatctggcacgtgggcttcaagatcagctgggacatcgagacccccggcctggccatccccctgcaccagggcgactgctacttcatgctggacgacctgaacgccacccaccagcactgcgtgctggccggcagccagcccagattcagcagcacccacagagtggccgagtgcagcaccggcaccctggactacatcctgcagagatgccagctggccctgcagaacgtgtgcgacgacgtggacaacgacgacgtgagcctgaagagcttcgagcccgccgtgctgaagcagggcgaggagatccacaacgaggtggagttcgagtggctgagacagttctggttccagggcaacagatacagaaagtgcaccgactggtggtgccagcccatggcccagctggaggccctgtggaagaagatggagggcgtgaccaacgccgtgctgcacgaggtgaagagagagggcctgcccgtggagcagagaaacgagatcctgaccgccatcctggccagcctgaccgccagacagaacctgagaagagagtggcacgccagatgccagagcagaatcgccagaaccctgcccgccgaccagaagcccgagtgcagaccctactgggagaaggacgacgccagcatgcccctgcccttcgacctgaccgacatcgtgagcgagctgagaggccagctgctggaggccaagccctag

SEQ ID NO: 36412 - protein, 553 aa, Artificial Sequence
  derived and/or modified sequence
MSKAAGGAAAAAAAAESCSPAPAGSSAAPPAPVEDLSKVSDEELLQWSKEELIRSLRRAEAEKVSAMLDHSNLIREVNRRLQLHLGEIRGLKDINQKLQEDNQELRDLCCFLDDDRQKGKRVSREWQRLGRYTAGVMHKEVALYLQKLKDLEVKQEEVVKENMELKELCVLLDEEKGAGCAGSRCSIDSQASLCQLTASTAPYVRDVGDGSSTSSTGSTDSPDHHKHHASSGSPEHLQKPRSEGSPEHSKHRSASPEHPQKPRACGTPDRPKALKGPSPEHHKPLCKGSPEQQRHPHPGSSPETLPKHVLSGSPEHFQKHRSGSSPEHARHSGGSPEHLQKHALGGSLEHLPRARGTSPEHLKQHYGGSPDHKHGGGSGGSGGSGGGSREGTLRRQAQEDGSPHHRNVYSGMNESTLSYVRQLEARVRQLEEENRMLPQASQNRRQPPTRNSSNMEKGWGSRARRVLQWWQGCRGIGRCLPTLPGSFRLSSGADGSNSSPNSAASFSGHATPSQQPEPVVHSLKVVWRKLGDAAGSCPGIRQHLSGNQYKGPM

SEQ ID NO: 36413 - DNA, 1662 bp, Artificial Sequence
  derived and/or modified sequence
atgagcaaggccgccggcggcgccgccgccgccgccgccgccgccgagagctgcagccccgcccccgccggcagcagcgccgccccccccgcccccgtggaggacctgagcaaggtgagcgacgaggagctgctgcagtggagcaaggaggagctgatcagaagcctgagaagagccgaggccgagaaggtgagcgccatgctggaccacagcaacctgatcagagaggtgaacagaagactgcagctgcacctgggcgagatcagaggcctgaaggacatcaaccagaagctgcaggaggacaaccaggagctgagagacctgtgctgcttcctggacgacgacagacagaagggcaagagagtgagcagagagtggcagagactgggcagatacaccgccggcgtgatgcacaaggaggtggccctgtacctgcagaagctgaaggacctggaggtgaagcaggaggaggtggtgaaggagaacatggagctgaaggagctgtgcgtgctgctggacgaggagaagggcgccggctgcgccggcagcagatgcagcatcgacagccaggccagcctgtgccagctgaccgccagcaccgccccctacgtgagagacgtgggcgacggcagcagcaccagcagcaccggcagcaccgacagccccgaccaccacaagcaccacgccagcagcggcagccccgagcacctgcagaagcccagaagcgagggcagccccgagcacagcaagcacagaagcgccagccccgagcacccccagaagcccagagcctgcggcacccccgacagacccaaggccctgaagggccccagccccgagcaccacaagcccctgtgcaagggcagccccgagcagcagagacacccccaccccggcagcagccccgagaccctgcccaagcacgtgctgagcggcagccccgagcacttccagaagcacagaagcggcagcagccccgagcacgccagacacagcggcggcagccccgagcacctgcagaagcacgccctgggcggcagcctggagcacctgcccagagccagaggcaccagccccgagcacctgaagcagcactacggcggcagccccgaccacaagcacggcggcggcagcggcggcagcggcggcagcggcggcggcagcagagagggcaccctgagaagacaggcccaggaggacggcagcccccaccacagaaacgtgtacagcggcatgaacgagagcaccctgagctacgtgagacagctggaggccagagtgagacagctggaggaggagaacagaatgctgccccaggccagccagaacagaagacagccccccaccagaaacagcagcaacatggagaagggctggggcagcagagccagaagagtgctgcagtggtggcagggctgcagaggcatcggcagatgcctgcccaccctgcccggcagcttcagactgagcagcggcgccgacggcagcaacagcagccccaacagcgccgccagcttcagcggccacgccacccccagccagcagcccgagcccgtggtgcacagcctgaaggtggtgtggagaaagctgggcgacgccgccggcagctgccccggcatcagacagcacctgagcggcaaccagtacaagggccccatgtag

SEQ ID NO: 36414 - DNA, 3982 bp, Artificial Sequence
  derived and/or modified sequence
gcgccgcggtgcccggcgcgccctccaagctaggagaggggagaagccgggggctgcagctgggcaagggggaggaaagtgcgtgtgcgtgcacgcctgtgtgcagggcagagagtgcggggggcgacagtctcggcttagggcggaggagagggcaggggaacggcggtgcagctcccccgctgtccccgaggatttcccgcggcagccccgggctccccagtgcccctcaccatggacttgcgcggagttgggacgggcctcggcagcagcaagcggctggctgccgggccctgggggagcgcgggcgcgcgcgcggggatggcgaggtaggatggccacccagcgcgacccccgccgccccaacccagcggcccctgggcggtgccgctgactcgccggagcgcacaggggtgtgggcggaggcggcctcgccgcgcccgcgccttcgggagtcgcctcgcctcttccacccacttgcacctgccaccccgcggataccatgtcgaaggcggccggaggcgcggcggcggctgcggcggcggcggaaagttgttccccagccccggccggctcgtccgcggccccgcccgcgccggtggaggacctgtccaaagtgtcggacgaggagctgctgcagtggagcaaggaggagctgatccgcagcctgcggcgcgccgaggcggagaaggtgagcgcgatgctggaccacagcaacctcatccgcgaggtgaaccgccgcctgcagctgcacctcggcgagatccgcggcctcaaggatatcaaccagaaactccaggaagacaaccaggaactgagggacctctgctgtttcctggatgatgaccggcagaaaggcaagagggtgtctcgggagtggcagagactgggtcgctacactgccggggtgatgcacaaggaagtggccttatacctgcagaagctgaaagacctggaggtgaagcaggaggaagtggtgaaggagaacatggagctcaaggagctctgtgtgctactagatgaggagaagggtgcaggctgcgcaggcagccgctgctccatcgacagccaggccagcctgtgccaactcacagcctccaccgcaccctacgtgcgggatgtgggtgacggcagcagcacctccagcactggcagcactgacagcccggaccaccacaagcaccacgcgagcagtggcagcccggagcacctgcagaagccccggagcgagggcagcccggagcactccaagcacaggagcgccagccccgagcatccacagaaacccagagcctgtggaaccccagatcgccccaaagcactcaaaggacctagcccggagcaccacaaacccttgtgcaagggcagccccgaacagcaaaggcacccgcatccagggagcagccccgaaacgctgcccaagcacgtgctgagtgggagcccggaacacttccagaagcaccggtcagggagcagccctgaacacgccaggcacagtggagggagcccggagcatcttcagaaacacgctcttggggggagcctagagcatctccccagagccaggggcaccagcccggagcacctcaaacaacattatggagggagccctgatcacaaacacggaggaggcagtggaggaagtggaggcagcggcggaggcagcagggagggcaccctcagacggcaggcacaggaggacgggtcaccccatcaccggaatgtctacagtggcatgaacgaatcaaccttgtcctatgttaggcagctggaggcaagagtaagacagctggaggaagaaaatcgcatgctgccccaggccagccagaatagaaggcaacctccaactagaaacagctcaaatatggagaaaggctgggggtccagagcccggcgggtcttgcagtggtggcaagggtgccgaggaataggacgatgcctgcctactctcccgggttcttttaggttgtcatcaggggctgatgggagtaacagttcacccaactctgcagctagcttcagtggacatgccacaccttcccagcagcctgaacctgtggtacattctcttaaggttgtgtggaggaaacttggagatgctgcaggttcgtgtcctggaattaggcaacatttgtcaggaaaccagtacaaaggaccaatgtgagatgcactctttttcaaacaggagatcaccactgccagaaagtgatagaagacaagaagaaaaaggaaagagtgggtttccacaaacctggactcatggaataacatggagtgattgtacattgcacatatctcccctctaaaacctgtagtacaacttctcccctcaagctgatattctgtgtctctcacctcaatgtccacaacagtcaatctcaaacaaggtagctttgaacatctcaaacagagtagctttgaaaatcaacattttggtaccagtgttttcattagaaataagtgtttttaactccccagatataatattgtaattgggaaacctgaatagttttaagagtccagtggagcctcagtgttttgaatagagatgactcattacacataatggtaggagttttctaccatatcatattgaagatatgaagaggtattttccagcttcccaagtttgagagttgggcatttacctcttacacttcagtcaacaaacaaactagtaattcctaatgcataattaatttggatgcaagataagattaagtttctggagttttgttttgacttctgaggtgctaaaaaataccatgtaaattctccctaccagctagaagggtagcaagacgttgtagagtgcttatcagagagtaccatttacttcaattgatcaatataaatatatctttttttttcatcttaatgagtttctcataaagacacatcttggggcataccaaccttcatattcattcagtgtatccattggtgttaatattaacaatttcaactaaaaacaacaaacataatttttctaagtgtttcgagctgtgagatgtcaatttctacaatttagtttctagacatgctgtatatttaataaactttatgtaaactttaaaatattgcactgcatttatgaaaaaagctttctttgcctactgcagctatctaacattttatgaaactgacgcatgtccttcattattgaggctaaaagctcttgttcagattgcttgaggtttgaaaaagaggtgtgctagctttgcttagtttatttcttatttttggtatacatatacatatatataacattagaatgtgtgtactggaaatgctatgataggtattttgtgttaatccaaatgcaatgatagtttcttgtatgaatgtgcaagaggcctgtgaccgaatgctacgtttttatggtagtttaagattataaaagtagaaatgcaacaattcccagtttttggataggttctaaatttctgagatttgattcatggcagatattctctgttgttgttgttttagatgggctcattacataacgagttaattgtcactagtaggagactgtgaaggaattttgttatactttcaaaaatgttactgtgatgaaaaatcatctattttcagaaaatatttatgaattaatttactatagaattatctctctaattatcataattgggttacaatttaagctccccttttaaatgttatattttaaaatgttattactctataaaagaaaattgcttgctatatttacaccttctttcctaggaaagctttcatccttaaattgttgtattcctaccctctgaagacatttaaaataagcttttgtgcctgcagcagagcctgcagaagctaatacaagggacactggtcttttgacaaaataaacttgtgtaaattttgatactgtattaaaactatttttttaaagttctgcataaaattgagtattaagtatatgtgttcatcttagcaatggtaataaattatttaatctcac

SEQ ID NO: 36415 - DNA, 1662 bp, Artificial Sequence
  derived and/or modified sequence
atgagcaaggctgctggaggagctgcggccgcggccgccgcagcagaatcatgtagcccagcacctgcaggtagctcagccgcccccccagctccagtggaggatttgagcaaggtgtcagatgaggagcttctgcagtggtccaaagaggaactcattcgctccttacgacgggctgaggccgaaaaggtctccgctatgctcgatcactccaacctgatcagagaggtcaatcgccggctgcagcttcatctgggcgagatcaggggactgaaagatatcaatcaaaaactacaggaggacaaccaggagctcagggacctgtgttgttttctcgacgacgatagacaaaaaggtaagcgggtatccagggaatggcagagattggggcggtatacagcaggcgtgatgcacaaagaggtcgcactgtatctccagaagctgaaggatctcgaggtgaagcaagaggaggtcgtgaaggaaaatatggaattaaaggagttgtgtgtgctgcttgacgaggaaaagggggcgggatgtgcaggcagtagatgtagtattgattctcaggccagcctctgtcagcttactgcttccaccgccccctacgtccgggacgtgggcgatggttcatccacttccagcactggcagtactgactctccggatcaccataagcaccacgcctctagtggaagtccagagcacctccaaaaacctcggtctgaagggagccctgagcactcaaaacaccgctctgccagtcccgaacacccgcaaaagccccgcgcttgcgggactcctgatcgtcccaaagccctcaagggcccctctcctgaacatcacaaaccactgtgcaaaggctcaccggaacagcagagacacccacatccaggaagctcaccagagacattacctaaacatgtgttgtcagggagccccgagcacttccagaagcaccgctcgggctcatcccccgagcacgcgaggcactctggaggctctcccgagcatctgcagaagcacgcactgggcgggtccctggagcacctgccacgggctcgggggaccagcccagagcatctaaagcagcactacggcggaagcccggaccacaaacacggcggcgggagtggtgggagcggcggaagcggtgggggctctcgggaaggtaccttgagacgccaggctcaagaggatggaagcccccaccaccgtaatgtgtactccggcatgaacgagtctaccctgtcctacgtgagacaactggaagccagggtgcgtcagttggaggaagaaaaccgcatgctgccacaagcgtctcagaatcggaggcagccccctacaaggaattcttctaatatggaaaaagggtggggatcccgggcacggcgcgtcctgcagtggtggcaggggtgtagagggatcggcaggtgtctgcccacattgccaggatctttccggctgagcagcggcgcagatgggtccaactcctctcccaattccgcagcatctttctcggggcacgctaccccttcacagcagccggaacctgtcgtgcatagtctcaaggtggtgtggaggaaactcggagacgctgcaggcagttgccccggtattcgccagcatctgtccggtaatcagtataaagggcccatgtag

SEQ ID NO: 36416 - DNA, 1662 bp, Artificial Sequence
  derived and/or modified sequence
atgagcaaggctgctggaggagctgctgctgctgctgctgctgctgagagctgcagccctgccccagctggcagcagcgctgcccccccagcccctgtggaggacctgagcaaggtgtctgatgaggagctgctgcagtggagcaaggaggagctgatccgcagcctgcggcgggcagaggccgagaaggtgtctgccatgctggaccacagcaacctgatccgggaggtgaacagaaggctgcagctgcacctgggggagatccggggcctgaaggacatcaaccagaagctgcaggaggacaaccaggagctgcgggacctgtgctgcttcctggatgatgaccggcagaagggcaagagggtgtcccgggagtggcagaggctgggccgctacacagctggggtgatgcacaaggaggtggccctgtacctgcagaagctgaaggacctggaggtgaagcaggaggaggtggtgaaggagaacatggagctgaaggagctgtgtgtgctgctggatgaggagaagggggccggctgtgccggcagccgctgcagcattgacagccaggccagcctgtgccagctgacagccagcacagccccctacgtgagagatgtgggagatggcagcagcaccagcagcacaggcagcacagacagcccagaccaccacaagcaccacgccagcagcggcagccctgagcacctgcagaagcccaggtctgagggcagccctgagcacagcaagcacaggtctgccagccctgagcacccccagaagccccgggcctgtggcaccccagaccggcccaaggccctgaagggccccagccctgagcaccacaagcccctgtgcaagggcagccctgagcagcagaggcacccccaccctggcagcagccctgagaccctgcccaagcacgtgctgagcggcagccctgagcacttccagaagcacaggagcggcagcagccctgagcacgcccggcacagcggcggcagccctgagcacctgcagaagcacgccctgggcggcagcctggagcacctgccccgggcccggggcaccagccctgagcacctgaagcagcactacggcggcagcccagaccacaagcacggcggcggcagcggcggcagcggcggcagcggcggcggcagccgggagggcaccctgcggcggcaggcccaggaggatggcagcccccaccacagaaatgtgtacagcggcatgaatgaaagcaccctgtcctatgtgcggcagctggaggcccgggtgcggcagctggaggaggagaacaggatgctgccccaggccagccagaacagacggcagccccccaccaggaacagcagcaacatggagaagggctggggcagccgggcccggcgggtgctgcagtggtggcagggctgccggggcatcggccgctgcctgcccaccctgcccggcagcttccggctgagcagtggagcagatggcagcaacagcagccccaacagcgctgccagcttcagcggccacgccacccccagccagcagcctgagcctgtggtgcacagcctgaaggtggtgtggaggaagctgggagatgctgctggcagctgccccggcatccggcagcacctgagcggcaaccagtacaagggccccatgtag

SEQ ID NO: 36417 - DNA, 1662 bp, Artificial Sequence
  derived and/or modified sequence
atgagcaaggccgccggcggcgccgccgccgccgccgccgccgccgaaagctgttcccctgccccagctggcagctcagctgccccacctgctccagtcgaagatctcagcaaggtgagcgatgaagagctccttcagtggagtaaagaggaattaatcaggtctctgaggcgagcggaggcagagaaagtgtctgccatgcttgaccactcaaatcttattcgtgaggttaaccggcgcttgcaattacacttaggggaaatacggggactgaaagacatcaaccagaagttacaggaagataaccaggagctgcgtgatctgtgctgtttcctagacgacgacagacagaaaggaaagcgtgtaagtcgcgagtggcagcggctaggtagatatactgctggcgtaatgcacaaggaggtggcactgtatttgcagaaacttaaggatctcgaagtgaagcaggaggaggttgtgaaagaaaacatggagctcaaggagctctgcgtgctgctggacgaagagaaaggggccgggtgcgctggcagcagatgcagcatagatagccaggcgtcattatgccagctgactgcttcgaccgccccatacgttcgggacgtgggggatggcagcagtacttcttccaccgggagcacagacagtcccgatcaccacaaacatcatgctagttccggctcacctgagcatctgcagaagccccgcagcgaggggagcccggaacactcaaagcacaggtccgcctcaccagagcatccccagaagcctcgggcatgcgggacaccagatagaccaaaagccttgaagggccccagcccagagcaccacaagccactttgtaagggctcacccgagcagcagcggcacccacaccccggtagctctccggagactctgcccaaacacgtgttgtccggcagccccgagcattttcagaagcatcgaagtggatctagccccgagcacgcccgccatagcggagggtctccggagcatctacagaaacacgctctggggggatcacttgaacatctgccacgggcgcgcggtactagccccgagcatctgaaacagcactatgggggctccccggatcacaaacatggaggaggttctggagggagcgggggttctggcgggggttccagggagggcacattgcgacggcaggcccaggaggatggaagcccccaccatagaaacgtgtacagcgggatgaatgaaagtactcttagttatgttcggcagctggaagctagggtccggcaactagaagaagagaatagaatgttgccccaggcctctcaaaacaggcgacagccccctacccgcaacagcagcaacatggagaaaggctggggatcccgagctcggcgcgtgttgcagtggtggcagggatgtcgcggtatcggccggtgcttgcccaccttacctggaagcttccgtctgtcatccggagccgatggctcaaattcatcccccaacagtgccgcctccttctcgggacacgccacaccctctcagcagcccgaacccgtcgtgcactctctgaaggttgtttggaggaaactcggggatgcagctgggtcttgcccagggatccggcaacacttgtcggggaaccagtataagggtccgatgtag

SEQ ID NO: 36418 - DNA, 1662 bp, Artificial Sequence
  derived and/or modified sequence
atgagcaaggcagctggtggcgcagctgccgctgcggcagcagccgaatcctgctcccctgccccagctgggtccagcgccgcacccccagcccctgtcgaggatctaagcaaggtgtcagacgaagaactgctgcagtggtcaaaggaagaactgatcaggtcgctcagaagagctgaagccgaaaaggtgtctgctatgctagaccacagcaatttgattagagaggtgaatagacggctccaacttcatctcggggagatacgagggctgaaagacatcaatcagaagctgcaggaagataatcaggaactgcgggatctgtgttgttttctcgacgatgatagacagaagggcaaacgcgtgagtcgtgagtggcagcgactgggtcgctatactgctggagtgatgcacaaggaggtcgctctgtatctgcagaaactaaaagacctggaggtgaagcaggaagaagtggtcaaagagaacatggaactcaaagagctgtgtgtgctgttggacgaggagaagggagctggctgcgcaggtagcaggtgcagcatcgatagccaggctagcctctgtcagctaactgcttcaacggctccttatgtaagagacgtgggcgacggttcaagcaccagttctaccgggagcactgactccccggaccaccacaagcatcacgcttcgtcaggctctccagaacacttacaaaaacccagaagcgagggctccccggaacacagcaaacaccggagcgcctcccccgaacaccctcagaaacccagagcctgcggcacccccgaccgacccaaggctcttaagggcccttctcctgagcatcacaagccactgtgtaagggcagccctgaacagcagaggcaccctcaccctggctcttcacccgaaacccttcccaaacacgtcctgagcggcagtccagagcatttccagaagcaccgttccggatcttcccccgaacacgccagacacagcggagggagcccggaacacctgcaaaaacatgccctcgggggtagcttggaacatctgccgagggctcggggtacaagtcctgagcacctgaaacagcactatggaggatctccggaccacaagcacgggggtggctcaggaggctccggcggtagcggcggtggaagccgcgaagggacactccgccgacaggctcaggaggacggcagtccacaccaccgcaacgtttactcaggcatgaatgaatcgactctatcctacgtgcgccagctcgaggcaagggtccgtcagctggaggaggaaaacaggatgctcccccaagcctcacaaaaccgtaggcagccaccaacacgcaacagctcgaacatggagaagggttggggctcccgagcacggagggttttgcagtggtggcaaggttgccggggaatcggcaggtgccttcccaccctgcctggatcctttcgcctgtccagcggtgccgacggatcaaacagcagtcccaacagtgctgcctccttctcaggtcatgccactccttctcagcagcccgagcccgttgtgcactctctgaaggtcgtatggcgaaaactcggggatgctgctggtagctgtccgggtatccggcagcatttatcaggcaaccagtataagggacccatgtag

SEQ ID NO: 36419 - protein, 1489 aa, Artificial Sequence
  derived and/or modified sequence
MRQVLWLCNVCVTARETRHHLHLPAILDKMPAPGALILLAAVSASGCLASPAHPDGFALGRAPLAPPYAVVLISCSGLLAFIFLLLTCLCCKRGDVGFKEFENPEGEDCSGEYTPPAEETSSSQSLPDVYILPLAEVSLPMPAPQPSHSDMTTPLGLSRQHLSYLQEIGSGWFGKVILGEIFSDYTPAQVVVKELRASAGPLEQRKFISEAQPYRSLQHPNVLQCLGLCVETLPFLLIMEFCQLGDLKRYLRAQRPPEGLSPELPPRDLRTLQRMGLEIARGLAHLHSHNYVHSDLALRNCLLTSDLTVRIGDYGLAHSNYKEDYYLTPERLWIPLRWAAPELLGELHGTFMVVDQSRESNIWSLGVTLWELFEFGAQPYRHLSDEEVLAFVVRQQHVKLARPRLKLPYADYWYDILQSCWRPPAQRPSASDLQLQLTYLLSERPPRPPPPPPPPRDGPFPWPWPPAHSAPRPGTLSSPFPLLDGFPGADPDDVLTVTESSRGLNLECLWEKARRGAGRGGGAPAWQPASAPPAPHANPSNPFYEALSTPSVLPVISARSPSVSSEYYIRLEEHGSPPEPLFPNDWDPLDPGVPAPQAPQAPSEVPQLVSETWASPLFPAPRPFPAQSSASGSFLLSGWDPEGRGAGETLAGDPAEVLGERGTAPWVEEEEEEEEGSSPGEDSSSLGGGPSRRGPLPCPLCSREGACSCLPLERGDAVAGWGGHPALGCPHPPEDDSSLRAERGSLADLPMAPPASAPPEFLDPLMGAAAPQYPGRGPPPAPPPPPPPPRAPADPAASPDPPSAVASPGSGLSSPGPKPGDSGYETETPFSPEGAFPGGGAAEEEGVPRPRAPPEPPDPGAPRPPPDPGPLPLPGPREKPTFVVQVSTEQLLMSLREDVTRNLLGEKGATARETGPRKAGRGPGNREKVPGLNRDPTVLGNGKQAPSLSLPVNGVTVLENGDQRAPGIEEKAAENGALGSPEREEKVLENGELTPPRREEKALENGELRSPEAGEKVLVNGGLTPPKSEDKVSENGGLRFPRNTERPPETGPWRAPGPWEKTPESWGPAPTIGEPAPETSLERAPAPSAVVSSRNGGETAPGPLGPAPKNGTLEPGTERRAPETGGAPRAPGAGRLDLGSGGRAPVGTGTAPGGGPGSGVDAKAGWVDNTRPQPPPPPLPPPPEAQPRRLEPAPPRARPEVAPEGEPGAPDSRAGGDTALSGDGDPPKPERKGPEMPRLFLDLGPPQGNSEQIKARLSRLSLALPPLTLTPFPGPGPRRPPWEGADAGAAGGEAGGAGAPGPAEEDGEDEDEDEEEDEEAAAPGAAAGPRGPGRARAAPVPVVVSSADADAARPLRGLLKSPRGADEPEDSELERKRKMVSFHGDVTVYLFDQETPTNELSVQAPPEGDTDPSTPPAPPTPPHPATPGDGFPSNDSGFGGSFEWAEDFPLLPPPGPPLCFSRFSVSPALETPGPPARAPDARPAGPVEN

SEQ ID NO: 36420 - DNA, 4470 bp, Artificial Sequence
  derived and/or modified sequence
atgagacaggtgctgtggctgtgcaacgtgtgcgtgaccgccagagagaccagacaccacctgcacctgcccgccatcctggacaagatgcccgcccccggcgccctgatcctgctggccgccgtgagcgccagcggctgcctggccagccccgcccaccccgacggcttcgccctgggcagagcccccctggcccccccctacgccgtggtgctgatcagctgcagcggcctgctggccttcatcttcctgctgctgacctgcctgtgctgcaagagaggcgacgtgggcttcaaggagttcgagaaccccgagggcgaggactgcagcggcgagtacaccccccccgccgaggagaccagcagcagccagagcctgcccgacgtgtacatcctgcccctggccgaggtgagcctgcccatgcccgccccccagcccagccacagcgacatgaccacccccctgggcctgagcagacagcacctgagctacctgcaggagatcggcagcggctggttcggcaaggtgatcctgggcgagatcttcagcgactacacccccgcccaggtggtggtgaaggagctgagagccagcgccggccccctggagcagagaaagttcatcagcgaggcccagccctacagaagcctgcagcaccccaacgtgctgcagtgcctgggcctgtgcgtggagaccctgcccttcctgctgatcatggagttctgccagctgggcgacctgaagagatacctgagagcccagagaccccccgagggcctgagccccgagctgccccccagagacctgagaaccctgcagagaatgggcctggagatcgccagaggcctggcccacctgcacagccacaactacgtgcacagcgacctggccctgagaaactgcctgctgaccagcgacctgaccgtgagaatcggcgactacggcctggcccacagcaactacaaggaggactactacctgacccccgagagactgtggatccccctgagatgggccgcccccgagctgctgggcgagctgcacggcaccttcatggtggtggaccagagcagagagagcaacatctggagcctgggcgtgaccctgtgggagctgttcgagttcggcgcccagccctacagacacctgagcgacgaggaggtgctggccttcgtggtgagacagcagcacgtgaagctggccagacccagactgaagctgccctacgccgactactggtacgacatcctgcagagctgctggagaccccccgcccagagacccagcgccagcgacctgcagctgcagctgacctacctgctgagcgagagaccccccagaccccccccccccccccccccccccagagacggccccttcccctggccctggccccccgcccacagcgcccccagacccggcaccctgagcagccccttccccctgctggacggcttccccggcgccgaccccgacgacgtgctgaccgtgaccgagagcagcagaggcctgaacctggagtgcctgtgggagaaggccagaagaggcgccggcagaggcggcggcgcccccgcctggcagcccgccagcgccccccccgccccccacgccaaccccagcaaccccttctacgaggccctgagcacccccagcgtgctgcccgtgatcagcgccagaagccccagcgtgagcagcgagtactacatcagactggaggagcacggcagcccccccgagcccctgttccccaacgactgggaccccctggaccccggcgtgcccgccccccaggccccccaggcccccagcgaggtgccccagctggtgagcgagacctgggccagccccctgttccccgcccccagacccttccccgcccagagcagcgccagcggcagcttcctgctgagcggctgggaccccgagggcagaggcgccggcgagaccctggccggcgaccccgccgaggtgctgggcgagagaggcaccgccccctgggtggaggaggaggaggaggaggaggagggcagcagccccggcgaggacagcagcagcctgggcggcggccccagcagaagaggccccctgccctgccccctgtgcagcagagagggcgcctgcagctgcctgcccctggagagaggcgacgccgtggccggctggggcggccaccccgccctgggctgcccccacccccccgaggacgacagcagcctgagagccgagagaggcagcctggccgacctgcccatggccccccccgccagcgccccccccgagttcctggaccccctgatgggcgccgccgccccccagtaccccggcagaggccccccccccgccccccccccccccccccccccccccagagcccccgccgaccccgccgccagccccgacccccccagcgccgtggccagccccggcagcggcctgagcagccccggccccaagcccggcgacagcggctacgagaccgagacccccttcagccccgagggcgccttccccggcggcggcgccgccgaggaggagggcgtgcccagacccagagccccccccgagccccccgaccccggcgcccccagacccccccccgaccccggccccctgcccctgcccggccccagagagaagcccaccttcgtggtgcaggtgagcaccgagcagctgctgatgagcctgagagaggacgtgaccagaaacctgctgggcgagaagggcgccaccgccagagagaccggccccagaaaggccggcagaggccccggcaacagagagaaggtgcccggcctgaacagagaccccaccgtgctgggcaacggcaagcaggcccccagcctgagcctgcccgtgaacggcgtgaccgtgctggagaacggcgaccagagagcccccggcatcgaggagaaggccgccgagaacggcgccctgggcagccccgagagagaggagaaggtgctggagaacggcgagctgaccccccccagaagagaggagaaggccctggagaacggcgagctgagaagccccgaggccggcgagaaggtgctggtgaacggcggcctgaccccccccaagagcgaggacaaggtgagcgagaacggcggcctgagattccccagaaacaccgagagaccccccgagaccggcccctggagagcccccggcccctgggagaagacccccgagagctggggccccgcccccaccatcggcgagcccgcccccgagaccagcctggagagagcccccgcccccagcgccgtggtgagcagcagaaacggcggcgagaccgcccccggccccctgggccccgcccccaagaacggcaccctggagcccggcaccgagagaagagcccccgagaccggcggcgcccccagagcccccggcgccggcagactggacctgggcagcggcggcagagcccccgtgggcaccggcaccgcccccggcggcggccccggcagcggcgtggacgccaaggccggctgggtggacaacaccagaccccagcccccccccccccccctgccccccccccccgaggcccagcccagaagactggagcccgccccccccagagccagacccgaggtggcccccgagggcgagcccggcgcccccgacagcagagccggcggcgacaccgccctgagcggcgacggcgacccccccaagcccgagagaaagggccccgagatgcccagactgttcctggacctgggccccccccagggcaacagcgagcagatcaaggccagactgagcagactgagcctggccctgccccccctgaccctgacccccttccccggccccggccccagaagacccccctgggagggcgccgacgccggcgccgccggcggcgaggccggcggcgccggcgcccccggccccgccgaggaggacggcgaggacgaggacgaggacgaggaggaggacgaggaggccgccgcccccggcgccgccgccggccccagaggccccggcagagccagagccgcccccgtgcccgtggtggtgagcagcgccgacgccgacgccgccagacccctgagaggcctgctgaagagccccagaggcgccgacgagcccgaggacagcgagctggagagaaagagaaagatggtgagcttccacggcgacgtgaccgtgtacctgttcgaccaggagacccccaccaacgagctgagcgtgcaggccccccccgagggcgacaccgaccccagcaccccccccgccccccccacccccccccaccccgccacccccggcgacggcttccccagcaacgacagcggcttcggcggcagcttcgagtgggccgaggacttccccctgctgcccccccccggcccccccctgtgcttcagcagattcagcgtgagccccgccctggagacccccggcccccccgccagagcccccgacgccagacccgccggccccgtggagaactag

SEQ ID NO: 36421 - DNA, 4470 bp, Artificial Sequence
  derived and/or modified sequence
atgcgccaagtgctgtggctttgcaatgtgtgcgtcacggctagagagacacgccatcacctccacctgccagcaattctggacaagatgcccgcaccaggcgctctcatcctcctcgctgcagtttctgcatccgggtgcctcgctagtccggcccatcccgatggatttgcactgggtagagctccccttgctcctccttatgccgtggtgttaatcagttgctccgggttgctggcttttattttcttactgctcacgtgtctttgctgtaaaagaggcgacgtcggctttaaagaattcgaaaatccagaaggggaagattgctccggggagtacactccccccgcggaagaaaccagctcctcacagtccctgccagacgtgtatattctgccccttgcagaggtcagtcttcctatgcccgccccacagcctagccacagtgatatgaccacgccccttgggttgtctaggcagcacctttcgtatcttcaggagattggcagcgggtggttcggcaaggttatactcggagagatcttcagtgactataccccagctcaggtggtcgtgaaggagctccgcgctagcgctggacccctggaacagcgaaaatttatcagtgaagcacagccatatcggtcactgcagcatccgaatgtcctacaatgccttggtctttgtgtggaaaccttgcccttcctacttattatggaattttgtcaattaggagacttgaagagatatctacgagcgcagaggccgccagaaggcctgagcccagaactgccaccccgagacctccgaacactccagcggatgggacttgaaatagcgaggggactcgcacatctgcacagccataattatgttcacagcgatctcgcactgagaaactgcctactgacctctgatctcacagttcgcattggtgactatggactggcacattccaattataaagaggattactatctcacccccgaacgtctgtggatccccctcagatgggccgctccagaactgttgggggagcttcatggaactttcatggtcgtcgaccagtcaagggagtcaaatatctggagcctcggagtgacgttgtgggaactgtttgaatttggagcccagccctatcgtcacctgtccgacgaggaagtgcttgcattcgtcgtgaggcagcagcacgtgaagctggcgcgacccagactcaaactgccttatgcagactactggtatgatatcctacagtcttgctggagaccgcccgctcagcggcccagtgctagtgacctccagctgcagctgacataccttctcagtgagcggcctccgcgcccccccccaccccccccaccccctagagatggcccttttccctggccgtggcccccggcgcattccgcaccccgacccggtactctgagcagtccgtttcctctcctggatggctttccaggcgcagatccagacgatgtactcacagttacagagtcctcccgtggtttgaaccttgaatgcctgtgggagaaagccaggcgaggtgctggaagggggggaggcgctcccgcttggcagcccgcgtctgccccccctgcaccacacgccaaccctagtaatccattctatgaggcgctttccacccctagtgtcctgcctgttatcagtgctcgaagccccagtgtgtcctctgaatactacattaggctagaggagcatggcagcccaccagagccacttttccctaacgactgggacccgttggaccctggagtccctgccccccaagctccacaggcaccgtccgaagtaccacagctcgtctctgaaacttgggcgtcacccctgtttccggcccccaggccattccccgctcaaagttctgcctccggttccttcctgctttccggatgggatccggagggacggggagcgggtgagaccctggctggagatcctgctgaagtattaggggagcggggcactgccccctgggtggaggaagaagaggaagaagaggaggggagcagccctggtgaggactcttcctccctgggtgggggtccaagccgacgggggcccctgccgtgccctctatgctctcgggagggggcatgtagctgcctgcctcttgaaagaggagacgccgtagctggttggggaggacacccggcgctcggctgccctcaccctcccgaagacgattcttctcttcgagctgagcgcggctctctggcggatctaccaatggctcctcctgccagcgctccccccgagtttctggatccgctgatgggggccgcggcgcctcagtaccccggcaggggccctcctccagcaccccccccccctcccccaccgccccgggcacccgctgatccagcggccagtccagaccctccatctgccgtcgcttcaccaggcagcgggctgagcagccccgggccaaaaccgggggattctggctatgagaccgagacccctttctcacccgagggcgcctttcctggcggaggcgctgcagaggaggagggagtaccccggccccgcgctccccctgagccacctgacccaggggccccccgccctcctcctgatcctggtcctctccctttacctggtcctagggagaaaccgacttttgtcgtgcaggtgtcaacagaacagctgctcatgtctctccgagaggatgtgacgaggaacctgcttggcgagaagggggccacagccagggagactggcccccggaaagccggccgcggcccgggcaacagagagaaagtcccaggtctgaacagagaccctacagttttgggtaacgggaagcaggcgcctagcttaagcctacccgtcaacggggtgaccgtccttgagaacggggaccagcgtgccccaggcatcgaggagaaagctgccgaaaacggcgctctgggttctccagaacgtgaggaaaaagtcttagagaacggcgagctgaccccaccccggagagaggagaaagcactggaaaatggcgaactccgatcaccggaagccggagagaaggtgttggtgaatggtgggctgacccctccaaagagtgaggataaggtgtctgagaatggtggcctgaggttcccccggaacaccgaacgcccacctgaaacaggcccatggagagcccctgggccctgggagaagacacctgagtcttggggccccgccccaacaattggagagccagcccccgagacttctctcgaaagagctccagctccatctgccgtggtatcctccaggaatggaggcgagaccgcacctggacctcttggtccagcccctaaaaatgggacactggaacccggcacagagcgtcgggccccagagacgggaggggcaccccgagcccccggtgcagggcgattggatctcgggtcagggggcagagcacccgttggcacaggaactgcccctggcggcggaccaggctctggtgtggatgcaaaggcgggctgggtcgacaatacgcggcctcaaccccctcctccgccactcccccctccccctgaggcacagcccagaaggctggaacctgccccaccccgggcacggcccgaggttgccccagagggagagccaggcgcacccgatagccgagccggtggagacactgccttatccggagatggggacccaccaaagccggagcggaaagggcccgagatgccaagactatttttagacctggggccacctcaagggaactccgagcagataaaagcccgcctctctaggctctcactggctctgccaccactaaccctcacaccgtttccaggcccgggtccacgaaggcctccttgggaaggcgccgacgccggggcagccggcggcgaggctggcggagccggcgctcctggccccgccgaggaagatggggaagacgaggatgaggacgaggaggaggatgaagaggcggctgcccctggagccgcagccggacctcggggtcccgggcgtgccagggcggcacctgttcccgttgtagtgtccagtgcagatgcagacgccgctcgccccttgaggggcctcctgaagtccccgaggggagcagacgagcccgaggatagcgagctggagcgcaagagaaaaatggtctcctttcatggcgatgttacagtatacctgttcgatcaagaaacccctactaatgaactgtcggtgcaggccccgcccgaaggagataccgacccctccacacctcccgctccaccaacgccaccacaccccgctacccccggggatggctttccatccaatgatagtgggttcggcggctccttcgagtgggccgaggattttcccctgctacccccccccggacccccactctgcttctcgagattttcagtgagcccggctctggaaacaccggggccgcctgcgcgggcccccgacgctagacccgccggcccagtggaaaattag

SEQ ID NO: 36422 - DNA, 4972 bp, Artificial Sequence
  derived and/or modified sequence
atgaggcaagtgctgtggttgtgtaatgtctgcgtaaccgcacgggaaacccgccaccacctccacctccctgccatcctcgacaagatgcctgcccccggcgccctcatcctccttgcggccgtctccgcctccggctgcctggcgtccccggcccaccccgatggattcgccctgggccgggctcctctggctcctccctacgctgtggtcctcatttcctgctccggcctgctggccttcatcttcctcctcctcacctgtctgtgctgcaaacggggcgatgtcggcttcaaggaatttgagaaccctgaaggggaggactgctccggggagtacactccccctgcggaggagacctcctcctcacagtcgctgcctgatgtctacattctcccgctggctgaggtctccctgccaatgcctgccccgcagccttcacactcagacatgaccacccccctgggccttagccggcagcacctgagctacctgcaggagattgggagtggctggtttgggaaggtgatcctgggagagattttctccgactacacccccgcccaggtggtggtgaaggagctccgagccagcgcggggcccctggagcaacgcaagttcatctcggaagcacagccgtacaggagcctgcagcaccccaatgtcctccagtgcctgggtctgtgcgtggagacgctgccgtttctgctgattatggagttctgtcaactgggggacctgaagcgttacctccgagcccagcggccccccgagggcctgtcccctgagctaccccctcgagacctgcggacgctgcagaggatgggcctggagatcgcccgcgggctggcgcacctgcattcccacaactacgtgcacagcgacctggccctgcgcaactgcctgctgacctctgacctgaccgtgcgcatcggagactacgggctggcccacagcaactacaaggaggactactacctgaccccagagcgcctgtggatcccactgcgctgggcggcgcccgagctcctcggggagctccacgggaccttcatggtggtggaccagagccgcgagagcaacatctggtccctgggggtgaccctgtgggagctgtttgagtttggggcccagccctaccgccacctgtcagacgaggaggtcctcgccttcgtggtccgccagcagcatgtgaagctggcccggccgaggctcaagctgccttacgcggactactggtatgacattcttcagtcctgctggcggccacctgcccagcgcccttcagcctctgatctccaattgcagctcacctacttgctctccgagcggcctccccggcccccaccgccgccacccccaccccgagacggtcccttcccctggccctggccccctgcacacagtgcgccccgcccggggaccctctcctcaccgttccccctactggatggcttccctggagccgaccccgacgatgtgctcacggtcaccgagagtagccgcggcctcaacctcgagtgcctgtgggagaaggcccggcgtggggccggccggggtgggggggcacctgcctggcagccggcgtcggcccccccggccccccacgccaacccctccaaccctttctacgaggcgctgtccacgcccagcgtgctgcctgtcatcagcgcccgcagcccctccgtgagcagcgagtactacatccgcttggaggagcacggctcccctcctgagcccctcttccccaacgactgggaccccctggacccaggagtgcccgcccctcaggccccccaggccccctccgaggtcccccagctggtgtccgagacctgggcctcccccctcttccctgcgccccggcccttcccagcccagtcctcagcgtcaggcagcttcctgctgagcggctgggaccccgagggccggggcgccggggagaccctggcgggagaccctgccgaggtcttgggggagcgggggaccgccccgtgggtggaagaagaagaggaggaggaggagggcagctccccaggggaagacagcagcagccttggaggtggcccaagccgccggggtcccctaccctgtcccctgtgcagccgcgagggggcctgctcctgcctgccactggagcggggggacgccgtagcaggctggggaggccaccctgctcttggctgcccccacccccccgaggacgactcctcgctgcgggcagagcggggctccctggccgacttgcccatggccccccccgcctcggccccccccgagtttctggaccccctcatgggggcggcggcgccccagtaccccgggcgggggccacctcccgctcccccccccccgccgccacctcctcgggcccccgcggacccggccgcgtcccccgaccccccttcggccgtggccagtcccggttcaggcctctcgtcgccgggccccaagccgggggacagcggctacgagaccgagacccctttttccccagagggagccttcccaggtgggggggcggccgaggaggaaggggtccctcggccgcgggctccccccgagccacccgacccaggagcgccccggccacctccagacccgggtccgctcccactcccggggccccgggagaagccgaccttcgtggttcaagtgagcacggaacagctgctgatgtccctgcgggaggatgtgacaaggaacctcctgggggagaagggggcgacagcccgggagacaggacccaggaaggcggggagaggccccgggaacagagagaaagtcccgggcctgaacagggacccgacagtcctgggcaacgggaaacaagccccaagcctgagcctcccagtgaacggggtgacagtgctggagaacggggaccagagagccccaggcatcgaggagaaggcggcggagaatggggccctggggtcccccgagagagaagagaaagtgctggagaatggggagctgacacccccaaggagggaggagaaagcgctggagaatggggagctgaggtccccagaggccggggagaaggtgctggtgaatgggggcctgacacccccaaagagcgaggacaaggtgtcagagaatgggggcctgagattccccaggaacacggagaggccaccagagactgggccttggagagccccagggccctgggagaagacgcccgagagttggggtccagcccccacgatcggggagccagccccagagacctctctggagagagcccctgcacccagcgcagtggtctcctcccggaacggcggggagacagcccctggcccccttggcccagcccccaagaacgggacgctggaacccgggaccgagaggagagcccccgagactgggggggcgccgagagccccaggggctgggaggctggacctcgggagtgggggccgagccccagtgggcacggggacggcccccggcggcggccccggaagcggcgtggacgcaaaggccggatgggtagacaacacgaggccgcagccaccgccgccaccgctgccaccgccaccggaggcacagccgaggaggctggagccagcgcccccgagagccaggccggaggtggcccccgagggagagcccggggccccagacagcagggccggcggagacacggcactcagcggagacggggacccccccaagcccgagaggaagggccccgagatgccacgactattcttggacttgggaccccctcaggggaacagcgagcagatcaaagccaggctctcccggctctcgctggcgctgccgccgctcacgctcacgccattcccggggccgggcccgcggcggcccccgtgggagggcgcggacgccggggcggctggcggggaggccggcggggcgggagcgccggggccggcggaggaggacggggaggacgaggacgaggacgaggaggaggacgaggaggcggcggcgccgggcgcggcggcggggccgcggggccccgggagggcgcgagcagccccggtgcccgtcgtggtgagcagcgccgacgcggacgcggcccgcccgctgcgggggctgctcaagtctccgcgcggggccgacgagccagaggacagcgagctggagaggaagcgcaagatggtctccttccacggggacgtgaccgtctacctcttcgaccaggagacgccaaccaacgagctgagcgtccaggccccccccgagggggacacggacccgtcaacgcctccagcgcccccgacacctccccaccccgccacccccggagatgggtttcccagcaacgacagcggctttggaggcagtttcgagtgggcggaggatttccccctcctcccccctccaggccccccgctgtgcttctcccgcttctccgtctcgcctgcgctggagaccccggggccacccgcccgggcccccgacgcccggcccgcaggccccgtggagaattgattccccgaagacccgaccccgctgcaccctcagaagaggggttgagaatggaatcctctgtggatgacggcgccactgccaccaccgcagacgccgcctctggggaggcccccgaggctgggccctccccctcccactcccctaccatgtgccaaacgggaggccccgggcccccgccccccagccccccagatggctcccctgacccccctgaccccctcggagccaaatgaggcaggaatccccccgcccctccatagagagccgcctttctcggaactgaactgaactcttttgggcctggagcccctcgacacagcggaggtccctcctcacccactcctggcccaagacaggggccgcaggcttcggggacccggaccccccatttcgcgtctcccctttccctccccagcccggcccctggaggggcctctggttcaaaccttcgcgtggcattttcacattatttaaaaaagacaaaaacaactttttggaggaa

SEQ ID NO: 36423 - DNA, 4470 bp, Artificial Sequence
  derived and/or modified sequence
atgaggcaggtgctgtggctgtgcaatgtgtgtgtgacagcccgggagaccaggcaccacctgcacctgcctgccatcctggacaagatgcctgcccctggggccctgatcctgctggccgctgtgtctgccagcggctgcctggccagccctgcccacccagatggctttgccctgggccgggcccccctggccccaccctatgctgtggtgctgatcagctgcagcggcctgctggccttcatcttcctgctgctgacctgcctgtgctgcaagagaggagatgtgggcttcaaggagtttgagaacccagaaggagaggactgcagcggggagtacaccccacctgctgaggagaccagcagcagccagagcctgcctgatgtgtacatcctgcccctggccgaggtgtccctgcccatgcctgccccccagcccagccacagcgacatgaccacccccctgggcctgagccggcagcacctgagctacctgcaggagatcggcagcggctggtttgggaaggtgatcctgggggagatcttcagtgactacaccccagcccaggtggtggtgaaggagctgcgggccagcgctggccccctggagcagaggaagttcatcagcgaggcccagccctaccgcagcctgcagcaccccaacgtgctgcagtgcctgggcctgtgtgtggagaccctgcccttcctgctgatcatggagttctgccagctgggggacctgaagcgctacctgcgggcccagaggcctcctgagggcctgagccctgagctgcccccccgggacctgcggaccctgcagaggatgggcctggagatcgcccggggcctggcccacctgcacagccacaactacgtgcacagcgacctggccctgaggaactgcctgctgaccagtgacctgactgtgagaattggagactatggcctggcccacagcaactacaaggaggactactacctgaccccagagcggctgtggatccccctgcgctgggccgcccctgagctgctgggggagctgcacggcaccttcatggtggtggaccagagccgggagagcaacatctggagcctgggcgtgaccctgtgggagctgtttgaatttggagcccagccctaccgccacctgagtgatgaggaggtgctggcctttgtggtgcggcagcagcacgtgaagctggcccggccccggctgaagctgccctatgctgactactggtatgacatcctgcagagctgctggaggcccccagcccagaggccttctgccagtgacctgcagctgcagctgacctacctgctgtctgagaggcctccccggcccccacctcctcctcctcctccaagagatggccccttcccctggccctggcccccagcccacagcgcccccaggcctggcaccctgagcagccccttccccctgctggatggcttccctggagctgaccctgatgatgtgctgactgtgacagagagcagccggggcctgaacctggagtgcctgtgggagaaggccaggagaggagctggccggggcggcggggccccagcctggcagcctgccagcgcccccccagccccccacgccaaccccagcaaccccttctatgaggccctgagcaccccatctgtgctgcccgtcatcagcgcccggagccccagcgtgtcctctgagtactacatccggctggaggagcacggcagccccccagagcccctcttccccaatgactgggaccccctggaccccggggtgcctgccccccaggccccccaggcccccagcgaggtgccccagctggtgtctgagacctgggccagccccctcttccctgccccccggcccttccctgcccagagcagcgccagcggcagcttcctgctgagcggctgggaccctgagggccgcggggccggggagaccctggccggggaccctgctgaggtgctgggggagcggggcacagccccctgggtggaggaggaggaggaggaggaggagggcagcagccctggagaggacagcagcagcctgggcggcggccccagccggcggggccccctgccctgccccctgtgcagccgggagggcgcctgcagctgcctgcccctggagagaggagatgctgtggccggctggggcggccacccagccctgggctgcccccaccccccagaagatgacagcagcctgcgggcagagcggggcagcctggccgacctgcccatggcccccccagccagcgcccctcctgagttcctggaccccctgatgggcgctgctgccccccagtacccaggccggggccccccaccagcccctcctcctcctcctcctccaccccgggccccagctgaccctgctgccagcccagaccccccatctgctgtggccagccctggcagcggcctgagcagccctggccccaagccaggggacagcggctatgaaacagagacccccttcagccctgagggcgccttccctgggggcggcgctgctgaggaggagggcgtgccccggccccgggcccctcctgagcccccagaccccggggccccccggcccccaccagaccccggccccctgcccctgcccggcccccgggagaagcccacctttgtggtgcaggtgtccacagagcagctgctgatgagcctgagagaagatgtgaccaggaacctgctgggggagaagggggccacagcccgggagaccggccccaggaaggccggccggggccctggcaaccgggagaaggtgcccggcctgaacagagaccccaccgtgctgggcaatggcaagcaggcccccagcctgagcctgcctgtgaatggagtgacagtgctggagaatggagaccagagggcccctggcatcgaggagaaggctgctgaaaatggagccctgggcagccctgagcgggaggagaaggtgctggagaatggagagctgaccccaccaagaagagaggagaaggccctggagaatggagagctgcggagccctgaggccggggagaaggtgctggtgaatggaggcctgaccccacccaagtctgaggacaaggtgtctgaaaatggaggcctgcgcttccccaggaacacagagaggcctcctgagaccggcccctggagggcccctggcccctgggagaagaccccagagagctggggccctgcccccaccatcggggagcccgcccctgagaccagcctggagcgggccccagcccccagcgctgtggtgagcagcagaaatggaggagaaacagcccctggccccctgggccctgcccccaagaatggcaccctggagcctggaacagaaagaagagcccctgagaccggcggggccccccgggcccctggagctggccgcctggacctgggcagcggcggccgggcccctgtgggcaccggcacagcccctgggggcggccctggcagcggcgtggatgccaaggccggctgggtggacaacacccggccccagcccccacctccacccctgcccccacctcctgaggcccagccccggcggctggagcccgccccaccccgggcccggcctgaggtggcccctgagggggagcccggggccccagacagccgggccggcggggacacagccctgtctggagatggagacccccccaagccagagaggaagggccctgagatgcccaggctcttcctggacctgggccccccccagggcaacagcgagcagatcaaggcccggctgagccggctgagcctggccctgccccccctgaccctgacccccttccctggccctggcccccggcggcccccctgggagggcgcagatgctggagctgctggaggagaggccggcggggccggggcccctggccctgcagaagaagatggagaagatgaagatgaagatgaggaggaggatgaggaggccgccgcccctggagctgctgctggcccccggggccctggccgggcccgggccgcccctgtgcctgtggtggtgagcagcgcagatgctgatgctgcccggcccctgcggggcctgctgaagagccccagaggagcagatgagccagaagattctgagctggagaggaagaggaagatggtgtccttccatggagatgtgacagtgtacctgtttgaccaggagacccccaccaatgagctgtctgtgcaggcccctcctgagggggacacagaccccagcaccccaccagccccacccaccccaccccacccagccaccccaggagatggcttccccagcaatgacagcggctttggaggcagctttgagtgggccgaggacttccccctgctgcccccacctggcccccccctgtgcttcagccgcttctctgtgtccccagccctggagaccccaggccccccagcccgggccccagatgcccggcctgctggccctgtggagaactag

SEQ ID NO: 36424 - DNA, 4470 bp, Artificial Sequence
  derived and/or modified sequence
atgcggcaggtgctgtggctgtgcaacgtgtgcgtgaccgcccgggaaacacgtcaccatctgcatctgccggcaattttggacaaaatgcccgcaccaggcgccctcatcctcctggccgccgtctccgcttccggatgtctcgcgagccccgctcaccccgacggattcgccctgggccgggctcccctggcacctccctacgcagtcgtgctcatctcatgtagcggattattggccttcatatttctgctcctcacatgtctgtgttgcaagaggggtgacgtgggatttaaggagtttgagaatccagaaggggaggactgttccggcgagtacacccctccggccgaggagacgagttcctcgcaatccctgcctgatgtttacatactacctctggcagaggtaagtctgccgatgcccgcaccccagccctctcactccgatatgaccacgccattaggcttgagtaggcaacacctctcttacctgcaagaaataggatccggttggttcggcaaggtgattttgggagagatcttcagtgattacaccccagcacaggtggtagttaaggaactgagggctagcgcagggcccctcgagcagcgaaaattcatcagtgaggcacagccatataggtccctgcagcacccaaatgtgctgcagtgtctaggcctgtgcgtggagactctgcctttccttctgattatggagttctgccagttgggggacctgaaacgctatttacgggcacagcgcccgccagagggactgtctccagaattgcccccaagggatctgcgaacactgcaacggatgggcctggaaattgcccggggacttgctcacctgcacagccacaattatgtacatagtgacttagccttgagaaactgcctgctcacaagtgacctgaccgtccggatcggagactacggcctggctcattcgaattataaagaggattactacttaacgcctgagagactgtggatcccattgcggtgggccgctcccgagctgttaggcgaattacacggtacatttatggtggtcgaccagtcaagagaatcaaatatttggtctttaggagttacactctgggagctcttcgagtttggtgctcagccctataggcaccttagcgacgaagaagtcctggcgttcgtggtccgccagcaacacgttaagttggcacgtccaaggctgaagctcccttacgccgattattggtacgatattctgcaatcttgctggaggccgcctgcccagaggccctctgcctctgatttacagttgcagctgacctatcttcttagtgagagacccccaaggccccccccgcccccacctcctcctcgcgacggcccatttccttggccgtggccccctgctcacagcgctccacgccccggtaccttaagttcgcctttcccgctgctggatggatttcccggtgcagaccctgatgacgttctgactgtgactgagtctagccgaggcctgaatctggaatgtctgtgggagaaggccagacgtggcgccggaagagggggaggggcccccgcttggcagcccgcttcagctcccccagccccacacgctaacccaagtaaccctttctatgaagcgctgagcaccccatctgtactgcccgttatctctgctaggtcaccgtccgtctctagcgaatattatatacggctggaagaacacggatcaccacctgagcctctctttccgaacgactgggaccctctggatcctggggtgcccgcaccacaggctcctcaggccccgtccgaagtgcctcagctcgtctccgagacttgggcctccccgttattcccagcaccccggcccttccctgctcagtcaagcgcatccggttccttcctgctgtctggatgggaccctgaaggaagaggcgcaggagagactctggcaggtgaccccgcggaagttttaggtgaaagaggcacagccccatgggttgaagaggaggaggaagaggaagaagggagctcccctggtgaggatagttcctctctcggagggggcccctcgcggaggggaccactgccgtgcccactatgttcacgggagggcgcctgttcttgtctccccctagaacgcggagatgctgtcgccggatggggcggtcatccagccctggggtgccctcacccgccagaagacgattcaagcttgcgcgccgaaagggggtcccttgcagacttaccaatggcacctcccgcaagcgccccaccagagtttttggacccgctgatgggggcagcagcgccccagtaccccggcagagggccaccccctgcgccaccaccacctcctccgccaccacgggctcccgcagatcccgccgcctctcccgacccaccaagtgccgtggcctctccaggcagcggactctccagccccgggcctaaacccggggactcagggtacgaaacagaaactcctttctctcctgaaggtgcatttcctggtggcggcgctgctgaagaggaaggagtgccccggcccagggccccgccagagccccctgatccaggagcaccacgaccacccccggacccgggtcccctgcctctgcctggtcccagagagaagccaaccttcgtggtgcaagtttctaccgaacaactactcatgtccttgcgcgaggacgtgacccggaaccttctgggagaaaagggggccacagcccgcgagaccgggccacggaaagctggcagggggcccggcaatagagaaaaggtgcccgggttgaacagggaccccacagtcctgggcaacggtaagcaagccccttcgctgtccctgccagtgaacggggttaccgtcttggagaatggagaccaacgggctcccggtatcgaggaaaaggccgctgagaatggcgcgctcggctcgccagagcgggaagagaaagtgctggaaaatggggagctaacaccaccccgtcgggaagagaaggccttagagaatggcgaattgaggtcgcctgaagccggcgaaaaggtgcttgtcaacggcggtctgacccctccaaagagcgaagacaaggtgtccgaaaatggcgggcttcgttttccccgcaatactgaacgacctcctgaaacggggccttggagagcgcctggaccttgggaaaaaactcccgagtcatggggacctgcccccacaattggagagcccgccccagaaactagcctggaacgcgcccctgcaccttccgccgtggtctccagccggaatggaggcgaaacagcccccggacctctgggacccgcacccaaaaatggaacattggagccgggcacagagcgacgcgcccctgaaactggtggggcaccaagagcacctggtgcaggccggttagatctaggcagcggagggagggcgccagtgggcaccggtacggcacccggcgggggccccggttctggagttgatgcaaaggccggctgggttgataatacacggccacagccaccgccaccgccgctgcccccccctcccgaggcccagccccggaggcttgaacctgctcctccccgagcaaggcccgaagttgccccggagggggagcccggggctccggacagcagagccggcggggataccgccttgtccggcgatggcgatcctccaaagcctgagcgaaaggggcccgagatgccaaggctgttcctggatctcggccccccccagggaaattccgagcaaatcaaagcaaggctctctcggctctccctggccctgccgcctctgaccctgacaccctttcctgggcccggcccacggcgaccaccctgggaaggcgccgacgctggggctgcagggggagaagctgggggggccggcgctcctggcccggctgaagaagatggtgaagacgaggatgaagacgaggaagaggacgaagaggccgcagcccccggggctgccgcaggaccccgcgggccaggccgcgcccgtgccgctccggtacccgtggtggtctcctccgctgatgccgacgctgcacggccgctccgaggcctattaaagagtccccgcggagctgacgagccggaggattccgaactggagagaaagcgaaaaatggtgagttttcacggagatgtgaccgtgtacctttttgaccaggagaccccaaccaacgagctaagtgtgcaggccccacccgaaggcgatacagacccttccacgccaccagcccccccgaccccgccccatccggccactccaggggacggattcccatccaatgactctggtttcggcggctccttcgagtgggcggaggatttccctctgttgccgccccccggcccccccctctgtttctcacggttttctgtgagtcctgcactcgagactcccggcccccccgctagggcaccggatgctaggccagctgggccagtggaaaactag

SEQ ID NO: 36425 - DNA, 4470 bp, Artificial Sequence
  derived and/or modified sequence
atgcggcaggtgctgtggttgtgcaatgtgtgtgtcactgcacgcgagactaggcaccatctgcaccttcccgcaatcctcgacaagatgcccgcacctggagcactgatcttactggccgcagtgtccgcttctggctgcctggcctctcccgcacacccagacggattcgctttaggccgtgctccgttggcgccaccatacgcagtagtgttgatcagctgcagcggcctactggcctttatcttcctgctactgacctgcctgtgttgcaaacgaggggacgtgggatttaaagaatttgagaacccagagggcgaagattgttctggagagtatactccaccagctgaagaaacatcttcaagtcagtcactgcctgacgtgtatatcctacccctggcagaggtttctctgccaatgcccgctccgcagccctctcattctgatatgactacccccctggggttgagcaggcaacacctctcatatcttcaggagataggttccggatggtttgggaaggtcattctgggcgagatctttagcgactacacacccgctcaggtcgtggttaaggaactgcgcgcttccgccggacccttggaacagcgtaagttcatctcggaggcacaaccctaccgatccctgcagcacccaaatgttcttcagtgcctagggttgtgcgttgaaacgcttccatttctccttatcatggaattttgtcagctgggggatctgaagaggtatttgagggcccagagacctcccgagggcctgtcgcctgagttacctcctcgagacttaagaaccctccagaggatgggcctagagattgcgcgaggcctggcccatctccactcgcacaattatgttcatagcgatttagcactcaggaattgccttctgacttcagacctgactgtgagaatcggcgattatgggttggcccactccaactacaaggaggactattatctcaccccagaacggttgtggatccctctccgatgggcagcgccagagctcctcggcgaattacatggaacttttatggtcgtggatcagtcacgagagtcgaatatctggtcattaggcgtgaccctatgggagctgttcgaattcggggctcagccttacagacacctgtctgacgaagaggtgctcgccttcgttgtgagacaacaacacgttaaactcgcccgacctagactgaaactgccatatgccgattattggtatgacattctgcaatcctgctggcgccctccagctcagaggccctccgcgtccgatttgcaactgcagctgacttacctcctctcagagcgccctccaagacctcctccgcctccccctcccccaagagacggacctttcccttggccctggcctcctgcacacagtgccccacgccctggcaccctgtccagcccatttcccctcctggatggttttcccggtgcagatcccgacgacgttttaactgtaactgagagcagcagaggcttaaatttagagtgtctctgggagaaggctaggagaggggctgggaggggtggtggcgcaccagcttggcagcctgcttccgcacctccggcacctcacgcaaacccttctaatccattttatgaagcactcagcacgcctagcgtcttgcccgtgatcagcgctaggtccccgtctgtttcgtccgagtattacatcagattggaggaacacggaagccctccagaacctcttttccccaatgattgggaccctttggacccaggggtgcccgctccgcaggcccctcaggctcccagcgaagtgccacagctcgttagcgaaacgtgggcatcacctctctttccagctcctcggccttttcctgcccaatcctccgccagcgggtctttcctgctgtctggatgggatccagagggacgcggagccggtgagacccttgctggggatcccgctgaagtgctgggcgaacgcggaactgccccatgggttgaggaggaggaagaggaggaggaaggcagcagccccggagaggattcctcttccctaggcggtggtccaagtcgcaggggacccctcccatgcccactgtgcagccgggagggagcttgtagttgcctgcccctcgaaagaggcgacgccgtagccggatggggcggacatcccgcactaggctgcccccaccctccagaggacgactcgtccctccgggctgaacgcggttccctggccgacctccctatggcgccaccagcttcggccccacccgagtttttggacccactcatgggagccgcagctccacagtaccctgggaggggcccacctcctgccccacctccccctcctccccctcccagggctccagcagacccagctgcatctcccgatccgccatccgccgtggcctcaccgggatctggtttgagttccccaggaccaaagccgggagactctggctatgaaactgaaactccattctcacctgagggggcattccccggtggaggcgctgcggaggaggaaggagtgcctcggccacgcgcacctcccgagccgccagacccgggagcacccagaccaccccctgaccccggtccgctgccattgcccggtcccagagagaaaccaacctttgtcgtgcaggttagtacagagcaactcctgatgtcgctgcgagaggatgttacacgtaacctcctcggagaaaagggcgctacggccagggaaacgggacccagaaaggccggtcggggtccaggcaatcgagaaaaggttcccggtcttaatcgtgatcccactgtgctggggaatggtaaacaggctccaagtctatcactccctgtgaatggcgttactgtacttgagaatggcgatcagagagcaccaggcatcgaggagaaggccgcagagaatggcgctctgggcagccccgaacgagaggagaaggttctcgagaatggggaactcacgccaccgagacgcgaggagaaagctctggagaacggtgaactgcgatcccctgaggctggagaaaaagtgctcgtcaatggcggactgacacccccaaaaagcgaggacaaagttagcgagaacgggggtcttcgtttccctagaaacactgaacggcctccggagaccgggccttggcgagctccgggaccctgggaaaaaacacccgagagttggggccctgcccctactatcggtgagcccgctccagagacgtcgctcgagagggcccctgcgccttctgcggtagtgagctctagaaacggcggtgagactgcgcctggtccattggggccagctcccaagaacggcacactggagcctggtactgagcggagggctcccgaaacaggaggagctccacgggctcctggagcaggtcggttggaccttggtagcggcggacgcgctcccgttggcaccggcaccgcacctggcggagggccagggtccggtgtagatgccaaagctggatgggtcgataatactagaccgcagccaccacctccgccacttccccctccccctgaagcccaaccaaggcgtcttgaaccggctccacccagagccaggcccgaagtcgccccagagggcgaaccaggagcgcctgatagtcgggcaggtggagacactgctctctcaggcgacggcgatccaccaaagccggagcgcaagggtccagagatgcctcgactgtttctcgacctgggacccccacagggcaacagcgaacagatcaaagcgaggctgtctaggctcagcctggcgttgcctccgttgacactgacgcctttccccggaccaggccctcgcaggccaccctgggaaggggcagatgcaggagccgctggaggagaggccggaggcgcaggagctccaggcccagcggaagaggacggcgaagacgaagacgaggatgaagaagaggacgaagaggccgctgcgccaggagctgctgcgggtccaaggggaccgggaagagcgcgagcggcacctgtccctgttgtggtgagcagcgctgacgcagacgccgcacggccactgagaggtttgttgaaatcccctcgcggagctgacgagcccgaggatagcgagctcgagcggaagcgaaaaatggtttcttttcacggtgacgttaccgtgtatctgtttgatcaggaaacaccaacaaatgagcttagtgtccaggcacctcctgagggcgacaccgaccctagcacaccacctgccccaccaacgcctccacaccctgcaacacctggagacggctttcccagcaacgattccgggtttggtggctctttcgagtgggcagaggactttccactgctcccccctccagggcctcctctctgtttttccagattttccgtatccccagctctggaaacccctggacccccagcgcgagcccctgacgctaggcccgcaggacctgtggaaaattag

SEQ ID NO: 36426 - protein, 654 aa, Artificial Sequence
  derived and/or modified sequence
MAPLVPGPPLEASPTTLDAAVRWGLQRPVRGHMAPGQAGGRGDASALGAQYSWARDGRSAVGSKLSWVGPAAPESKAAQGREMGRDVGKAVDCLDLSGPDGASCLQLSLRKSELFPAARRPGRPADPGLSPRCLRRPPLRPGPASTPLRGPGAARPPPLPPHSRGRSAVSFLAFLPPQRSPSAPREAAGSRGGLRASGGRCGGPAGAAAGSGGGGDAPGPAGRAMQRSRAGADEAALLLAGLALRELEPGCGSPGRGRRGPRPGPGDEAAPALGRRGKGSGGPEAGADGLSRGERGPRRAAVPELSAQPAGSPRASLAGSDGGGGGGSARSSGISLGYDQRHGSPRSGRSDPRPGPGPPSVGSARSSVSSLGSRGSAGAYADFLPPGACPAPARSPEPAGPAPFPLPALPLPPGREGGPSAAERRLEALTRELERALEARTARDYFGICIKCGLGIYGAQQACQAMGSLYHTDCFTCDSCGRRLRGKAFYNVGEKVYCQEDFLYSGFQQTADKCSVCGHLIMEMILQALGKSYHPGCFRCSVCNECLDGVPFTVDVENNIYCVRDYHTVFAPKCASCARPILPAQGCETTIRVVSMDRDYHVACYHCEDCGLQLSGEEGRRCYPLAGHLLCRRCHLRRLQPGPLPSPTVHVTEL

SEQ ID NO: 36427 - DNA, 1965 bp, Artificial Sequence
  derived and/or modified sequence
atggcccccctggtgcccggcccccccctggaggccagccccaccaccctggacgccgccgtgagatggggcctgcagagacccgtgagaggccacatggcccccggccaggccggcggcagaggcgacgccagcgccctgggcgcccagtacagctgggccagagacggcagaagcgccgtgggcagcaagctgagctgggtgggccccgccgcccccgagagcaaggccgcccagggcagagagatgggcagagacgtgggcaaggccgtggactgcctggacctgagcggccccgacggcgccagctgcctgcagctgagcctgagaaagagcgagctgttccccgccgccagaagacccggcagacccgccgaccccggcctgagccccagatgcctgagaagaccccccctgagacccggccccgccagcacccccctgagaggccccggcgccgccagacccccccccctgcccccccacagcagaggcagaagcgccgtgagcttcctggccttcctgcccccccagagaagccccagcgcccccagagaggccgccggcagcagaggcggcctgagagccagcggcggcagatgcggcggccccgccggcgccgccgccggcagcggcggcggcggcgacgcccccggccccgccggcagagccatgcagagaagcagagccggcgccgacgaggccgccctgctgctggccggcctggccctgagagagctggagcccggctgcggcagccccggcagaggcagaagaggccccagacccggccccggcgacgaggccgcccccgccctgggcagaagaggcaagggcagcggcggccccgaggccggcgccgacggcctgagcagaggcgagagaggccccagaagagccgccgtgcccgagctgagcgcccagcccgccggcagccccagagccagcctggccggcagcgacggcggcggcggcggcggcagcgccagaagcagcggcatcagcctgggctacgaccagagacacggcagccccagaagcggcagaagcgaccccagacccggccccggcccccccagcgtgggcagcgccagaagcagcgtgagcagcctgggcagcagaggcagcgccggcgcctacgccgacttcctgccccccggcgcctgccccgcccccgccagaagccccgagcccgccggccccgcccccttccccctgcccgccctgcccctgccccccggcagagagggcggccccagcgccgccgagagaagactggaggccctgaccagagagctggagagagccctggaggccagaaccgccagagactacttcggcatctgcatcaagtgcggcctgggcatctacggcgcccagcaggcctgccaggccatgggcagcctgtaccacaccgactgcttcacctgcgacagctgcggcagaagactgagaggcaaggccttctacaacgtgggcgagaaggtgtactgccaggaggacttcctgtacagcggcttccagcagaccgccgacaagtgcagcgtgtgcggccacctgatcatggagatgatcctgcaggccctgggcaagagctaccaccccggctgcttcagatgcagcgtgtgcaacgagtgcctggacggcgtgcccttcaccgtggacgtggagaacaacatctactgcgtgagagactaccacaccgtgttcgcccccaagtgcgccagctgcgccagacccatcctgcccgcccagggctgcgagaccaccatcagagtggtgagcatggacagagactaccacgtggcctgctaccactgcgaggactgcggcctgcagctgagcggcgaggagggcagaagatgctaccccctggccggccacctgctgtgcagaagatgccacctgagaagactgcagcccggccccctgcccagccccaccgtgcacgtgaccgagctgtag

SEQ ID NO: 36428 - DNA, 1965 bp, Artificial Sequence
  derived and/or modified sequence
atggccccactcgtgccagggccgcccctagaggcctctcctaccactctggacgctgcagtgcggtggggactccagcggccggttcgtgggcatatggcgccaggacaggccggaggtcggggggacgccagtgccttgggtgcccagtatagttgggcccgggacggacggagtgccgtcggatctaaactaagttgggtgggtcccgctgctcccgagtccaaagctgcacaggggagggagatgggccgggatgtgggaaaggccgtggattgtctagacctgtccggccctgatggcgctagttgcctgcagctcagtctgcggaaatccgaattattcccggccgcacgccggccggggaggcctgcggaccccggattatcacccaggtgtttgcggcgcccaccccttaggccgggtccggcctcaacaccactgcgaggcccaggcgccgcccgaccaccccctctgcccccgcattccagaggcagaagcgccgtgtccttcctcgcgttcctacccccacagaggtccccatctgctcctcgcgaagccgcagggtctcgggggggactgcgggctagcggtggtcgatgcggaggccctgctggagccgccgccgggtccggcggcggcggagacgcacccggcccggccggccgggcaatgcagcgttcccgggctggggcggacgaagctgcactcctcctcgccggattggccctgcgcgagctcgaacctggatgcggatccccgggcaggggacggcgagggccacgtccaggtccgggcgacgaggcagcccctgccctagggcgtaggggcaaaggctcaggcgggcccgaggctggggcggacggtctctcccgcggagagagggggccacggagggctgcggtccccgagctgagtgcccagcccgctggaagcccccgagcttccctggctgggagcgacggcggcggcgggggaggttcggccagatcgtctgggatcagtctgggatacgaccaaagacatggttcaccaaggagcgggaggtctgatcccaggcctggccctggcccgccatccgtcggctccgcgcgaagctcagtaagctcactgggctcccggggctcagctggggcttatgcagattttctaccaccgggcgcttgtccagctccagcccgaagcccagaaccggcaggtcctgcaccattccctcttcccgctctgccactgccaccaggcagggagggagggccctcagccgccgaacgccgcctcgaggcattaacccgcgagttggagcgggcactggaggctaggaccgcccgggattatttcggcatatgcataaagtgcggattgggtatctatggtgctcaacaggcttgccaggcaatgggatcactgtatcataccgactgcttcacgtgcgattcctgtggacggaggctacgcgggaaagccttctacaacgtgggcgagaaggtttattgccaggaagatttcctctatagcggctttcaacagactgctgataagtgtagcgtgtgtggacatctcataatggaaatgattctgcaggcactcggaaagagctatcaccccggctgcttcagatgtagtgtttgcaacgaatgcctcgatggtgtgccctttaccgtggatgtggaaaataatatatattgtgtacgcgactatcataccgtgttcgcaccaaagtgcgcaagctgtgcaagaccgatcctcccagcccagggctgcgagaccactatacgggttgtttccatggaccgtgattaccatgtggcatgctaccactgcgaggactgcggtctgcagctttcaggagaggagggacggcggtgctacccactggccgggcatttgctctgtcgtcgctgccacttgcgacgtctgcagcccggccccctgcccagccccaccgtgcacgtgacagagctgtag

SEQ ID NO: 36429 - DNA, 1965 bp, Artificial Sequence
  derived and/or modified sequence
atggcccccctggtgcccggcccccccctggaggccagccccaccaccctggatgctgctgtgcgctggggcctgcagaggcctgtgcggggccacatggcccctggccaggccggcggcagaggagatgccagcgccctgggcgcccagtacagctgggccagagatggccgctctgctgtgggcagcaagctgtcctgggtgggccctgctgcccctgagagcaaggccgcccagggccgggagatgggcagagatgtgggcaaggctgtggactgcctggacctgagcggcccagatggagccagctgcctgcagctgagcctgaggaagtctgagctgtttcctgctgcccggcggcccggccggcctgctgaccccggcctgagcccccgctgcctgcggcggccccccctgcggcccggccctgccagcacccccctgcggggccctggagctgcccggcccccacccctgcccccccacagccggggccgctctgctgtgtccttcctggccttcctgcccccccagaggagccccagcgccccccgggaggccgccggcagccggggcggcctgcgggccagcggcggccgctgtggcggccctgctggagctgctgctggcagcggcggcggcggagatgcccctggccctgctggccgggccatgcagaggagccgggccggggctgatgaagctgccctgctgctggccggcctggccctgcgggagctggagcccggctgcggcagccctggccggggccggcggggccccaggcctggccctggagatgaagctgccccagccctgggcagaagaggcaagggcagcggcggccctgaggccggggctgatggcctgagcagaggagagcggggcccccggcgggctgctgtgcctgagctgagcgcccagcctgctggcagcccccgggccagcctggccggcagtgatggcggcggcggcggcggcagcgcccggagcagcggcatcagcctgggctatgaccagagacatggcagccccaggagcggccgcagtgacccccggcccggccctggcccccccagcgtgggcagcgcccggagctctgtgagcagcctgggcagccggggcagcgctggggcctatgctgacttcctgcccccaggggcctgcccagccccagcccggagccctgagcctgctggccctgcccccttccccctgcctgccctgcccctgcccccaggccgggagggcggccccagcgctgctgagcggcggctggaggccctgacccgggagctggagcgggccctggaggccaggacagcccgggactacttcggcatctgcatcaagtgtggcctgggcatctatggagcccagcaggcctgccaggccatgggcagcctgtaccacacagactgcttcacctgtgacagctgtggccggcggctgcggggcaaggccttctacaacgtgggggagaaggtgtactgccaggaggacttcctgtacagcggcttccagcagacagctgacaagtgcagcgtgtgtggccacctgatcatggagatgatcctgcaggccctgggcaagagctaccaccctggctgcttccgctgcagcgtgtgcaatgaatgtctggatggagtgcccttcaccgtggatgtggagaacaacatctactgtgtgcgggactaccacacagtgtttgcccccaagtgtgccagctgtgcccggcccatcctgcctgcccagggctgtgagaccaccatccgggtggtgtccatggaccgggactaccacgtggcctgctaccactgtgaggactgtggcctgcagctgtctggagaggagggccgccgctgctaccccctggccggccacctgctgtgccgccgctgccacctgcggcggctgcagcccggccccctgcccagccccaccgtgcacgtgacagagctgtag

SEQ ID NO: 36430 - DNA, 1965 bp, Artificial Sequence
  derived and/or modified sequence
atggcccccctggtgcccggcccccccctggaggccagccccaccacccttgacgctgccgtgagatggggactacagcgccctgtgcgcgggcacatggccccgggccaagctggaggacgcggggacgcttctgccttaggagcccagtactcatgggcaagagacggacgctccgcggtgggatccaagctgtcttgggtggggcctgcggccccggagagtaaagcagctcaaggcagggaaatggggcgcgacgtagggaaggccgtggattgcctcgatctctccggccctgatggggctagttgtctgcagttaagcctgcggaaaagcgagctgtttcccgctgcccgccggcctggaagacctgccgaccctggcttatctccccgctgtctgcgacgcccccctctccgccccggaccggcatccactccattacggggccctggcgctgcaagaccaccaccactacccccccactctcgcggccgaagcgcagttagttttctggcttttttgccaccccagcgttccccctccgcaccaagggaagccgcaggttcccgggggggccttcgagccagcggtggcagatgtggtggcccagccggagcggccgctgggagcggaggagggggagatgccccaggtcctgctggcagagcaatgcagaggtcccgcgcaggggctgatgaagccgcccttctgctcgccgggctagccctaagggagctggaacccggttgcggatcgccaggcaggggacgcaggggccccaggccaggcccaggagacgaagccgcaccggcactggggcgaaggggtaaggggagcggcggccctgaggccggcgcggacggcctgagtcggggtgagcgcggaccaagacgggcggctgtcccagagctgtctgcccagcctgcgggaagcccccgcgctagcctggcgggatcagacggcgggggaggaggaggaagcgcccggagttcaggtatatccctgggatacgatcaacgacatggctccccaaggtcgggacgcagcgatccccggccagggccgggccctccaagcgtaggtagcgctcgttcctccgtctctagtttaggctcacgcggaagcgccggggcctatgctgacttcttgcctcctggggcctgcccagctccagcccgctcccctgagcctgctggacctgcacccttcccactccctgcacttccgctgcccccaggacgtgagggcggacctagtgccgctgaaaggagactcgaagctctcacgagggagctggagcgggcccttgaggcacggacagcccgggattattttggaatttgtatcaagtgtgggctgggcatctatggagcccagcaagcttgccaggccatggggagtttgtatcacaccgattgctttacctgtgattcctgcgggcggagattgcggggaaaggccttctacaatgttggtgagaaagtttattgccaggaggatttcttgtattctggattccagcaaaccgctgataaatgttccgtgtgcggccatctcatcatggagatgattctccaagccttgggtaagagctaccatccaggttgtttccgttgcagcgtttgcaatgagtgtctggatggcgtccctttcaccgtggacgtggagaacaacatctattgcgtacgagactatcacactgtgtttgcccccaaatgcgccagctgtgctcgtcctattctgcctgctcaggggtgtgagaccaccattagggttgtgagcatggaccgagattatcatgttgcctgctatcactgtgaggactgtggcctgcaattgagcggcgaggagggcagaagatgttacccgttggctggacacctcctgtgccggcgctgccacctcagacgcctacaacctggccctttaccttctcccacagttcacgtgactgaattatag

SEQ ID NO: 36431 - DNA, 1965 bp, Artificial Sequence
  derived and/or modified sequence
atggcgccactcgtacctgggccaccgctcgaagcttctcctactaccttggacgcggctgtgcggtggggtttgcagcgcccagtccggggacacatggcccctggtcaggcaggcggaagaggcgatgcatctgctctgggggctcagtactcatgggccagagacggcagatccgccgtaggtagcaaattgtcatgggtgggtccagctgcacccgagtctaaggccgctcagggcagagagatggggagagatgtaggcaaggcagtggactgcctagatctaagcgggccagatggggcaagctgtctccagctgagcctgagaaaatccgaattatttcccgcagctagacgccctggcagacctgccgatcccggtcttagtccccgatgtttgcgacggccacctctgagacctggacccgcaagcacccctctcaggggtcccggagctgcacggccaccaccgcttcctccgcattctcgcggacggtctgctgtgagtttcctggcatttctgccgcctcagcgctcaccctcagctcctagagaagctgccggttctagagggggtcttcgcgcatctgggggaagatgcggcggacctgccggagctgctgccggatctggaggcggtggcgatgcgccaggtcccgctggtcgcgctatgcagaggtcacgtgccggagctgacgaggccgctctgctgttggccggattggcattgcgggaactcgagccgggatgtggttcgcccggtcgcggtcggcgaggcccacgacctgggcctggagatgaggccgcaccagcgcttgggcgaaggggcaaaggaagtggcggtcccgaggcgggagcagacggcctgtcacgcggtgagcgcggacccagaagagccgcagtacctgaattaagtgcacaaccagcgggatctcctagagccagtttggcagggagcgatggcggaggcggtggagggtctgcccgatctagtgggattagcctgggctacgaccagcgacacgggagccctagaagtgggaggagcgatcccaggcctgggccagggcctccctccgtcggttcggcacgctctagtgtctcatctttggggtcaagaggcagtgctggtgcgtacgccgactttcttccccctggagcctgcccagctccagctcgttcaccagagcctgctggaccggcaccgttcccactgccagcactgcccctccctcccggtcgtgagggaggaccaagcgcggcagagagacgcctggaggcccttaccagagagctggaacgtgcgctggaggcgaggacggcccgtgattattttggcatctgcatcaaatgcggcttggggatttatggagcccagcaggcctgccaggctatgggcagtctgtatcacaccgactgtttcacctgcgacagctgtggacgcaggctgcgcggaaaagccttctataacgtaggagaaaaagtgtactgtcaggaagactttctttattccgggttccagcagaccgctgataaatgctccgtctgcggtcatctcatcatggaaatgatcctccaggcattgggcaagagctaccatcctggctgcttcagatgctcagtgtgcaacgaatgcctggacggcgtaccattcaccgtggacgttgaaaataatatttactgtgtgcgtgattatcatacagtgtttgcacctaagtgcgcctcctgtgctcgaccaattcttccagcacagggctgcgaaaccaccatccgtgtggtttccatggacagggactaccacgtagcctgctaccactgtgaagactgtggtctccagttaagtggagaggaaggcaggcgctgctaccccctcgcagggcatcttctgtgtcgcagatgtcatctacgcaggctgcagcctggtcctctcccatctcccaccgtgcacgtgacagagctgtag

SEQ ID NO: 36432 - DNA, 2876 bp, Artificial Sequence
  derived and/or modified sequence
atggccccgctggttccaggacctcccctcgaagcctcacccaccaccctggatgcagcagtcagatgggggcttcagaggccggtgcgcggccacatggccccgggccaggcagggggtcgtggggacgcatctgcgctaggcgcacagtattcctgggcgcgggacgggcgaagcgccgtgggttccaagctgagctgggtcggccctgcagcgccggagagcaaggcggcgcagggaagggagatggggcgggatgtggggaaagctgtcgactgcttggatctctccggcccggatggcgccagctgcctccagctcagcctgcggaaatccgagctcttcccagcggcccgacggcccgggcgccccgcagaccctgggctctccccgcggtgcctccgccgcccgcccctgcgtcctggcccggcctccacgcccctccgaggtcccggcgcagcgcggccgccgccactccccccacattccagaggccgcagcgccgtctccttcctcgcattcctgcccccgcaaaggagtccctccgccccgcgcgaggccgcggggtcccggggcgggctccgggcttcgggcggacgatgcggcggcccggccggagcggcggcgggaagcggaggcggaggtgacgcgccagggccggcgggccgggccatgcagcgctccagggcgggcgcggacgaggcggccctactcctggccgggctggccctgcgggagctggagcccgggtgcggctctcccggtcgggggcggcgggggccgcggcctgggcctggagacgaggcggcgcccgcgctgggccgcagagggaagggcagcggcggccccgaggccggggcggacggactgagccgcggggagcggggtccccggcgcgcggcggttccggagctcagcgcgcagcctgcgggcagcccacgggccagcctggcggggtccgacggcggcggcggtggcggcagcgcccgatccagcggcatcagcctgggctacgaccagcgccacggcagcccgcgctccggtcgctcggacccgcgtcccggtcccgggccgccttcggtgggcagcgcccgctccagcgtttccagcctcggctcccggggctcggccggcgcctacgctgacttcctcccgcccggcgcctgccccgcgcccgctcgctccccggagcctgcggggccggctcccttcccgctgcctgcactcccgctgccccctggccgggagggcggcccaagcgcggccgagcggcggctggaggcgctcacccgggagctggagcgggcgctcgaggcgcgcacggcgcgggactacttcggcatttgcatcaagtgtgggcttggcatctacggagcccagcaggcgtgccaggcaatggggagtctttatcacactgactgcttcacctgcgactcgtgtgggagacgactccgtgggaaggcgttctacaacgtgggtgagaaagtgtactgccaggaggacttcctgtactccgggttccagcagacggccgacaaatgcagcgtgtgtggacatctcatcatggaaatgatcctgcaggccctgggcaagtcctaccacccaggctgcttccggtgctccgtgtgcaatgagtgcctggacggggttcccttcaccgtggacgtggagaacaacatctactgcgtgcgagactatcacacggtttttgcaccaaaatgcgcctcctgtgcccgtcctatcctccctgcacagggctgcgagacaaccatccgtgtggtgtccatggacagagactaccacgtggcatgttaccactgtgaggactgcgggctgcagctgagcggggaggagggacgccgttgctatcccctggcgggccacctactgtgtcgtcgttgccacctgcggcgcctccaacctgggcctcttccctcacccactgtgcacgtcactgagctctgagcaggggaaaacccgtccctgggccggggtgggtgtgggtgtggagggagggcccgcgtgggtggccctggtcagcgtcaggggagctccctccaatcagtttcccaccgagctgctgtctgcaggggccggacccccgcgtggaagcttctatttattcaccgtctgtgcctgctcaagtcacttccctgcgggccctgcctcccacccaccccatcaccagctttccacttggaggccccctgtgccctgcagcctcagggtaggccgtgggtcaccaggctggagagggcccctgccttggccaggggtgcgaggtgacccggctgcattgctgggtgggagctgctgtctgttgttcaggggcctggcccccgccctcccccccgaccccgacctcgcaaagcgcactcccgggcagggtgtggtctggaaggcggggctggcggggacatgggtgttcctgcatctcctagcgcagttcctgctggtgggtggaagggtgcctggtttaggcggggtcccaggagggggtgaggggtgacacccttggggagggggcctgcaaagggcactgcctgtggccacgtggtgtctgtgggaattggtcctggggactttgatgggtgtttgcggccccagttgccgccctgctccctcttccagggctcctggcttgggccccccgacccccctgctcagctcgggaaaatccccgtgcggctccagccccgggtcacgctcaggagcgatgagaggggcgccctggccacgcttcaggaaagcctgtgtctgcgcgcggggcaaggggctccacgacaaaaggacaagatttgacttaaattaagtttttcccttgaggatattttcattttctttaaaagaatataattttcttctaagatcttgga

SEQ ID NO: 36433 - protein, 1413 aa, Artificial Sequence
  derived and/or modified sequence
MRHGVAWALLVAAALGLGARGVRGAVALADFYPFGAERGDAVTPKQDDGGSGLRPLSVPFPFFGAEHSGLYVNNNGIISFLKEVSQFTPVAFPIAKDRCVVAAFWADVDNRRAGDVYYREATDPAMLRRATEDVRHYFPELLDFNATWVFVATWYRVTFFGGSSSSPVNTFQTVLITDGKLSFTIFNYESIVWTTGTHASSGGNATGLGGIAAQAGFNAGDGQRYFSIPGSRTADMAEVETTTNVGVPGRWAFRIDDAQVRVGGCGHTTSVCLALRPCLNGGKCIDDCVTGNPSYTCSCLSGFTGRRCHLDVNECASQPCQNGGTCTHGINSFRCQCPAGFGGPTCETAQSPCDTKECQHGGQCQVENGSAVCVCQAGYTGAACEMDVDDCSPDPCLNGGSCVDLVGNYTCLCAEPFKGLRCETGDHPVPDACLSAPCHNGGTCVDADQGYVCECPEGFMGLDCRERVPDDCECRNGGRCLGANTTLCQCPLGFFGLLCEFEITAMPCNMNTQCPDGGYCMEHGGSYLCVCHTDHNASHSLPSPCDSDPCFNGGSCDAHDDSYTCECPRGFHGKHCEKARPHLCSSGPCRNGGTCKEAGGEYHCSCPYRFTGRHCEIGKPDSCASGPCHNGGTCFHYIGKYKCDCPPGFSGRHCEIAPSPCFRSPCVNGGTCEDRDTDFFCHCQAGYMGRRCQAEVDCGPPEEVKHATLRFNGTRLGAVALYACDRGYSLSAPSRIRVCQPHGVWSEPPQCLEIDECRSQPCLHGGSCQDRVAGYLCLCSTGYEGAHCELERDECRAHPCRNGGSCRNLPGAYVCRCPAGFVGVHCETEVDACDSSPCQHGGRCESGGGAYLCVCPESFFGYHCETVSDPCFSSPCGGRGYCLASNGSHSCTCKVGYTGEDCAKELFPPTALKMERVEESGVSISWNPPNGPAARQMLDGYAVTYVSSDGSYRRTDFVDRTRSSHQLQALAAGRAYNISVFSVKRNSNNKNDISRPAVLLARTRPRPVEGFEVTNVTASTISVQWALHRIRHATVSGVRVSIRHPEALRDQATDVDRSVDRFTFRALLPGKRYTIQLTTLSGLRGEEHPTESLATAPTHVWTRPLPPANLTAARVTATSAHVVWDAPTPGSLLEAYVINVTTSQSTKSRYVPNGKLASYTVRDLLPGRRYQLSVIAVQSTELGPQHSEPAHLYIITSPRDGADRRWHQGGHHPRVLKNRPPPARLPELRLLNDHSAPETPTQPPRFSELVDGRGRVSARFGGSPSKAATVRSQPTASAQLENMEEAPKRVSLALQLPEHGSKDIGNVPGNCSENPCQNGGTCVPGADAHSCDCGPGFKGRRCELACIKVSRPCTRLFSETKAFPVWEGGVCHHVYKRVYRVHQDICFKESCESTSLKKTPNRKQSKSQTLEKS

SEQ ID NO: 36434 - protein, 1380 aa, Artificial Sequence
  derived and/or modified sequence
MRHGVAWALLVAAALGLGARGVRGAVALADFYPFGAERGDAVTPKQDDGGSGLRPLSVPFPFFGAEHSGLYVNNNGIISFLKEVSQFTPVAFPIAKDRCVVAAFWADVDNRRAGDVYYREATDPAMLRRATEDVRHYFPELLDFNATWVFVATWYRVTFFGGSSSSPVNTFQTVLITDGKLSFTIFNYESIVWTTGTHASSGGNATGLGGIAAQAGFNAGDGQRYFSIPGSRTADMAEVETTTNVGVPGRWAFRIDDAQVRVGGCGHTTSVCLALRPCLNGGKCIDDCVTGNPSYTCSCLSGFTGRRCHLDVNECASQPCQNGGTCTHGINSFRCQCPAGFGGPTCETAQSPCDTKECQHGGQCQVENGSAVCVCQAGYTGAACEMDVDDCSPDPCLNGGSCVDLVGNYTCLCAEPFKGLRCETGDHPVPDACLSAPCHNGGTCVDADQGYVCECPEGFMGLDCRERVPDDCECRNGGRCLGANTTLCQCPLGFFGLLCEFEITAMPCNMNTQCPDGGYCMEHGGSYLCVCHTDHNASHSLPSPCDSDPCFNGGSCDAHDDSYTCECPRGFHGKHCEKARPHLCSSGPCRNGGTCKEAGGEYHCSCPYRFTGRHCEIGKPDSCASGPCHNGGTCFHYIGKYKCDCPPGFSGRHCEIAPSPCFRSPCVNGGTCEDRDTDFFCHCQAGYMGRRCQAEVDCGPPEEVKHATLRFNGTRLGAVALYACDRGYSLSAPSRIRVCQPHGVWSEPPQCLEIDECRSQPCLHGGSCQDRVAGYLCLCSTGYEGAHCELERDECRAHPCRNGGSCRNLPGAYVCRCPAGFVGVHCETEVDACDSSPCQHGGRCESGGGAYLCVCPESFFGYHCETVSDPCFSSPCGGRGYCLASNGSHSCTCKVGYTGEDCAKELFPPTALKMERVEESGVSISWNPPNGPAARQMLDGYAVTYVSSDGSYRRTDFVDRTRSSHQLQALAAGRAYNISVFSVKRNSNNKNDISRPAVLLARTRPRPVEGFEVTNVTASTISVQWALHRIRHATVSGVRVSIRHPEALRDQATDVDRSVDRFTFRALLPGKRYTIQLTTLSGLRGEEHPTESLATAPTHVWTRPLPPANLTAARVTATSAHVVWDAPTPGSLLEAYVINVTTSQSTKSRYVPNGKLASYTVRDLLPGRRYQLSVIAVQSTELGPQHSEPAHLYIITSPRDGADRRWHQGGHHPRVLKNRPPPARLPELRLLNDHSAPETPTQPPRFSELVDGRGRVSARFGGSPSKAATVRSHVPGNCSENPCQNGGTCVPGADAHSCDCGPGFKGRRCELACIKVSRPCTRLFSETKAFPVWEGGVCHHVYKRVYRVHQDICFKESCESTSLKKTPNRKQSKSQTLEKS

SEQ ID NO: 36435 - protein, 1324 aa, Artificial Sequence
  derived and/or modified sequence
MRHGVAWALLVAAALGLGARGVRGAVALADFYPFGAERGDAVTPKQDDGGSGLRPLSVPFPFFGAEHSGLYVNNNGIISFLKEVSQFTPVAFPIAKDRCVVAAFWADVDNRRAGDVYYREATDPAMLRRATEDVRHYFPELLDFNATWVFVATWYRVTFFGGSSSSPVNTFQTVLITDGKLSFTIFNYESIVWTTGTHASSGGNATGLGGIAAQAGFNAGDGQRYFSIPGSRTADMAEVETTTNVGVPGRWAFRIDDAQVRVGGCGHTTSVCLALRPCLNGGKCIDDCVTGNPSYTCSCLSGFTGRRCHLDVNECASQPCQNGGTCTHGINSFRCQCPAGFGGPTCETAQSPCDTKECQHGGQCQVENGSAVCVCQAGYTGAACEMDVDDCSPDPCLNGGSCVDLVGNYTCLCAEPFKGLRCETGDHPVPDACLSAPCHNGGTCVDADQGYVCECPEGFMGLDCRERVPDDCECRNGGRCLGANTTLCQCPLGFFGLLCEFEITAMPCNMNTQCPDGGYCMEHGGSYLCVCHTDHNASHSLPSPCDSDPCFNGGSCDAHDDSYTCECPRGFHGKHCEKARPHLCSSGPCRNGGTCKEAGGEYHCSCPYRFTGRHCEIGKPDSCASGPCHNGGTCFHYIGKYKCDCPPGFSGRHCEIAPSPCFRSPCVNGGTCEDRDTDFFCHCQAGYMGRRCQAEVDCGPPEEVKHATLRFNGTRLGAVALYACDRGYSLSAPSRIRVCQPHGVWSEPPQCLEIDECRSQPCLHGGSCQDRVAGYLCLCSTGYEGAHCELERDECRAHPCRNGGSCRNLPGAYVCRCPAGFVGVHCETEVDACDSSPCQHGGRCESGGGAYLCVCPESFFGYHCETVSDPCFSSPCGGRGYCLASNGSHSCTCKVGYTGEDCAKELFPPTALKMERVEESGVSISWNPPNGPAARQMLDGYAVTYVSSDGSYRRTDFVDRTRSSHQLQALAAGRAYNISVFSVKRNSNNKNDISRPAVLLARTRPRPVEGFEVTNVTASTISVQWALHRIRHATVSGVRVSIRHPEALRDQATDVDRSVDRFTFRALLPGKRYTIQLTTLSGLRGEEHPTESLATAPTHVWTRPLPPANLTAARVTATSAHVVWDAPTPGSLLEAYVINVTTSQSTKSRYVPNGKLASYTVRDLLPGRRYQLSVIAVQSTELGPQHSEPAHLYIITSPRDGADRRWHQGGHHPRVLKNRPPPARLPELRLLNDHSAPETPTQPPRFSELVDGRGRVSARFGGSPSKAATVRSQPTASAQLENMEEAPKRVSLALQLPEHGSKDIGSESAALVGTLGLTDCSQGP

SEQ ID NO: 36436 - protein, 1352 aa, Artificial Sequence
  derived and/or modified sequence
MRHGVAWALLVAAALGLGARGVRGAVALADFYPFGAERGDAVTPKQDDGGSGLRPLSVPFPFFGAEHSGLYVNNNGIISFLKEVSQFTPVAFPIAKDRCVVAAFWADVDNRRAGDVYYREATDPAMLRRATEDVRHYFPELLDFNATWVFVATWYRVTFFGGSSSSPVNTFQTVLITDGKLSFTIFNYESIVWTTGTHASSGGNATGLGGIAAQAGFNAGDGQRYFSIPGSRTADMAEVETTTNVGVPGRWAFRIDDAQVRVGGCGHTTSVCLALRPCLNGGKCIDDCVTGNPSYTCSCLSGFTGRRCHLDVNECASQPCQNGGTCTHGINSFRCQCPAGFGGPTCETAQSPCDTKECQHGGQCQVENGSAVCVCQAGYTGAACEMDVDDCSPDPCLNGGSCVDLVGNYTCLCAEPFKGLRCETGDHPVPDACLSAPCHNGGTCVDADQGYVCECPEGFMGLDCRERVPDDCECRNGGRCLGANTTLCQCPLGFFGLLCEFEITAMPCNMNTQCPDGGYCMEHGGSYLCVCHTDHNASHSLPSPCDSDPCFNGGSCDAHDDSYTCECPRGFHGKHCEKARPHLCSSGPCRNGGTCKEAGGEYHCSCPYRFTGRHCEIGKPDSCASGPCHNGGTCFHYIGKYKCDCPPGFSGRHCEIAPSPCFRSPCVNGGTCEDRDTDFFCHCQAGYMGRRCQAEVDCGPPEEVKHATLRFNGTRLGAVALYACDRGYSLSAPSRIRVCQPHGVWSEPPQCLEIDECRSQPCLHGGSCQDRVAGYLCLCSTGYEGAHCELERDECRAHPCRNGGSCRNLPGAYVCRCPAGFVGVHCETEVDACDSSPCQHGGRCESGGGAYLCVCPESFFGYHCETVSDPCFSSPCGGRGYCLASNGSHSCTCKVGYTGEDCAKELFPPTALKMERVEESGVSISWNPPNGPAARQMLDGYAVTYVSSDGSYRRTDFVDRTRSSHQLQALAAGRAYNISVFSVKRNSNNKNDISRPAVLLARTRPRPVEGFEVTNVTASTISVQWALHRIRHATVSGVRVSIRHPEALRDQATDVDRSVDRFTFRALLPGKRYTIQLTTLSGLRGEEHPTESLATAPTHVWTRPLPPANLTAARVTATSAHVVWDAPTPGSLLEAYVINVTTSQSTKSRYVPNGKLASYTVRDLLPGRRYQLSVIAVQSTELGPQHSEPAHLYIITSPRDGADRRWHQGGHHPRVLKNRPPPARLPELRLLNDHSAPETPTQPPRFSELVDGRGRVSARFGGSPSKAATVRSHVPGNCSENPCQNGGTCVPGADAHSCDCGPGFKGRRCELACIKVSRPCTRLFSETKAFPVWEGGVCHHVKQSKSQTLEKS

SEQ ID NO: 36437 - DNA, 4242 bp, Artificial Sequence
  derived and/or modified sequence
atgagacacggtgttgcgtgggcactgctcgtggcggcagcactgggacttggggcaaggggtgttcgcggagcagtggcgcttgcggatttctaccccttcggagccgagcggggagacgccgtcactccaaagcaggacgatggcggatctgggctgagaccactgtccgtgccgtttccgttctttggcgcagagcactctgggttgtatgtaaataacaacggaatcattagcttcctgaaggaagtctcccagttcacccccgtggctttccccattgccaaagaccggtgcgtggtggcggcattctgggctgacgttgacaacagacgagcaggagatgtgtactatcgcgaggctacagatcccgcaatgctgagacgggctaccgaagacgtcagacactattttcctgagctgctcgactttaacgcaacctgggtattcgtggcaacatggtaccgggtcacgttcttcggtggctcatccagctcgcccgttaataccttccagacagttctgattactgatggaaagttgtccttcacaattttcaattacgagtccattgtgtggacaactggaactcatgcttcttcaggcggaaatgctaccgggctgggcggtatagccgctcaagctggctttaatgctggggacggacaacgttacttctccatccctggttcacgaactgctgatatggctgaagtggaaacaacgaccaatgtgggcgtcccaggtcggtgggcttttcgtatagacgatgctcaggtgagagtgggtggatgtggccacacgacaagcgtgtgcctggcactgcgcccttgccttaacgggggtaagtgtatcgatgactgtgtgacaggcaatcctagctatacctgtagctgtttgagcggcttcacagggcgtagatgtcatcttgacgtaaacgaatgcgcctcgcagccttgccagaacggtgggacatgcacacacgggattaatagttttcggtgccagtgccctgcaggtttcggcggacccacatgcgagaccgcgcagtccccatgcgacactaaggaatgccagcatgggggacagtgccaggtggaaaatggctcggcagtctgcgtatgccaggcaggctacacaggagctgcgtgtgagatggacgtggatgactgttccccagacccgtgcctcaacgggggtagctgtgttgatctggtggggaactacacttgtctatgcgctgaacctttcaaggggttacggtgcgagaccggagatcatcctgtccctgatgcctgtctgagcgcaccatgtcataacggtggaacttgcgttgacgcggatcagggctatgtgtgtgagtgccccgagggcttcatgggtctcgattgccgtgagcgcgtgccagacgactgtgagtgtcgcaatggcggtcgatgtctgggggctaacacgacactgtgccaatgtccgctcggcttttttggactattgtgcgagttcgagattaccgccatgccatgcaacatgaatacccagtgtcctgacggcggttactgcatggagcatggtggaagctacctttgtgtgtgccataccgatcacaatgccagccactcgctgccctctccttgtgacagtgacccctgctttaacggtggcagctgcgacgcccatgatgactcctacacctgtgaatgcccacgcggtttccacggtaagcactgtgagaaagctcgcccacacttgtgttcatcaggtccctgtcggaacgggggaacttgtaaagaagctggtggcgaataccattgcagctgtccctaccgatttacaggccgtcattgtgagattgggaaaccagattcctgcgccagtggcccttgccacaacgggggaacatgttttcactatatcggaaaatacaagtgtgactgtcctccgggattcagtggtcggcattgcgagatcgcgccatctccatgttttcgcagcccatgcgtgaacggcggtacctgtgaggatagggacaccgactttttttgccattgccaggccggttacatgggtcgcagatgtcaggccgaggtggattgtggtccacccgaagaagtcaagcacgccactttgcgatttaatgggacccggctgggcgctgtcgcgttatatgcatgtgatagaggatattctttatctgccccaagtagaatccgggtctgccagccacatggggtgtggagtgaacctcctcaatgcctcgaaattgatgagtgtcgctcccagccttgcctgcacggcggttcttgtcaagacagagtggccggatatctttgtctgtgtagtaccggctatgaaggcgctcattgtgagctggaaagagacgagtgccgagcccacccttgcaggaacggcggatcatgccgaaacctgcctggtgcttacgtctgcaggtgccccgctgggttcgtcggtgtgcactgcgagaccgaggtcgatgcctgtgactcatcaccctgtcagcatgggggtagatgcgagagcggcggaggagcctacctttgtgtgtgtcctgagtcgttctttggttaccattgcgaaacagtatcggatccttgcttctctagcccttgtggcggacggggatactgtctggccagtaatggttctcatagctgcacctgcaaggttgggtatactggcgaggactgcgcaaaagaactatttcccccaactgcactgaaaatggagagagtggaagagtcgggggtgagcatcagctggaaccccccaaatggtcccgctgctagacagatgctagatggctacgccgtaacttacgttagttctgacggcagctacagaagaactgatttcgttgaccgaaccaggtcttctcatcagctgcaggccctggccgcaggccgagcttacaatatttctgtcttttcagtcaaaaggaacagcaataacaagaacgacatctcaagaccggctgtcctgctggccaggacgcgccctagacccgtcgaggggttcgaagtgaccaatgtcaccgctagtaccatcagcgtgcagtgggcactacacagaattcgccacgctacagtcagcggtgttagggtgtcaataaggcatccagaggccctaagagaccaggcgacggacgttgatcgttctgtggataggttcacattccgcgcactgttaccagggaaacgctacacaattcagctgaccaccctaagtggactgcgcggagaggaacaccctactgaatcgctggccacagcacctactcatgtgtggacgcgccctttgccccctgccaacctaacagctgcacgggtgacagctacaagcgcacacgtggtgtgggacgccccaacacccggatcgctcctggaggcctatgtgattaatgtcaccacttctcaatccaccaagtccagatacgtgccgaacggaaagctcgcttcatacacagtgagggatctgctccctggtcgcagataccagctcagcgtcatagctgtccaatccaccgagctaggcccacaacattccgagcctgcacacctgtacatcatcacgtcacccagggacggggctgatcgcaggtggcaccaggggggtcaccacccacgtgtactcaaaaaccgacctccaccagccaggctcccagagttgagactgctgaatgaccactctgcccctgaaaccccaacccagccaccacggtttagtgagttggtggacggaaggggccgagtctccgccaggtttggtggcagcccctcaaaagccgcaaccgtgcggtcgcaaccaacagcctccgctcagttagagaatatggaggaggccccaaaacgtgtcagccttgctctccaattgccggagcatggcagcaaggatattggaaatgttccaggaaactgcagtgaaaacccatgccaaaatggaggaacttgtgtccccggagcggacgctcattcttgcgactgtggccctggctttaaggggaggagatgtgagctggcttgcattaaggtgagcagaccatgcacccggcttttctctgagaccaaagccttccccgtgtgggaggggggagtctgccatcatgtgtacaaaagggtgtatagggtccatcaggacatctgctttaaagagtcctgtgagagtaccagtttgaagaaaacaccgaaccggaagcaaagtaagagtcagaccctcgagaagtcgtag

SEQ ID NO: 36438 - DNA, 4143 bp, Artificial Sequence
  derived and/or modified sequence
atgagacacggggtcgcatgggccctgctggttgcagccgctttaggtctgggagcccgtggcgtgcgcggtgctgttgctttggcagacttttaccccttcggtgcagagaggggagacgcagtgactccgaagcaggatgatggcggatctggtttgcgcccactgtccgttcccttcccctttttcggagccgaacacagcggactttatgtgaacaataatgggataatcagctttctcaaggaggttagtcagttcactccagtcgccttcccaattgcgaaggataggtgtgtggtggccgctttctgggctgacgtggacaatcgcagggccggagatgtctactaccgggaagctactgatcctgcgatgttgcgcagagctaccgaggatgttagacactatttcccggagctgctggattttaacgccacctgggtatttgtcgcaacttggtatcgagtcacctttttcggtggcagttcgtccagcccagtgaatacatttcagaccgtgcttataactgatggcaaactgtcctttactatcttcaattacgagtcaattgtgtggacaacaggcacccacgcatccagcggcggaaacgctacaggcctgggcggtatcgccgctcaggccggttttaatgcaggcgatggtcaacggtacttcagcatccccggtagtcggacagctgacatggcggaggtggaaacaacgaccaacgtgggggtccctggcagatgggcttttaggattgacgatgcccaggtccgcgtggggggttgtggccatactacatcagtgtgcctggcacttcggccatgcctgaatggcggaaagtgcatcgacgactgcgtgaccggaaacccctcttatacttgcagctgcctgtccggatttacaggtagacgatgtcaccttgatgtgaatgaatgtgcatctcagccatgccaaaatggcggaacttgcacacatggaatcaacagttttcgctgtcagtgtcccgcaggtttcggtgggcctacttgcgaaacagcgcagtcaccatgtgacaccaaggaatgccagcacggagggcaatgtcaggttgagaatggaagcgccgtctgcgtctgccaggccggatacaccggcgcagcatgcgagatggacgtggacgactgtagtccagatccttgtcttaacggtgggtcctgcgtggacctggtaggtaattacacatgcctgtgcgctgagcccttcaaaggactccggtgtgagacaggtgatcaccctgtgcccgatgcctgtctatcagcaccctgtcacaacggcggaacctgcgtcgacgccgatcaaggatacgtgtgtgagtgtccagaaggattcatgggcctcgactgtagggagcgtgtgccagatgattgcgaatgcaggaacggaggacgttgtcttggtgcaaataccactctgtgtcagtgtcctttaggcttttttggcctcctatgtgaattcgaaatcaccgcaatgccttgcaatatgaatactcaatgtccagacggaggctactgtatggaacatggtggatcctacctgtgcgtctgccacactgaccataacgcgtcccattctctgccgtccccctgcgacagcgatccatgctttaacggcggaagctgtgacgcacacgacgatagttatacttgtgaatgccctaggggcttccatggaaagcattgtgaaaaggctcgcccacacctatgctcctcagggccttgccgcaacgggggaacatgcaaagaagcaggcggagagtaccactgttcttgtccatacaggttcactggcaggcactgtgagatcggtaaacctgatagctgtgccagcggaccctgtcataacgggggaacctgcttccactatattggcaaatacaaatgtgactgcccccctggcttttctggcaggcactgtgagattgctccatctccgtgtttcagaagcccatgtgtgaacggcggtacctgtgaagacagggacacagactttttctgccactgtcaggctggatacatgggcagaagatgtcaagcggaggttgattgtggacccccagaggaggttaaacatgcgactctgcgctttaacggaacaagactgggcgctgtggcgttgtatgcgtgcgatcggggttactctctatctgccccatcccggatccgagtctgccagccccacggcgtttggtcggaacctccacagtgtctcgagattgacgaatgtcgctcacagccatgtttgcacgggggatcctgtcaggacagagtagcagggtacctatgcctgtgctccacgggttacgagggagcccattgcgagttggaaagggatgaatgtcgggctcacccctgccgcaatgggggtagttgtaggaatcttccaggcgcatatgtgtgtagatgcccagctggctttgtcggcgttcattgcgagacagaggtggacgcgtgcgattcctccccttgtcagcacggagggcgttgcgaaagcggagggggagcctacctctgcgtatgcccagagtctttctttggttaccactgtgaaaccgtctcggacccttgcttttcctctccatgtgggggtaggggctattgcttagcctcgaatggctcccacagctgcacctgcaaagtgggatacaccggagaagattgtgctaaggagttatttccccctactgcgttaaagatggagagggtcgaagagtctggggtgtccatcagctggaatcccccaaatggacccgctgcacggcagatgctcgacggatacgcggtgacctacgtcagtagcgatgggagctatagaagaactgatttcgtcgatcggactagatccagtcaccaactgcaggcactagcagccggtcgtgcctataacatctctgtcttctccgtcaagaggaatagcaataataagaatgacatctctcggcctgctgtgctcctcgccaggaccagaccccgtcctgtagaaggctttgaggttaccaacgtgactgctagtacaatctcagtccaatgggctcttcatcggatccgtcacgcaacagtctcaggcgtcagagtgtccattcggcaccccgaggccctgcgggatcaggccaccgatgtggatcgcagtgtggatagatttaccttccgggcacttctgccgggaaagaggtacaccatccagctcactacgttgagtggactccgtggcgaggaacatcccacggaatccctcgcaactgcaccaactcacgtgtggacacgccctctgccacctgccaaccttacggcggcaagggttacagccactagtgcacatgttgtgtgggacgctccaactccgggttcgctactggaagcttacgtgattaacgtgaccaccagccagtccactaaatcaaggtacgtccctaatgggaagcttgcttcctacaccgtgcgcgacctcctacccggtaggcggtaccaattaagcgtcatcgccgtccagtcaactgaattgggaccacaacacagtgaaccagcccacctttacattatcacttcacctagagacggcgcagacagacgctggcatcagggcggacatcacccaagggtgctgaaaaataggccccctccggctcgcctacccgagctccgcctattgaatgaccatagtgctccagagactcctacccagccacctaggttttccgaattggtcgacggacgaggacgggtcagtgcacggtttggaggatcgcccagcaaagctgcgacagtgaggtcacacgttcccggtaactgcagtgagaacccttgccaaaacggcggtacatgtgtcccaggtgcagatgcccactcctgcgactgtggcccaggttttaagggccgacgctgcgagctcgcctgtatcaaggtttcacgaccgtgcacacggttatttagcgaaactaaagcattccccgtgtgggaaggcggtgtttgccaccatgtgtacaaacgagtttatagggtgcaccaagatatctgtttcaaagagtcttgtgaatcaaccagcttgaagaagacaccaaacaggaagcagagcaaaagccagaccctcgagaagtcctag

SEQ ID NO: 36439 - DNA, 4538 bp, Artificial Sequence
  derived and/or modified sequence
atgcggcacggcgtcgcctgggcgctgctggtggccgcggccctggggcttggggcgcgcggggtgcgcggcgcggtggcccttgccgacttctacccgttcggcgccgagcgcggcgacgccgtcacccccaagcaggacgacggcggctcggggctgcggccgctctcggtgcccttcccgttcttcggtgccgagcactccggactctacgtgaacaacaacgggatcatctccttcctgaaggaggtttctcagttcaccccagtggccttccccattgccaaggaccgctgcgtggtggcagccttctgggcagatgtggacaaccggcgtgcaggcgacgtgtactaccgggaggccaccgacccagccatgctgcgccgagccacggaggacgtcaggcactacttccccgagctcctggacttcaatgccacctgggtttttgttgccacctggtaccgagtgaccttctttggaggcagttcctcatcccctgtcaacacattccagactgtgctcatcacagacggcaagctctccttcaccatcttcaactatgagtccatcgtgtggaccacaggcacacacgccagcagcgggggcaacgccactggcctcgggggcatcgcagcccaggctggcttcaacgcaggcgatgggcagcgttacttcagtatccccggctcgcgcacagcagacatggccgaggtggagaccaccaccaacgtgggtgtgcccgggcgctgggcgttcagaatcgatgatgcccaggtgcgcgtggggggctgcggccatacaacgtccgtgtgcctggccctgcgcccctgcctcaacggcggcaagtgcatcgacgactgcgtcacgggcaacccctcctacacctgctcctgcctctcgggcttcacggggcggaggtgccacctggacgtgaacgaatgtgcctcccagccctgtcagaatggtgggacctgtactcacggcatcaacagtttccgctgccagtgcccggctggctttgggggacccacctgtgagacagcccaatccccctgtgacaccaaagagtgtcaacatggtggccagtgccaggtggagaatggctctgcggtgtgtgtgtgccaggccggatacaccggagcagcctgcgagatggatgtggacgactgcagccctgacccctgcctgaatggaggctcttgtgttgacctagtggggaattacacctgcttgtgtgccgagcccttcaagggacttcgctgtgagacaggagaccatccagtgccagacgcctgcctctcggccccttgccacaatgggggcacctgtgtggatgcggaccagggctacgtgtgcgagtgccccgaaggcttcatgggcctggactgcagggagagagtccccgatgactgtgagtgccgcaacggaggcagatgcctgggcgccaacaccaccctctgccagtgccccctgggattctttgggcttctctgtgaatttgaaatcacagccatgccctgcaacatgaacacacagtgcccagatgggggctactgcatggagcacggcgggagctacctctgcgtctgccacaccgaccacaatgccagccactccctgccatcaccctgcgactcggacccctgcttcaacggaggctcctgcgatgcccatgacgactcctacacctgcgagtgcccgcgcgggttccacggcaagcactgcgagaaagcccggccacacctgtgcagctcagggccctgccggaacgggggcacgtgcaaggaggcgggcggcgagtaccactgcagctgcccctaccgcttcactgggaggcactgtgagatcgggaagccagactcgtgtgcctctggcccctgtcacaacggcggcacctgcttccactacattggcaaatacaagtgtgactgtcccccaggcttctccgggcggcactgcgagatagccccctccccctgcttccggagcccgtgtgtgaatgggggcacctgcgaggaccgggacacggatttcttctgccactgccaagcagggtacatgggacgccggtgccaggcagaggtggactgcggccccccggaggaggtgaagcacgccacactgcgcttcaacggcacgcggctgggcgcggtggccctgtatgcatgtgaccgtggctacagcctgagcgcccccagccgcatccgggtctgccagccacacggtgtctggagtgagcctccccagtgccttgaaatcgatgagtgccggtctcagccgtgcctgcatgggggctcttgtcaggaccgcgttgctgggtacctgtgcctctgcagcacaggctatgagggcgcccactgtgagctggagagggatgagtgccgagctcacccgtgcagaaatggagggtcctgcaggaacctcccaggggcctatgtctgccggtgccctgcaggcttcgttggagtccactgtgagacagaggtggacgcctgcgactccagcccctgccagcatggaggccggtgtgagagcggcggcggggcctacctgtgcgtctgcccagagagcttcttcggctaccactgcgagacagtgagtgacccctgcttctccagcccctgtgggggccgtggctattgcctggccagcaacggctcccacagctgcacctgcaaagtgggctacacgggcgaggactgcgccaaagagctcttcccaccgacggccctcaagatggagagagtggaggagagtggggtctctatctcctggaacccgcccaatggtccagccgccaggcagatgcttgatggctacgcggtcacctacgtctcctccgacggctcctaccgccgcacagactttgtggacaggacccgctcctcgcaccagctccaggccctggcggccggcagggcctacaacatctccgtcttctcagtgaagcgaaacagtaacaacaagaatgacatcagcaggcctgccgtgctgctggcccgcacgcgaccccgccctgtggaaggcttcgaggtcaccaatgtgacggctagcaccatctcagtgcagtgggccctgcacaggatccgccatgccaccgtcagtggggtccgtgtgtccatccgccaccctgaggccctcagggaccaggccaccgatgtggacaggagtgtggacaggttcacctttagggccctgctgcctgggaagaggtacaccatccagctgaccaccctcagtgggctcaggggagaggagcaccccacagagagcctggccaccgcgccgacgcacgtgtggacccggcccctgcctccagcaaacctgaccgccgcccgagtcactgccacctctgcccacgtggtctgggatgccccgactccaggcagcttgctggaggcttatgtcatcaatgtgaccaccagccagagcaccaagagccgctatgtccccaacgggaagctggcgtcctacacggtgcgcgacctgctgccgggacggcggtaccagctctctgtgatagcagtgcagagcacggagctcgggccgcagcacagcgagcccgcccacctctacatcatcacctcccccagggatggcgctgacagacgctggcaccagggaggacaccaccctcgggtgctcaagaacagaccgcccccggcgcgcctgccggagctgcgcctgctcaatgaccacagcgcccccgagacccccacccagccccccaggttctcggagcttgtggacggcagaggaagagtgagcgccaggttcggtggctcacccagcaaagcagccaccgtgagatcacaacccacagcctcggcgcagctcgagaacatggaggaagcccccaagcgggtcagcctggccctccagctccctgaacacggcagcaaggacatcggaagtgagtcagcagcgctggtggggactttgggactgactgactgctctcaggggccttagaggctgcaggcaggagggaccacccacggtgaggaatcaggaggcacagagcctacctgaggggaggctgagcaccaggcaccccggtgtgggaagatggggtgaagctacaccacccaagcagtgggaccccacagacgggaacaggccagggggcaggacccacccaaaccacccagagtctgagctagagagactggctttgatgctgcctcccctcccctctcctccttcgcctccacatgcagcagagcccaccccagcccctgcctctgggcccctcacccctcacttctccaaagaggagcaggcggagtcaggatgggagaagcagagggagcagccactgggcgagccccagcttgaggactagctgggccctgtggacactcaggttatgcaggacctgaactgtctcctagtccggggctctgcctcgtgaggatcgaggccagcacgtccctgcagggcaccaagcatctgctgagcacctgcagtaagagttcccagacgctcacgaggcagttccccttcgggcagcaccaatacatgtgtgttcctca

SEQ ID NO: 36440 - DNA, 7986 bp, Artificial Sequence
  derived and/or modified sequence
atgcggcacggcgtcgcctgggcgctgctggtggccgcggccctggggcttggggcgcgcggggtgcgcggcgcggtggcccttgccgacttctacccgttcggcgccgagcgcggcgacgccgtcacccccaagcaggacgacggcggctcggggctgcggccgctctcggtgcccttcccgttcttcggtgccgagcactccggactctacgtgaacaacaacgggatcatctccttcctgaaggaggtttctcagttcaccccagtggccttccccattgccaaggaccgctgcgtggtggcagccttctgggcagatgtggacaaccggcgtgcaggcgacgtgtactaccgggaggccaccgacccagccatgctgcgccgagccacggaggacgtcaggcactacttccccgagctcctggacttcaatgccacctgggtttttgttgccacctggtaccgagtgaccttctttggaggcagttcctcatcccctgtcaacacattccagactgtgctcatcacagacggcaagctctccttcaccatcttcaactatgagtccatcgtgtggaccacaggcacacacgccagcagcgggggcaacgccactggcctcgggggcatcgcagcccaggctggcttcaacgcaggcgatgggcagcgttacttcagtatccccggctcgcgcacagcagacatggccgaggtggagaccaccaccaacgtgggtgtgcccgggcgctgggcgttcagaatcgatgatgcccaggtgcgcgtggggggctgcggccatacaacgtccgtgtgcctggccctgcgcccctgcctcaacggcggcaagtgcatcgacgactgcgtcacgggcaacccctcctacacctgctcctgcctctcgggcttcacggggcggaggtgccacctggacgtgaacgaatgtgcctcccagccctgtcagaatggtgggacctgtactcacggcatcaacagtttccgctgccagtgcccggctggctttgggggacccacctgtgagacagcccaatccccctgtgacaccaaagagtgtcaacatggtggccagtgccaggtggagaatggctctgcggtgtgtgtgtgccaggccggatacaccggagcagcctgcgagatggatgtggacgactgcagccctgacccctgcctgaatggaggctcttgtgttgacctagtggggaattacacctgcttgtgtgccgagcccttcaagggacttcgctgtgagacaggagaccatccagtgccagacgcctgcctctcggccccttgccacaatgggggcacctgtgtggatgcggaccagggctacgtgtgcgagtgccccgaaggcttcatgggcctggactgcagggagagagtccccgatgactgtgagtgccgcaacggaggcagatgcctgggcgccaacaccaccctctgccagtgccccctgggattctttgggcttctctgtgaatttgaaatcacagccatgccctgcaacatgaacacacagtgcccagatgggggctactgcatggagcacggcgggagctacctctgcgtctgccacaccgaccacaatgccagccactccctgccatcaccctgcgactcggacccctgcttcaacggaggctcctgcgatgcccatgacgactcctacacctgcgagtgcccgcgcgggttccacggcaagcactgcgagaaagcccggccacacctgtgcagctcagggccctgccggaacgggggcacgtgcaaggaggcgggcggcgagtaccactgcagctgcccctaccgcttcactgggaggcactgtgagatcgggaagccagactcgtgtgcctctggcccctgtcacaacggcggcacctgcttccactacattggcaaatacaagtgtgactgtcccccaggcttctccgggcggcactgcgagatagccccctccccctgcttccggagcccgtgtgtgaatgggggcacctgcgaggaccgggacacggatttcttctgccactgccaagcagggtacatgggacgccggtgccaggcagaggtggactgcggccccccggaggaggtgaagcacgccacactgcgcttcaacggcacgcggctgggcgcggtggccctgtatgcatgtgaccgtggctacagcctgagcgcccccagccgcatccgggtctgccagccacacggtgtctggagtgagcctccccagtgccttgaaatcgatgagtgccggtctcagccgtgcctgcatgggggctcttgtcaggaccgcgttgctgggtacctgtgcctctgcagcacaggctatgagggcgcccactgtgagctggagagggatgagtgccgagctcacccgtgcagaaatggagggtcctgcaggaacctcccaggggcctatgtctgccggtgccctgcaggcttcgttggagtccactgtgagacagaggtggacgcctgcgactccagcccctgccagcatggaggccggtgtgagagcggcggcggggcctacctgtgcgtctgcccagagagcttcttcggctaccactgcgagacagtgagtgacccctgcttctccagcccctgtgggggccgtggctattgcctggccagcaacggctcccacagctgcacctgcaaagtgggctacacgggcgaggactgcgccaaagagctcttcccaccgacggccctcaagatggagagagtggaggagagtggggtctctatctcctggaacccgcccaatggtccagccgccaggcagatgcttgatggctacgcggtcacctacgtctcctccgacggctcctaccgccgcacagactttgtggacaggacccgctcctcgcaccagctccaggccctggcggccggcagggcctacaacatctccgtcttctcagtgaagcgaaacagtaacaacaagaatgacatcagcaggcctgccgtgctgctggcccgcacgcgaccccgccctgtggaaggcttcgaggtcaccaatgtgacggctagcaccatctcagtgcagtgggccctgcacaggatccgccatgccaccgtcagtggggtccgtgtgtccatccgccaccctgaggccctcagggaccaggccaccgatgtggacaggagtgtggacaggttcacctttagggccctgctgcctgggaagaggtacaccatccagctgaccaccctcagtgggctcaggggagaggagcaccccacagagagcctggccaccgcgccgacgcacgtgtggacccggcccctgcctccagcaaacctgaccgccgcccgagtcactgccacctctgcccacgtggtctgggatgccccgactccaggcagcttgctggaggcttatgtcatcaatgtgaccaccagccagagcaccaagagccgctatgtccccaacgggaagctggcgtcctacacggtgcgcgacctgctgccgggacggcggtaccagctctctgtgatagcagtgcagagcacggagctcgggccgcagcacagcgagcccgcccacctctacatcatcacctcccccagggatggcgctgacagacgctggcaccagggaggacaccaccctcgggtgctcaagaacagaccgcccccggcgcgcctgccggagctgcgcctgctcaatgaccacagcgcccccgagacccccacccagccccccaggttctcggagcttgtggacggcagaggaagagtgagcgccaggttcggtggctcacccagcaaagcagccaccgtgagatcacacgtccctggcaactgttcagaaaacccctgtcagaacggaggcacttgtgtgccgggcgcagacgcccacagctgtgactgcgggccagggttcaaaggcagacgctgcgagctcgcctgtataaaggtgtcccgcccctgcacaaggctgttctccgagacaaaggcctttccagtctgggagggaggcgtctgtcaccacgtgaaacaaagtaagagtcagacactggagaaatcttaaggatttaagacgttcttgttacactccaccaacctcacgagtttctaacacccaggaagatgaggtctaaaaactggatgaaaaaggacaccctgagaaaaggtcctagctggagtcagtcccctctgtgacctctctcctcaggcctctagaggacagatggccaggcctgtgcacacaccagcccaccctgagagacccctctgggaccaaccacctgtgagtcctgcgatgcgtttaagcagcctgtgccctcacccaagctgcagttcctgaaggtgtagtctgtgtctctgcggatgagatgacagctcgccattccccggaatcagtgaggctgtcagtcagccacgcttctgcagtatgcagaaacctgttcttagactccaaagccagagaaagaattctcccttcgaggcccaacaaattgagaaggaactgtgatggaccacttccaaaacagagacgggggcaggggctgaagggcagagaccaggtgatgtcagaaggaaagccgggttgcagacacagccgcccctgctctggtcctccagcgtgtttatgacgctcgtgcaggtcgacgagccatcctatggactagttaacactaaggtggagttcagacttttttagacaacggcgcgactggcagcctttctctatcaagggtcagacggtaaacgttttcagctttgcagaccagaggtccctgtggctacagtagcgcagacacagccacaggcatgtcattgaatggctgcggctatgttccaataaaaacttatttacaataacaggtggtggccaaattggcccatgggccttatttggtgaaccctgttctatgagatcacctaggcttcagccttaaacagtggaagccatcccctgaatgacaagtcacaagggtatcaaagaaagacccctgaattttcatggaaaaagctattcagacccctgcttggaaagctaaggcacactgccacgaagcagcaaggacgccttacaagtctcagtgcaacagagatggacacctgggctgggctggacaatgtttaaggttccttttagtccatgactcaagtgatactgttttaggctatcaggtagtaaacacgatcttagacatccccatctttgtaagcagaacagtacggcacttcaccacatctgcttcccaccatgcttctaagcagctgtcttccccctgctaatgttacaaccaaagcagccaccccacctcctctcgtgttgagcctcacgaccgctgacccagctggaaagccagcgccctgccgcgtcaccctgactctgctcagagccagcattccagccacaaagagggcctccttcctttcctctttcataaaaatgttttttgaagagttagagtatattttaggctttttatctttattaaaatttcatgtgcatgtgtctgtgtattctgcaatttgtcattttcagaaagaaggaacaggcaattcgcgaagtttcacctgtactcccgagctgttccccaggctccagacccacttgagagcagaaggtggagctcaatgaagggtctcgagctcagcgaagggtcactgggtgaactgagagaaaccacgttcacaaacgcgtactgcggacttcctgccgccctgggacctgtcactgtttgtccatgtaagctacagcattactagcagatgctaagatcgagtgatatcactggaaaagtaggtgaatcctactaggaaactttctactccctactaggacctcaagcccctcagccacacagcaaatgctaatatgctccagtgttagcttagaagccttgtgtcaacaagaactggctcctgagtcccaagcttggtgccacacagcaaatgctaatatgctccagtgttagcttagaagccttgtgtcaacaagaactggctcctgagtcccaagcttggtgccacacagcaaatgctaatatgctccagtgttagcttagaagccttgtgtcaacaagaactggctcctgagtcccaagtgctgtcacaggacttgcccattgggatgttttccacattaaatatcaagtaaaaagacttcctggtgctcaggaattacagttcgttcttgaaacattccaaagaggccaccacagcttttcccatgtggcttcttttaaaaactcaaatggcttccttgaaaatactcaaagtccacccaaggaaattagtaataatagaatcagaaaactgtcaggagcataaagatttctgtatcaaaatgaaagaagcaatcctgagttgctgaattacccatctgctaatgaaaccgggatggactgatcatctaaccaagtgcagactgaggattctacttagtcctccgactgggtacaacaacagcctaggttctagggagggtggcagtgaccgggatgccacaatggaagagaaaatgaaaacactggcacagtgaaatgtctcatttccaaacagttttgcctatggccaagcaaggcaataaagacaaactctcccttttccccattgcgtgtgggctgccaggtacaagtaagggaatctttgctgtgcccactgtcctccagtagagaacccaacaggcaagggccccactcaggtatcagctcacctcctgcacctccccttagcaggaactccttccactggcaaaggactgccactgccatctgactcaactgtggcgatgtggacggagtcaccgagctgcttttcttttgcaaaacaaaagtctttttctttgcagtcacgctgtaagacgaggctgctggagaaaacaaaagcacctagatttcagtgctgaatccccacaattgcatgcagctcacacctaccaggggtattccagtgcataggggaaaggaacccggctgaaaaaccagctccttatttttcttttaaataaaataatacgatcctaagtccatttaccatctgaagttgtcacgagtgaacagtcacattactgttgtggaccaggccttagatgagtttctcaggctcagcactgacattctgggccggatcatcctctcttgtgggaccatcctgtgcactgcaggatgtttcacagcacccctggcctctacccactagaatcctacaatctaccagatcctaggatctagttgatcctagaatgctaccaaggagacttgaattttggtcccatcatcaaaaatgccttctgcatcaatcctatgccagtttcccctaaaagagggctaactggaatgttctaggatgtaccaatcctccaggaccctcttagagctcatgccatcagagacaggcctctatctcagggatcaccccggctgacatcaaattcctcttctcttttcccaacatttcaaattgttcttcggactcattgagttccctaaggtgacacgcccccccccccccccacacccaccttggggggtcacggattgctccctgtggccctggcttcagcccacctgctccatgaccctatgctcttctcctctggttctcgaagctgtctgtaaccagggcaggggagataactgtatgggaccattccctggcctccacctgccccagcactctccaggccagcacagtctggcactacagactacagggccggagacaccaggcttggaagtgaccactggccaagagctgacataaaagccaacttccccaaacaggaagggcctgttcttcacaaagataaagaaaactgccagcattttgctggccttaagaagccatgcaaaattaaccagtacatcatgaattaacttcttttactctgctgtgcactgaataccattatgaagcaatatacttttggattaaaaataagcatttttgtggaaaatctgctacatgttttcataaaataaagtgctatgatgtactaaaa

SEQ ID NO: 36441 - DNA, 3975 bp, Artificial Sequence
  derived and/or modified sequence
atgcgtcatggtgtcgcctgggctctgcttgtggcagccgctctcggccttggagccaggggagtccggggtgcagtagcactcgctgacttctaccccttcggcgcagaaagaggggacgcagttactcctaaacaggacgatggcggatctgggctgcgccctctgtctgtacccttcccctttttcggagccgagcatagtggtttatatgtcaacaataatgggataatcagctttctcaaagaggtgtctcaattcactcctgtcgctttcccaatagcgaaagatcgttgcgtggtggctgccttctgggcagacgtggataaccggcgtgcgggtgatgtgtattacagagaagccacggatccggcaatgctccgcagggcgacagaggacgtcaggcattattttccagaactcctggacttcaacgcgacatgggtgttcgtggctacttggtacagagtgacgtttttcggtggctcatcctcatctcctgtgaataccttccagactgttctcatcactgacggcaagctaagcttcactatctttaactacgagtctatcgtttggacaacaggaacacatgctagctccggtggcaacgccaccggcctgggagggattgccgcacaggctggctttaatgccggagatggtcagcgctatttttccatacctggctcgcgaactgcagatatggctgaagttgaaactacgactaacgtgggagtgccgggtcggtgggcctttcgcatagatgatgcccaggtccgcgtgggcggatgcggccacactacatcagtttgcctagccctcagaccatgtcttaacggcggaaaatgcatcgacgattgcgtgaccgggaatccaagctacacttgctcttgcttatccgggtttacaggcagacgctgtcatctggatgttaacgagtgcgcctcccagccatgccagaacgggggaacctgtacacatggtatcaacagctttaggtgccaatgccctgcgggttttgggggaccgacatgtgaaactgctcaatcgccgtgcgatactaaagaatgtcaacacggcggacagtgtcaggtggaaaacggaagcgcagtctgtgtgtgccaggccggatatactggcgctgcatgcgagatggacgtcgacgactgtagccccgatccatgtctgaatggcggttcatgtgtagacctcgtaggcaattacacatgcctttgcgccgagccatttaagggtctgcgttgtgaaaccggggatcacccagtgccagatgcctgtctgagcgctccatgccacaacggcggaacatgcgtggatgccgatcagggttacgtctgtgagtgccctgaaggattcatgggactggattgtagggaacgtgttcccgacgattgtgaatgtaggaacgggggaaggtgtctgggcgctaataccaccctgtgtcagtgccctctcggcttctttggtctcctgtgcgagtttgagatcaccgccatgccatgcaacatgaatacccagtgtcctgacggagggtattgtatggagcacgggggaagctacctttgtgtgtgccacactgaccataacgctagccactcgctgccgtcaccctgtgattccgatccatgcttcaatggcggatcatgcgatgcccacgatgatagctacacttgcgagtgtcctcggggtttccacggtaaacattgcgaaaaggcccgaccccatttgtgctcttccggcccttgccgaaatgggggtacatgtaaggaagcaggcggtgagtaccactgttcgtgtccatacagatttaccggaaggcattgcgaaataggcaaaccggattcttgtgcctctggtccctgtcacaacgggggaacatgcttccactacattgggaaatataaatgcgactgccctcctgggttctcaggtagacactgtgaaatcgcgccttctccttgctttagatcaccgtgcgtgaacgggggtacatgcgaagaccgcgatactgacttcttctgtcactgtcaggcagggtatatggggaggcgttgtcaggccgaggtggactgcggaccacccgaggaggtgaagcacgccaccctgcgattcaatggaactagacttggagcagtagctttgtacgcctgcgataggggctattcgctcagtgccccatctagaattagagtgtgtcagcctcacggagtctggtctgaaccgccacagtgcttggagatcgatgaatgtcggtcccagccctgtctacatggcggatcatgccaggacagagtagcaggatatctgtgcttgtgcagtaccgggtatgaaggcgcacactgtgaacttgaacgagacgaatgccgggctcatccctgccggaacggcggatcctgtcggaacctgcccggtgcctatgtttgtagatgtcctgcaggatttgtgggtgtgcattgcgagacggaggtagatgcctgtgactctagtccttgccagcacggcggaaggtgcgaatctgggggtggcgcatatctttgtgtctgtcccgagtctttttttgggtatcactgtgaaactgtcagcgacccatgtttcagctctccatgtggcggacggggttactgcttagcaagcaatggtagccatagctgcacctgcaaggtgggttatacaggcgaggactgcgcgaaggagctcttcccccctaccgcactcaagatggagcgggtggaggagtccggcgtgtccatcagttggaaccccccaaatgggcctgcagctaggcagatgctggatggctacgccgttacgtatgttagctctgacgggtcctaccgtagaaccgactttgtcgacagaactagatccagtcatcagctgcaggccctcgcagctggacgcgcttataatatctccgttttcagcgtcaagcggaattctaacaacaaaaatgatatctcaagacccgctgttttgttagcccgaacaagacccagaccagtcgaaggatttgaggtcaccaatgtgacggcgtcaactattagtgttcagtgggcattgcatagaatacggcacgctaccgtgtctggcgtccgcgtgagtatccgccaccccgaggctctccgcgaccaagccacagacgtagatagaagtgtggaccgcttcacattccgtgccttactgccagggaagaggtacacaatccagctgacgaccctgtcaggattacgtggagaagagcacccgacagaaagcctggctacggcgccaacacacgtctggacgagaccactccccccagcgaatctgaccgcagccagggtgaccgctacttccgcacatgtcgtgtgggacgcacctactcctgggagcctgctggaggcttacgtgatcaacgtgacaacatcacagagtactaagtctagatatgtacctaatgggaagctcgccagttacacagtgcgagacttgcttccgggtcgcagataccagctaagcgttatagctgtgcaatctactgagctggggcctcagcactcagaacccgctcacctgtacatcattaccagccccagggacggggctgatcggcgatggcatcagggaggacaccatccaagggtgctgaagaacaggccaccccctgcgcgattgcccgaactgaggctgctgaatgaccacagcgcgcctgagacccctactcagccgcctcggttctccgagctagtagacgggagaggtagggtaagtgccaggtttggcggttctccatctaaggctgccaccgtacgttctcaacccacagcctccgcccagcttgaaaacatggaggaggcccctaagagggtgtcgttagccctccagcttcctgaacatgggtctaaggacattggctctgagtcagctgcactggtcggaacactcggcctcactgattgtagtcagggcccttag

SEQ ID NO: 36442 - DNA, 4059 bp, Artificial Sequence
  derived and/or modified sequence
atgcgccatggagtcgcctgggcccttcttgtcgccgcagccctgggactgggagcacggggagtacgcggagccgtggccctggccgatttctatccctttggggcagaacggggagatgcagttacaccaaaacaggatgacggtggaagcggccttcggccactgagcgtcccctttcctttttttggagcggaacattccggactttatgtaaacaataacggcatcatttcctttcttaaagaggtttctcagttcacacccgtggccttccctattgccaaagatagatgcgtggtggccgctttctgggcagatgtggacaatcgtagggcaggcgacgtatattatcgcgaggcaactgatccggctatgctccgcagagctacagaggatgttagacactactttcctgagctgctggactttaacgctacctgggtgttcgtggctacatggtacagggttacattctttggtggaagcagcagtagcccagtgaatacttttcagacagtgttgattacagatggcaagctgagttttaccattttcaactacgagtccatcgtgtggactactggaacccatgcgagctcagggggtaatgccaccggtctcgggggaattgcagcccaggcaggattcaatgcaggggatggacagcgctacttctcaatcccagggtccagaaccgccgacatggccgaagtcgaaactaccacaaacgtaggtgtcccaggaagatgggcattccggatcgatgatgctcaggtgagggtgggaggatgcggccatacaacttctgtttgcctagctcttcgcccatgtttaaacgggggtaaatgcatcgatgactgtgtaactggaaacccctcctatacttgttcctgtttgagcggttttacgggacgcagatgccatcttgacgtcaacgagtgtgcaagtcagccttgccagaacggtgggacctgcacacatggcataaactcattcagatgtcagtgcccagccggttttgggggacccacatgcgaaactgcgcaatccccatgtgataccaaagaatgccagcacggtgggcagtgtcaggtagaaaacggatcggccgtgtgcgtgtgtcaagcaggctatactggcgcagcttgtgagatggacgttgatgattgtagtccagatccttgcctcaatggcggttcatgcgtggatctcgtgggcaactacacctgcctctgtgctgaacctttcaaaggcctacgctgcgagaccggtgaccacccagtgccagatgcttgtctttctgcgccttgtcacaatgggggaacatgtgtggatgcggatcagggttacgtttgcgagtgtccagaaggcttcatggggctggactgtcgagaacgggtacctgacgactgtgagtgcagaaacggtggtcggtgtttgggagcaaacactacgctctgccaatgccccttaggctttttcgggctcctctgcgaatttgaaattaccgcgatgccgtgcaacatgaatacccagtgccccgacggtgggtattgtatggaacatggcggaagttacttgtgcgtgtgccacacagatcacaacgcaagccatagtctgcccagcccctgcgactctgacccatgcttcaatggagggtcctgtgacgcacatgacgattcctacacatgtgaatgcccgaggggattccacggcaagcactgtgaaaaggctagacctcatctgtgtagttcgggtccctgtcggaacggaggtacctgtaaggaggccggaggggagtatcattgttcttgcccatacagatttaccgggcgtcactgcgaaattggaaagcccgatagttgcgctagcggcccatgccataacgggggaacctgttttcactacatcgggaaatacaaatgcgattgccccccagggttcagcggacgacactgcgagattgcaccctcgccttgcttccgttccccctgtgttaatggcggaacttgtgaagaccgggacactgactttttctgccactgccaggccggttacatgggcaggcggtgccaagccgaagtggattgcgggcctccagaggaggtgaagcacgcaacgttgcgcttcaatggcacacgcctgggagccgtggccttatacgcttgcgacaggggatacagcctgtccgctcccagccggatcagagtttgtcagccacacggggtatggagtgagcccccacagtgccttgagattgatgaatgccggagtcaaccctgtctgcatggagggtcatgccaggacagggtcgcaggatatttgtgtctgtgttccaccggatacgagggtgcccactgcgaactcgaacgcgatgagtgtcgtgcgcacccctgcagaaacggaggtagttgtagaaatcttcctggcgcttacgtctgtagatgcccagcgggatttgtcggcgtgcattgtgagacagaagtggacgcatgtgatagttccccctgtcagcatggcggaaggtgtgagtcaggaggaggagcctacctctgtgtgtgtccagaatcttttttcggctaccactgtgaaaccgtttccgatccgtgtttctccagcccttgtggaggacgtggctattgcttggccagtaacggttcacactcctgcacctgcaaggtcggttacacaggagaggattgtgccaaggagctgttccctcccaccgcattaaagatggagcgcgtggaagagtcgggcgtctctatctcctggaatcccccaaacgggccagcagcgagacaaatgttggatggatacgccgtgacatatgtttcaagcgatggaagctaccgaagaaccgacttcgttgatagaacccggagttctcaccaactgcaggccctggcggcaggcagggcttacaatatctctgtgttttctgtgaaacggaactccaacaataaaaatgatatttcccggccagccgttttgctggccaggactcgcccaagaccagtagaaggatttgaggttaccaacgttacagccagcaccatctcagtacagtgggctctgcatcggattagacatgcaaccgtcagcggtgtcagagtgtcaatacggcaccccgaggcactgcgggatcaggccaccgatgtggatcgcagtgtcgataggttcacctttcgcgctctgttacctggtaagaggtacacaatccagttgaccaccctgagcggcctgcggggtgaagaacatcccaccgagtctctggccaccgcccctacgcatgtgtggacgcgacctctgccacccgcaaatctgactgccgcacgggtcacggctacctccgcccacgtcgtctgggacgcaccaacccccggttccttgctcgaggcctatgtgataaacgtaactacctcacagtcgaccaagagcagatatgtacccaatggaaagctggcctcatacacagtgcgggatctactgccaggccgtaggtatcagctgtctgtcatcgccgttcaatcaactgaactgggcccacaacactctgaaccagctcatctttacattataacctcacccagggacggcgctgaccgcaggtggcaccagggtggacaccatcccagagttctgaagaaccggcctccgcctgccagactacctgaacttcgcctgctgaatgatcactctgctcccgaaaccccgacccagccacccagattttctgagcttgtggacggtaggggcagggtttcagcgaggttcggcggtagtccttccaaagctgcgaccgtacggagccatgtcccaggcaattgctctgaaaacccttgtcagaatgggggtacatgtgtccccggagccgacgctcatagctgtgattgcggacccggttttaaaggccgtaggtgcgagctggcttgcatcaaggtgtccaggccctgtacgcgcctgttttctgaaactaaagctttcccggtgtgggagggaggcgtgtgccaccatgtcaaacagagcaaatcccagacgctggaaaaaagctag

SEQ ID NO: 36443 - DNA, 4242 bp, Artificial Sequence
  derived and/or modified sequence
atgcgccacggtgtcgcttgggccctgttagtggctgccgcactgggtcttggagcacgcggcgtgcgcggggctgtggccctagctgatttctacccttttggggccgagcgtggcgacgctgtgacgccaaagcaggacgacggtggctcgggtctgcgccctctgtccgtccccttcccattttttggggcagagcacagcggtctgtatgtgaataataatgggatcatcagtttcttgaaagaggtgagccaattcacacctgttgcctttcctattgccaaggaccgctgcgtggttgccgcattctgggcagacgtggacaacagacgggctggagacgtctactacagagaagccaccgacccagccatgctgaggcgagccacggaggacgtccggcactactttcctgagcttctagacttcaacgctacttgggtgttcgtggctacttggtatagggtgaccttcttcggcgggtcctcgtcctcacctgtcaatacatttcagacagtgttaatcactgatggaaagctctcattcacaattttcaactatgaatccatagtatggaccactggcacacacgccagttcaggaggaaatgccaccggccttggcggcatcgccgctcaggctgggtttaacgccggtgacggccaacggtatttttcgatccccggcagcagaacagctgatatggccgaggtggaaactaccactaatgttggggtcccaggccgctgggccttccgcatcgacgatgctcaggtcagagtcggcggatgcgggcacacaacctcagtctgcctagccttgcgcccatgtctcaatggcggtaaatgtattgacgactgtgttacagggaacccttcttacacatgtagctgcctttccggttttacaggcaggcgttgccacctcgatgtgaacgagtgtgcttcacagccatgccaaaatggcggtacgtgtacacatgggataaattcatttcgttgtcaatgtcccgccggttttggaggcccaacgtgcgaaaccgcacagtcgccgtgtgacaccaaggaatgtcagcacggtgggcagtgtcaggtggaaaacggctccgccgtgtgcgtgtgccaggcaggatatacgggagcagcgtgcgagatggatgtggacgactgcagtccggacccctgcctcaacggcggctcatgcgtggatttggtgggcaattatacatgcctttgcgccgagccattcaaaggcctgaggtgcgagactggcgaccatcccgtaccagatgcttgccttagcgccccttgccataatggaggcacctgcgtcgacgcagatcaaggatatgtttgcgaatgtcccgaaggcttcatgggactggactgtcgggaacgggtacccgacgactgtgagtgtcgcaacggcggacgctgcctaggagccaacacgacactgtgtcagtgtccattgggcttttttgggctcttgtgtgaatttgagatcactgccatgccttgcaacatgaacacccagtgtccagacggaggctattgtatggaacacggcgggagttatctctgcgtatgccacaccgatcacaatgcctcacacagtctgccatccccctgcgattccgatccctgcttcaatgggggttcctgcgatgcccacgatgacagttatacctgcgagtgcccacgcggattccatggaaagcattgcgaaaaagcaagaccacacctttgctcctctggaccatgtaggaacggcggaacatgcaaagaggctggcggcgaatatcattgtagctgtccataccgattcaccgggcgccattgtgagatcgggaaacctgatagttgtgccagcggaccctgtcataacgggggaacctgtttccactatatcggaaagtacaagtgtgactgcccacctggtttcagcggtcggcactgtgaaattgcccccagcccctgctttcgctccccatgcgtcaacggcggaacgtgtgaggaccgggacaccgacttcttttgtcattgccaggctggatatatgggacgcaggtgtcaagcggaagtcgattgcggaccccctgaggaagtcaagcacgccacactacgctttaatggcacacggctcggggcagtggcattatacgcttgtgatagaggatactccctttcagccccaagcagaattagagtttgtcagcctcatggagtgtggtcagagccccctcagtgcctggagattgacgagtgcagaagccagccatgcctccatggcggctcttgtcaggaccgggtcgccggatatctgtgtctgtgctcaaccggatacgaaggtgctcattgcgagctcgagcgagacgagtgtagggcacacccttgtcgcaatggaggtagctgtcgcaacctgcccggtgcctacgtatgtagatgtccagctgggtttgtgggtgtacattgcgagacagaggtagacgcgtgcgacagctctccgtgtcagcacggtgggaggtgtgaatctgggggaggagcctacctttgtgtgtgtccagagtccttttttgggtaccactgtgaaaccgtttctgatccctgtttctcatccccttgcggcggaaggggatactgcctagcaagtaacgggagtcactcttgcacctgtaaagtaggatacacaggggaagactgtgctaaagaactcttcccaccaacagcattaaagatggaacgggtcgaggaatctggggtctctatttcttggaacccacctaatgggccagcagctcggcagatgctcgatggctatgctgtgacttacgtttccagcgatggatcctaccgccgaaccgacttcgtagaccgcacacgttcctcacatcagctgcaggccttggcagccggacgcgcctataatataagtgttttctccgtaaaaagaaattccaataacaagaatgacatcagtagacccgccgttctgctcgcaagaacgagacctaggcctgtggagggttttgaagtcacaaatgtaactgcatccactatctcagtgcagtgggccctccacaggattcggcatgctacagtctcaggggtcagggtctccatcaggcatcctgaagccctaagagatcaagccaccgatgtggataggtccgtggaccgatttaccttccgggctttgctgcctggaaagcgatatacaatccagttgaccaccctcagcggtctaagaggtgaagaacaccctactgagagcctcgccaccgcacctacacacgtgtggacccgccccctgccaccagccaacctaacagctgcaagagtgaccgccacctcggcccacgttgtttgggacgctcctaccccagggtctttgctggaggcgtacgtcatcaatgtgactacatcacagagcacgaagagccgttatgtccccaatggtaagctcgcatcctacacagttcgcgatctcctccccggcaggaggtatcagctgtccgtcatcgccgtgcagtctacagagctaggaccacaacattcggagccggcacacctttacatcattacctcccctagagacggtgccgatcggcgctggcatcaagggggacaccaccctcgcgttctaaagaacagaccacctccagcacgactgcctgaactgcgcctgctgaatgaccactctgccccagagacgcctactcagcctccaagattctctgagttagtggacggccgaggaagagtaagtgctagattcggcgggagcccctcaaaggccgccacggtgcggagccaaccaactgcgagtgcacagttagagaacatggaggaggcgcccaagcgtgtctccctagccctgcagttgcctgagcacggcagcaaagacattggcaacgtgccgggaaactgctccgagaatccttgtcagaatggtggcacctgtgtccctggagctgacgcacattcctgcgactgtggacccggcttcaagggccggcgatgcgaattagcctgtattaaggtctctcgcccgtgtacgagacttttctccgagaccaaagccttccccgtgtgggagggcggcgtctgccatcatgtgtacaaaagagtgtacagggttcaccaagatatatgcttcaaagagtcttgcgagagtacaagtttaaagaaaaccccaaacagaaagcaatctaaaagccagacactggaaaaatcttag

SEQ ID NO: 36444 - DNA, 4143 bp, Artificial Sequence
  derived and/or modified sequence
atgcgtcatggtgtggcatgggctctcctggttgccgctgccctcgggctcggtgcgaggggcgtgcgcggcgctgtcgctttggccgatttctacccttttggcgccgagagaggcgacgctgtcacaccaaagcaagacgacggtgggtcaggcctgcgaccgctgtcggtgccattccctttttttggcgctgagcactcgggattatacgtgaataacaatggcatcatatctttcctgaaagaggtgagccagtttacccccgtggccttccctattgcgaaggataggtgcgtcgtcgctgcattttgggctgatgtggacaataggcgtgccggagatgtttactatcgtgaagcaacggacccggctatgctccggagggccacggaggacgtgcggcactacttccccgagctgctcgacttcaacgcaacctgggtgttcgttgccacctggtacagggtcactttttttggagggagctcctcctccccggtgaacacattccaaacagtactaattactgatgggaaactgtctttcaccattttcaactatgaatctattgtgtggaccacagggacacacgctagctctgggggaaacgctactgggttaggtggcattgctgcacaggccggcttcaacgctggggatgggcagcgatacttctctattcctggcagccggaccgcggacatggcggaagtcgagaccaccacgaatgtcggtgtgccaggacgttgggcttttcgaattgatgacgcgcaagtacgcgtaggaggctgcggacataccactagtgtttgcctcgccctcagaccatgcctgaatggtggtaagtgcattgacgattgtgtgaccggaaacccaagctatacatgctcctgtctatctggctttactggaaggagatgccacctcgacgtgaacgaatgtgcaagtcagccttgtcaaaatggcggtacttgtacacacggaatcaatagtttcagatgccagtgtcccgctggttttgggggacccacatgcgaaacggctcagagtccctgtgacactaaggaatgtcagcatggagggcagtgccaggtggagaatggctccgctgtctgtgtttgccaggctggctacaccggagctgcttgcgagatggacgtcgacgattgctccccggacccatgcctgaatggggggtcttgcgtggaccttgtgggcaattatacttgtctttgtgcagaacctttcaaaggtctacgctgcgaaactggtgatcatcccgttcccgacgcatgcttgtccgccccttgtcacaatggcggaacctgtgtggacgcagaccagggctatgtctgcgaatgtccggaaggctttatgggattagactgccgagagagagtgccagatgattgcgagtgtcgcaatggcggccgatgtctgggcgccaatactactttgtgccagtgtcctctcggcttcttcggtctgctgtgcgagttcgaaataacagcaatgccctgtaatatgaacactcagtgtcccgacgggggatactgtatggagcacggcggcagctacttgtgtgtctgccacacagatcataatgcctcgcactcactcccaagcccatgcgactctgatccatgtttcaatggcggcagttgcgatgcacatgatgactcctacacgtgtgagtgcccaagaggattccacggaaaacactgcgagaaggcacgtccccacctctgtagcagcggaccctgtcggaacggaggcacttgcaaggaagccggaggtgagtatcactgttcatgtccgtatagatttactggtcgacattgtgagattggaaagcctgactcctgcgcctccggaccctgtcacaacggcggcacctgctttcactatataggcaagtacaaatgcgattgccctcccggattcagcgggcgccattgtgaaatcgcgccgagcccttgttttaggtcgccatgcgttaatggaggcacgtgcgaggatagggataccgacttcttttgccactgccaggccggctacatggggcggaggtgccaggccgaagtcgactgcggtccccccgaggaggtcaagcatgccacactgcgctttaatggtactagactgggtgccgtcgcactgtacgcatgcgaccgtggttactctttgagcgccccgtcacggatacgggtgtgtcagccccacggcgtgtggtcagaaccacctcagtgcctcgagatcgacgaatgccgcagccaaccttgcctgcatggcggttcctgccaagatcgcgtggccggctatctgtgtctttgctccaccggttacgagggagcgcattgcgagcttgaacgagacgagtgtagggcccatccttgccgcaacggtggttcttgccggaatctccccggggcctacgtatgcagatgtcctgcaggttttgtcggtgtccattgcgaaaccgaggtggacgcttgtgacagttcaccatgccagcacggcgggcgatgcgaatcaggaggtggcgcctacctttgcgtgtgtccagaatcattcttcggctaccattgtgaaacagtttccgatccctgtttctcctccccttgtggaggccgcggctattgcctggcatcgaacgggtcgcactcatgcacatgtaaggtaggctataccggcgaagattgtgccaaggagttattccctcctacagccctaaagatggaacgggtcgaggagtcgggggtgtcgatttcctggaatccccccaatggaccagctgcccgccaaatgctcgacggatatgcagtcacctatgtgtcttcagacggttcctatcgcagaaccgactttgtcgaccgtaccagaagttctcaccagcttcaggcccttgccgctggtcgtgcatataacatttcagttttctctgttaagcgaaacagtaacaataagaacgacatctcgcggccagctgtgcttctagcacgaacaaggccaagacctgtcgaaggatttgaggtaacgaacgtgaccgccagtacaattagtgttcagtgggccctccacaggattcgacacgccacagtgtctggggtccgcgtgtccattcggcacccggaagcccttagagatcaagccacagatgttgacagaagcgtggacagatttacattccgcgcccttttgcctggaaagcggtatactatccagctcactaccctctctgggctccggggcgaagagcacccaacggaaagcctggccacggcacccacgcatgtgtggactcgcccactgcctcccgccaatctgactgccgctcgggtcaccgccacctccgcacacgtcgtatgggatgcaccaactcccggttcattgctggaggcttacgtcatcaacgtgacaactagtcagtctacaaaatccagatacgtgccaaatggaaagctggccagctacactgtccgcgacctgctccccggccggaggtatcagttgtcggtgattgcagttcagtctaccgagcttgggccacaacactccgagccggcacatttgtatatcatcacctcccctcgcgacggcgcagaccgaagatggcatcagggcggacaccaccctcgcgtgctcaagaaccgaccaccacctgctagattacctgagctacgactgctgaatgaccacagcgcccccgaaacgcctacacagcctccaaggttcagtgaacttgtcgacgggaggggccgggtgtctgctagattcggtggcagcccatctaaggcagctacagtgcggtctcacgttcccggcaattgttccgagaacccttgccaaaacggcggtacttgtgtgcccggggccgatgctcattcttgcgattgtggaccagggttcaaggggagacggtgtgagcttgcctgtattaaggtcagtcgaccttgtacgcgtctgtttagcgagaccaaggcctttccagtctgggaagggggagtctgtcatcacgtctataaacgagtgtaccgagttcatcaggatatatgcttcaaagaatcatgcgaaagtaccagcttaaaaaagaccccaaacagaaagcagtctaaaagccagacccttgagaaaagctag

SEQ ID NO: 36445 - DNA, 3975 bp, Artificial Sequence
  derived and/or modified sequence
atgagacatggcgtggcctgggccttgctggtggccgccgctctggggctgggcgccagaggagtgcgcggggccgtggcactagcggacttctatccttttggtgctgaaagaggcgatgccgttacacccaagcaggatgatggtgggtcggggcttcgccccctgagtgtgcccttccctttcttcggcgccgagcactccggtctgtatgtaaacaacaacggcatcatctcattcctcaaggaagtgagccaattcacccccgtggcctttccaatcgccaaagaccgctgtgtggttgcagctttctgggccgacgtcgataacagaagggcaggcgacgtgtattaccgcgaggcaacagatcctgcaatgcttcgcagagccaccgaggacgtgcgccactattttcccgagctgctggactttaacgccacatgggtcttcgtagctacatggtaccgcgtgactttctttggcggcagctccagcagtcctgttaatacgttccagaccgtgcttattactgacggtaagctgtctttcacgatattcaattacgagtcgattgtgtggactaccggaacacacgcttcaagtggaggaaatgcaaccggccttggcgggatagcggcccaagccgggtttaacgctggagatggacaacgatacttcagcattcctggctcaagaacagccgacatggcagaagtggagacaactaccaacgttggggtgcctggacggtgggcgtttagaattgatgatgcacaggtgcgggtcggaggctgcggccacactacctccgtgtgcctggccttgagaccctgtcttaacggtgggaagtgcattgatgattgcgtgaccggaaatccaagttatacttgctcctgcttgagcggcttcaccggacggcgctgccacctcgacgtaaatgagtgtgcaagtcagccatgtcagaacggaggcacctgcacacatggtatcaatagtttccgatgtcaatgccccgcaggcttcggcggacccacttgtgaaacagcacagagcccatgcgatactaaggaatgccagcacggaggacagtgccaggtggagaatggcagcgccgtgtgcgtgtgccaagcaggctacaccggggctgcttgtgagatggatgttgacgattgttcccctgacccttgtctaaatggcgggtcatgcgtggacctcgttggcaattatacctgtctttgcgccgagccattcaaaggccttcgctgtgaaaccggagaccaccccgtgccagacgcctgcctctcagctccctgccataacggaggaacctgcgttgatgcagatcagggttatgtttgcgagtgccccgagggttttatgggtctggattgtcgggagagagtgcccgatgactgtgagtgcagaaatggggggcgctgcctgggggcaaacactacattgtgtcagtgtcccctgggtttctttggcctactctgtgaatttgaaataacggcaatgccttgtaacatgaatacccagtgtccagacggcggctattgtatggaacatggtggaagttacctgtgtgtttgtcacaccgatcacaacgcatcacatagcctgcctagtccttgtgattctgatccatgtttcaatgggggatcttgtgatgctcatgatgatagttatacctgtgagtgccctagagggttccacgggaagcattgtgagaaggcacgcccacatttatgttcatctgggccctgccgcaacgggggtacctgcaaggaggctggcggcgaatatcactgcagctgtccctacaggtttacagggcgccattgtgaaatcggcaagcctgattcatgcgctagcggaccttgccataacgggggcacttgctttcactacatcgggaagtacaagtgcgactgcccgcccggctttagcggcaggcactgtgagatcgctccaagtccatgctttcgcagcccatgtgtgaatggaggcacctgcgaagacagggataccgattttttttgccactgccaagcaggatacatgggtcgacggtgccaggcagaggtggactgcggacctcctgaagaagtcaaacatgcaacactgcgtttcaacgggacccgactgggagcagttgccctgtacgcttgcgaccgtgggtacagcctatcggctccatctagaattagggtctgtcagccccatggtgtttggagcgaaccacctcagtgtctcgaaatcgacgagtgccgctcacagccttgcctgcatggcgggtcctgccaggaccgcgtcgctggatatctgtgcctgtgttccactgggtacgagggagcccactgtgaactagaacgtgatgaatgcagagcccacccttgtagaaacggcggttcttgccggaacctccctggggcatacgtctgtagatgccccgccgggttcgttggtgtgcactgcgaaaccgaggtggacgcttgcgacagctccccttgtcagcacggaggtcggtgtgagagtggaggtggggcatatttgtgcgtgtgtcccgagagtttttttgggtaccactgcgagaccgtttctgatccttgcttcagttccccctgcggaggaagaggatattgccttgccagcaatggctctcacagttgcacgtgcaaagttggttacactggtgaagactgtgcgaaggagcttttcccaccgacagccttaaaaatggagagggtggaagagagtggtgtcagcatctcctggaatccccccaacggccctgccgccagacagatgttagacggttacgccgtgacctacgtgagcagtgacggtagctacaggcggacggattttgtagaccggactcgttcttctcatcagctgcaggccctcgccgccggtcgagcttataatatcagtgtctttagcgtcaagagaaactcaaacaacaagaatgacatatcccggccagctgtgctgctcgccagaacccgacctagacccgtagaaggcttcgaagtgaccaatgtcaccgcgtcaaccatatcagtccaatgggcacttcataggatcagacacgcaacggtttcaggtgttagagtaagtatccggcatcccgaggccctgcgggaccaagccaccgatgtggaccgctcggtcgatcggtttacattcagggcgcttctgcccggtaagaggtacacaattcagctgacgactctctcaggcctgcgtggtgaggaacacccaactgagagcctggctaccgctcctacacacgtgtggacccgaccattaccccctgccaatctgactgccgcccgagtgacagctacaagcgcccatgtagtgtgggacgcaccaacacctggaagcctgctcgaggcttacgtgatcaatgtgaccacatcccagtccaccaagtcgcggtatgtgccaaatgggaaactggcctcgtacactgtccgcgatctactcccgggccgaaggtaccagttaagcgtgatcgcagttcaaagcaccgaattaggccctcaacactcagagcccgcgcatttatatattatcacctctccaagagatggtgcggaccggcgctggcaccaaggaggacatcaccccagagtcctgaaaaaccgccctccccccgccaggctcccagaactgagacttcttaatgatcattccgcccctgagacccccacccagcccccacgcttcagcgagctggtcgacggtcgcgggcgagtcagtgctcgctttggaggatctcctagcaaggctgctaccgtgcgctcccagcccacagcttcggcccaattggagaacatggaggaggcccctaagcgcgtatctctggccttgcagcttcctgaacatggtagcaaggacatcggttctgaatccgcagccctggtaggcaccctggggttgaccgactgctcacagggcccctag

SEQ ID NO: 36446 - DNA, 4059 bp, Artificial Sequence
  derived and/or modified sequence
atgaggcacggagtggcttgggccctcttggtcgcggccgctttgggactgggcgcaaggggggtacgaggggctgtggcattggcagatttttacccttttggcgcagaacgcggtgatgccgtcacccccaaacaagacgacggtggcagtggattacgcccgctaagcgttccgtttcctttctttggggctgaacacagtggcctttacgtaaacaacaatggaatcattagttttctgaaagaagtgagtcagtttacacctgtagccttccccatcgctaaagatagatgcgttgtcgccgccttttgggcggatgtcgataaccggcgcgcgggtgatgtgtactatcgagaagccaccgatccagccatgctgagacgagctacagaagatgtccgccattactttccagaactccttgactttaatgcaacttgggttttcgtagctacctggtacagggtgaccttttttggcggatcctccagctcgccagtaaacacgttccagaccgtgctgataacagacggtaaactctcttttacgatcttcaattatgagtctattgtctggaccaccggtacccatgcttcatctgggggtaacgccacagggctcggcggcatcgccgcccaagccgggtttaacgctggagatggtcagcgatattttagcatccccggctccaggaccgcagatatggccgaggtcgaaacgacaactaacgtcggggtccccgggcgatgggccttcagaattgatgatgcccaggtgagggtgggcggttgcggccatacaacctccgtgtgcctcgcattacgtccatgcctgaatggtggaaagtgcattgacgactgcgtgaccgggaaccccagttatacctgttcttgcttgagcggctttaccgggcgcaggtgtcacctggacgtgaacgaatgcgcgtcacagccctgccagaacggtggaacttgtacacatggcataaatagcttccgttgccagtgtcccgctggctttggtggcccaacctgtgagacagcccagagcccttgcgacactaaagaatgccagcacggcggtcagtgccaggtcgagaacggctccgccgtctgcgtgtgccaagcggggtacaccggggctgcgtgtgagatggatgttgatgattgctccccagacccatgtcttaatggcggcagctgcgtcgatcttgtaggcaactacacctgcctctgcgctgagccctttaagggacttcgctgtgaaaccggagaccatccagttccagacgcctgtctgtctgcaccatgtcataatgggggaacctgtgtggacgcggaccaggggtacgtctgcgaatgcccggagggattcatgggccttgactgtagagagcgcgtgcccgatgattgtgaatgtaggaatggggggcgctgtctaggcgccaatactaccctgtgccagtgccctcttgggtttttcgggttgctgtgtgagttcgagatcactgcaatgccctgtaacatgaatactcaatgtccagatggcggatattgtatggaacatggtggctcatacctgtgtgtgtgtcacactgaccacaacgcttcccattcactgccctcgccttgcgattccgatccttgctttaatggtgggtcttgcgatgcccacgacgattcctacacctgcgagtgcccaagaggatttcatgggaaacattgtgagaaggctcggccccacctgtgttcctcaggaccttgcagaaatggcggcacttgtaaagaggccggcggcgagtaccattgctcctgtccgtatagattcactggaagacactgcgaaatcggaaaaccagattcctgcgcctctggaccctgccacaacggcgggacgtgttttcattacatagggaagtacaagtgcgactgcccccccggattctcgggaagacattgtgagatcgctccatcgccgtgttttaggtctccatgcgtgaacgggggaacttgtgaggaccgggacacggattttttttgtcactgtcaggcaggctacatgggaaggcgctgccaggctgaagtggactgcggacccccagaggaggtgaaacacgcaactctccgattcaatgggacacgcctgggagctgtcgctctctatgcttgtgaccggggatatagtctgagcgcgccctcacgcatcagagtatgccaaccgcacggagtctggtctgagcccccgcagtgtcttgaaatcgatgagtgtaggtctcaaccctgtctgcacggaggcagctgccaggatcgagtggccggttatttatgcctctgttcaacaggctacgagggcgcccattgtgagctagagcgagacgagtgccgtgcgcacccctgcaggaacggcggctcatgccggaacctccccggagcttacgtgtgcagatgtccagcagggttcgtgggcgtgcattgcgaaacagaagttgacgcatgcgattcctccccctgtcagcacggggggcgatgcgaatccgggggtggggcctacttatgcgtgtgccccgagagcttcttcgggtaccattgtgagaccgtatcggacccatgtttttcctccccatgtggcgggcgtggctactgcttagcctctaacgggtcccactcatgtacctgtaaagtaggatatactggagaagattgcgcaaaagagctgttcccacctactgcgctgaaaatggaacgagtggaagaatcaggggtgagcatctcatggaacccacctaacgggcccgccgcccgacagatgcttgacggctacgctgtgacatatgtttcctctgacggttcctataggcgcactgactttgtggatcggaccagaagctcccaccaattacaagctttagccgcaggccgcgcctataacatatcagttttttctgtgaaacgcaactccaataataagaacgatattagtcgcccggcagtgctcctggccaggactaggccacgcccagttgaggggtttgaagttaccaacgtgactgcttcaacaatttctgtgcagtgggccctccaccgcattagacacgctaccgtgtcaggcgtgcgcgtctcaatccgacatcccgaagcactccgcgaccaggcaactgacgttgaccgtagcgtggaccgctttactttcagagcccttttgcctggaaagcgctacaccattcagctgaccactctgtccggacttaggggggaagaacaccccaccgagtctctagccactgcccctacccacgtttggacacggccgctacccccagctaacctcaccgctgcccgggtcactgctacttctgcccatgtcgtgtgggacgcccctactccaggctcactcctcgaagcctatgtcatcaacgtaacgactagtcagtcaaccaagtctagatatgtacctaatggaaagttagccagctatacagtgcgagacctattgccaggtcgccgttatcagctttcagtgattgcagttcagtcaaccgaattgggcccacagcactcggagcctgcgcatctttatataatcacgtctcctagggacggcgccgaccgtcggtggcatcagggaggccaccaccctagagtgctcaagaaccggcccccccctgcgcggctccctgaattgaggttactgaacgaccacagtgccccagaaactccgacacagcccccccggttcagcgagctggtggacggccgaggcagggtatccgctcggtttggcgggagccctagtaaggctgctaccgtccgttcccacgttcccgggaattgttcagagaatccatgccaaaacggcgggacgtgcgtccctggagccgacgctcactcatgtgattgcgggcccgggtttaagggccggagatgcgagctagcctgtataaaagtgtcaaggccttgtacacggctctttagcgaaactaaggcattcccagtttgggagggcggtgtttgccaccatgtgaagcagtccaagagccagaccttggagaagtcctag

SEQ ID NO: 36447 - DNA, 4242 bp, Artificial Sequence
  derived and/or modified sequence
atgcgccacggggtcgcctgggcccttctggtggccgccgcattgggcttgggggcgagaggggttcgaggagctgtcgcactagccgacttctatccttttggggctgagagaggcgacgcagtgacacccaaacaagacgacggcggcagcggtctccggccactatctgtacccttcccattctttggagcggagcacagtggactgtatgtgaataacaatgggattattagttttctcaaggaagttagtcagtttacccctgtagcgtttcctatcgctaaagacagatgtgtagtggccgccttctgggcggatgtggacaaccgaagggcgggcgacgtctactacagggaagcgacagatcctgcaatgctgcgcagagccacggaggatgtacggcactactttccagaattactagattttaatgccacatgggtattcgttgctacttggtatcgcgtcaccttctttggcgggtcatcatcatcacccgtgaacacatttcaaacagtgcttattacagatgggaaactgagcttcacaatttttaactacgaatcaatcgtgtggactacaggtactcatgctagctccgggggaaacgcaactggcctgggggggatcgcagcccaagctggttttaatgcaggggacggccagcgatacttctctatccctggtagtcggaccgctgacatggccgaggtggaaaccacaaccaacgtgggggtgcctggcaggtgggcatttcgtatcgatgacgcacaggtgcgagtggggggatgcgggcatactacctcagtctgcctggctttacgtccttgcttaaacggagggaagtgtatagatgactgtgttaccggaaacccctcttatacgtgcagctgcttaagcggtttcactggacgtagatgtcacttggacgtgaacgagtgcgcctcccagccatgccaaaacggtggcacgtgtacccacgggatcaattcctttcgttgtcagtgcccggcaggatttggaggaccaacgtgcgagaccgcccaaagtccatgtgatactaaggaatgccagcacggaggtcagtgccaggtggaaaacggaagcgctgtatgcgtctgccaggccggatacacaggagcagcctgcgagatggatgtagatgactgttctcccgatccttgccttaacggtggttcgtgtgtggaccttgtagggaattatacatgtttgtgcgccgagcctttcaaagggctgagatgtgagacaggagatcaccccgtgcctgatgcgtgccttagcgctccctgccataatgggggtacgtgtgtggatgccgaccaggggtacgtttgcgaatgtcccgaaggtttcatgggtttggactgcagagagagggtgcctgatgattgtgaatgtcggaatggaggccgctgcctgggagcgaatactaccctgtgccaatgtcccctgggctttttcgggttactgtgtgagttcgaaatcacagccatgccatgcaacatgaacacccaatgcccagacgggggatactgcatggaacacggggggagttatttgtgcgtatgccataccgatcataatgccagtcattccctcccttctccttgcgacagcgacccctgcttcaacggcggaagttgcgatgcacacgacgactcatatacctgcgagtgccctagaggattccacggaaagcattgcgaaaaagctcgcccccacctgtgttcttctggtccatgcagaaacggcggaacatgcaaagaagccgggggagaatatcattgctcttgtccttaccgctttactggaaggcattgcgaaataggtaagccagacagttgtgccagcggtccctgtcataacggcggtacctgcttccactatatcggcaagtataaatgcgattgccctccagggttctctggccggcactgcgaaatcgcgccatcaccgtgtttcagatccccttgtgtgaatggaggcacttgtgaagaccgagatactgattttttctgccactgtcaagccggatatatggggcgaagatgccaggctgaagttgattgcggaccaccagaggaggtaaagcatgcaacgctacgttttaacggtacccgactgggagcagtggcgctgtatgcctgtgatcgaggttactcccttagtgcaccctcaaggatcagggtttgccagccacacggcgtgtggtcagaacccccccaatgcttagaaatcgacgaatgtagaagccaaccatgccttcatggcggcagctgtcaggatagagtggccggctatttgtgcctatgttctaccggttacgaaggagcccactgcgagctcgaacgagacgaatgtagagcccatccctgtagaaatggcggatcatgtcgcaatctaccaggagcttatgtgtgccgctgccctgctgggtttgtcggggttcattgcgagaccgaggttgacgcgtgtgactcgagcccttgccaacatgggggacgttgtgaaagtggtgggggtgcctacctgtgtgtgtgccccgaaagcttttttggctaccactgtgagaccgtatcggacccatgtttctctagtccttgcggcggtcgcggttactgtctggcctctaacggatcccattcttgtacatgtaaagtgggttacactggggaagactgtgctaaagaactcttcccaccaacagcattaaagatggaacgggtcgaggaatctggggtctctatttcttggaacccacctaatgggccagcagctcggcagatgctcgatggctatgctgtgacttacgtttccagcgatggatcctaccgccgaaccgacttcgtagaccgcacacgttcctcacatcagctgcaggccttggcagccggacgcgcctataatataagtgttttctccgtaaaaagaaattccaataacaagaatgacatcagtagacccgccgttctgctcgcccgtacccggccacggcccgtagaagggttcgaggtcacaaacgtgacggcttccactatttcagtgcaatgggcactgcatagaattcggcatgcgactgttagtggtgtgagagtgagtattaggcatcccgaggcccttagggaccaagcaacagatgtggacagatctgtggacaggttcacctttcgcgccctcctccccggcaaaagatatacgattcaactgaccacacttagcggccttcgcggtgaagagcatcctaccgagtcactagccacagcccccacccatgtgtggacaaggccccttccccctgcgaacttaacagccgcacgggtgaccgcgacctccgctcatgtggtctgggacgctcccacaccaggaagcttattagaagcctatgttatcaatgtcactaccagccagtcaactaaatctcgttacgtcccaaacggaaaactggcatcctatacagttagagacctcctgccgggccgacggtaccaactctctgttatcgccgtacagagcacagaactgggccctcagcactcggaacccgcacatctttacattattacttccccaagagatggagccgatagaagatggcatcaaggcggtcaccatcccagagtgctcaagaatcgccccccccctgcacgtctgcccgaactgagattgcttaatgatcactccgcccccgagacccccacacagccaccaaggttttccgaactagtagacgggcgcggaagagtctccgctagatttggaggctctcctagcaaggcagctaccgtcaggtcccaaccaaccgcatccgcccaactcgagaacatggaagaggccccaaaacgcgtgagtttggctctgcagctaccagagcacgggtcaaaggacatagggaatgtgcccggcaattgtagcgaaaatccttgtcagaatggaggaacatgcgtccccggagccgacgcccattcatgtgactgtggaccaggatttaaaggacgcaggtgcgaacttgcatgcattaaagtatccagaccctgcacacgactgttcagcgagaccaaggctttcccagtgtgggaagggggagtctgtcaccatgtatataaaagagtttacagagtccaccaggacatctgcttcaaggaatcctgcgagtcaacgagcctgaaaaaaacacctaacagaaagcagagtaaaagccagacccttgaaaaatcctag

SEQ ID NO: 36448 - DNA, 4143 bp, Artificial Sequence
  derived and/or modified sequence
atgagacatggtgtggcttgggcactgctggtggcggccgcgttgggtcttggggcaaggggtgtaaggggcgccgttgccctcgccgatttttaccctttcggcgccgagcggggtgatgcagttacacctaagcaggacgacggaggttctggcttaagaccgctatcagtaccttttcccttcttcggcgccgagcactctggcctttacgtcaacaacaatggaataatctcattcttaaaagaggttagtcagtttaccccggttgctttcccaattgccaaagaccgatgcgttgtggccgcgttctgggccgacgttgataaccggagggccggcgatgtttattatagagaagccaccgatccagctatgcttagaagggccacggaggacgtcagacattattttccagaactcctcgatttcaatgcaacatgggtattcgtcgcgacatggtatcgggtgactttcttcggaggcagttcttcatcacctgttaacaccttccagacagtattgattaccgacggaaagcttagttttacgattttcaactatgaatccattgtttggacaacagggacacacgcctcctctgggggaaacgctactgggttaggtggcattgctgcacaggccggcttcaacgctggggatgggcagcgatacttctctattcctggcagccggaccgcggacatggcggaagtcgagaccaccacgaatgtcggtgtgccaggacgttgggcttttcgaattgatgacgcgcaagtacgcgtaggaggctgcggacataccactagtgtttgcctcgccctcagaccatgcctgaatggtggtaagtgcattgacgattgtgtgaccggaaacccaagctatacatgctcctgtctatctggtttcacaggaaggcgctgtcacttggacgtgaatgaatgcgcgagtcaaccttgtcagaatggaggcacctgtacacacggaatcaatagtttccggtgccagtgtccagccgggttcggaggaccaacgtgcgaaacggctcaatccccatgcgacactaaagagtgtcaacacggcggccaatgtcaagtagagaatggtagtgccgtgtgtgtctgtcaggcaggttacacgggggccgcctgcgagatggatgtcgatgattgttcccctgacccatgtctcaatgggggctcatgtgtggaccttgtcggaaactatacttgtctgtgcgcggaaccttttaaggggctccgctgtgaaacaggcgaccaccctgtaccagatgcttgtttgtctgctccttgccataatggaggcacctgtgttgatgcagaccagggctacgtctgcgaatgtcccgagggatttatgggcctcgactgcagagagagagttcctgacgattgcgaatgccggaatggcggtagatgcttaggagcaaacacgaccttatgtcagtgtcccctcgggtttttcggcttactgtgtgagttcgagattaccgctatgccatgcaatatgaacacccagtgccccgatggcggttactgtatggagcacggaggtagttatctatgcgtctgccacacagatcacaatgcatctcactctctcccaagcccctgtgacagcgacccttgttttaatggtggttcatgtgatgcgcatgatgactcctatacctgtgagtgtccacgcggatttcacggcaagcattgtgagaaggcccggcctcacctctgttcctcaggcccctgtagaaatggcggaacatgtaaagaagctgggggcgaatatcactgttcctgcccctaccggtttacaggacggcactgcgaaatcggcaagcctgattcctgtgcctcaggcccttgccacaatggggggacttgcttccactatatcggaaaatataaatgtgactgccctcccggattttctggacgtcattgcgaaattgcccctagcccttgttttagatctccttgcgttaatggtgggacgtgcgaagatagagataccgattttttctgccactgccaggctgggtatatgggccgcaggtgccaggcggaagtggattgcggccccccagaggaagttaagcacgccaccctccgatttaatggtactcgtctgggggccgtcgctctctatgcatgtgatcgcggatatagtctgtctgcacctagcaggattcgggtttgccaaccgcatggggtctggtctgaaccacctcaatgcctggaaatagacgaatgccggtcccagccttgtctgcacgggggatcatgccaagatcgggtcgccgggtacttatgtctgtgctcaaccggctatgagggggcccactgcgaattggaaagagacgagtgtcgagcccacccatgcagaaatggagggagctgtcgtaacctaccgggcgcatatgtatgtagatgtcctgccggctttgtgggcgtacattgcgaaacagaggttgacgcctgtgactcgagcccttgccaacatggaggcaggtgcgagagcggtggtggggcctatctctgcgtgtgtccagaatcgtttttcggctatcattgcgagacagtctctgacccatgtttcagtagcccatgtggtggcagaggctattgcctggcgtcaaacggaagccatagttgtacttgcaaggtcggctatacaggagaggactgtgccaaagagctctttccaccaaccgccctcaagatggagagagttgaagaaagtggcgtctcaatcagttggaatcctccaaatggtcccgcagccaggcagatgctagatgggtatgctgtcacctatgtcagttcggacgggtcttatcgcagaaccgacttcgtggacaggacccggtcatctcatcagcttcaggctctagccgccggccgcgcctacaatatctcagttttctcagtcaaaagaaactcgaacaataagaatgatatctcccgacctgctgtcctcctggctcgaacccgcccgcggcccgtagagggttttgaggtgaccaatgtgacagcctccactatctcagtacagtgggctctgcatcgcattaggcatgctaccgtttctggtgttcgagtctccataaggcacccagaagcactgagagaccaggccactgatgtggatcgcagcgtggacaggtttacgtttagagcactgctacccgggaagaggtatacgattcaacttacaacgttgtctggactccgcggagaggaacatcccaccgaaagcttggctaccgctcccacccacgtctggacacggccactgccccccgcaaacctcaccgccgcacgcgtaaccgcaacctccgctcacgtcgtgtgggacgctcctacacctggctctttactggaggcatatgtaattaacgtgactactagccagtctacaaagtctcggtacgttcctaacgggaagttagcaagctatacagtccgcgatttacttcctggaagacgctatcagctctccgtaatcgctgtccagagtacagaactcggtccccagcactccgaacccgcacatttgtacatcattacttcacccagggatggtgcagaccgcagatggcaccaaggtggccaccacccaagagtactcaaaaacagaccaccccctgcccgtctgcctgaattgaggctactgaatgatcacagcgcacccgaaacccctacacagccccctcgtttttccgaactcgtcgatggacgcggcagagtgagcgctcgcttcgggggctcaccgtcaaaagccgcaacagtgcgtagccacgtgcccggaaactgttcggaaaacccctgtcagaacggaggcacatgcgtgcctggagctgacgcccactcctgcgactgcgggcccgggttcaagggtagacggtgcgagctggcctgtattaaagtctcgcgtccttgcactcgactgttttccgagacaaaggcgttcccagtgtgggagggaggcgtctgtcatcacgtttacaaaagagtttaccgcgttcatcaggacatttgctttaaggagtcgtgtgaatccacctcattgaaaaaaacaccaaataggaaacagtctaagtcgcagactctggagaaatcttag

SEQ ID NO: 36449 - DNA, 3975 bp, Artificial Sequence
  derived and/or modified sequence
atgagacatggcgttgcttgggccttgctggtagccgctgctctggggctgggcgcgagaggagttcgtggggcggttgctctcgccgatttctatccctttggggcggagaggggcgatgccgttacgcccaaacaggatgacggcggttctggattgcgcccgctgtccgtgccttttcctttcttcggcgctgaacacagtggactgtatgtgaacaataatgggataatcagtttcttgaaagaggtttcacagtttaccccagttgcgtttcctatagccaaagaccgctgcgtggtcgcagccttctgggctgacgtagacaaccgccgcgcaggagacgtctattatagggaagcgaccgatcccgcaatgctcagacgcgctacagaggacgtgcgacactactttccagaactgttagatttcaatgccacttgggtgtttgttgccacttggtatcgagtaacctttttcggcgggagctcctcctctccggtaaatacttttcagactgtattgattaccgacggcaagctcagctttaccatcttcaactatgaatctatcgtatggaccacaggcacacacgcatcttcaggaggtaacgctaccggactcgggggaatcgccgcccaggctgggttcaacgctggcgatggtcagcgctatttctcgatccctggatcacgaacagcagacatggccgaagtcgaaaccactactaatgtgggtgtacccgggcggtgggctttccgtatcgacgatgcccaggtgagggtgggcggatgcggccacactacaagcgtgtgcctggctctgcgaccttgtcttaacggaggaaaatgcattgatgactgtgtgaccggcaatccttcctatacctgcagctgtctctctggctttactggtagaagatgccatctagacgtgaatgaatgcgccagccagccatgtcagaacggaggcacctgcacacatgggattaactcttttaggtgccaatgtccagctggatttgggggacctacctgcgaaacagcccaatctccttgtgatactaaggaatgccagcacgggggacagtgccaagtggaaaacggatccgctgtatgtgtgtgccaagcaggatataccggagccgcatgtgaaatggacgtggacgactgctcccccgatccttgtctcaatggaggctcttgtgtggacctagtaggcaactatacctgtctgtgcgccgaaccgttcaagggacttcgctgtgagaccggcgaccaccccgtgcccgacgcatgtctgtcagcaccttgtcacaatgggggcacatgtgttgacgccgatcaaggttacgtgtgcgagtgtccggaaggtttcatgggcctcgattgcagggagagagttcctgatgactgcgaatgccgaaatggcggaagatgtctaggcgccaacactaccctgtgccaatgccctctaggtttctttggcctcctgtgcgaattcgagattacagcgatgccctgtaacatgaatacccagtgtcccgatggcggctattgtatggaacacggcggctcttatctctgtgtgtgccataccgaccacaatgcttcacactccctaccctccccttgcgattcagacccatgtttcaatggtggatcttgtgatgcccacgacgactcctatacctgtgagtgcccccgaggctttcacggtaagcactgcgaaaaggcacgtcctcacctttgcagttctgggccctgcagaaatggaggaacgtgtaaagaggcaggaggcgaatatcactgttcttgtccttataggtttacaggcagacactgcgaaattggaaaacctgactcatgtgcaagtggtccatgccataacggcggcacctgtttccactacatcggaaagtataagtgtgactgccctccggggtttagcggacgccattgcgaaattgctccaagtccttgcttccgaagcccatgcgttaacggaggaacttgcgaggatagagataccgattttttttgccactgtcaagcagggtacatgggcagacggtgtcaggccgaagtggattgtggtccacccgaagaggtgaaacatgccactctgcgctttaacggaacccggctcggagcagtggccctctatgcatgtgatagaggttacagtttgagcgcaccttcgcgaatccgagtgtgtcagccccacggagtctggtcagaacctccacagtgcctggaaatcgacgaatgcagaagtcagccttgtctgcacgggggtagctgtcaggacagagtggcaggatacctctgcctctgctcaaccggttatgaaggagcccactgcgagctcgaaagagacgaatgtcgcgcacatccatgcaggaacggcggttcctgccgtaatctcccaggggcctacgtttgtcggtgtcccgctggatttgtaggagtgcactgtgaaaccgaagtagatgcgtgtgacagctcaccatgccaacatggcggccgctgtgaatccggtggcggtgcttatctgtgtgtttgtcccgaatcattttttgggtaccattgcgaaacagtctcggacccctgtttcagtagcccttgtggcggccgcggatactgcttagcttccaatgggtctcactcatgcacatgtaaggtcgggtacacgggcgaggactgcgctaaagagcttttcccgccaacagcactaaaaatggagcgggttgaggaatctggcgtttctatttcttggaatccccccaatggacccgccgccagacaaatgttagacggatacgcagttacttacgtgtcgagcgatggctcttacaggcgaacagacttcgtagatcgcacccgttccagccaccagctgcaggcgctcgctgccggacgggcctataatatcagcgtattctctgttaagcggaattccaacaataaaaatgatatctcaagacccgccgtcctccttgctagaacgagacctcgaccggttgagggtttcgaagtcaccaacgtaacagcatccactatctccgtccaatgggcgcttcacaggatccgccacgcaactgtgtctggagtccgcgtgtccatccgccatccagaggctctgagagatcaagcaactgacgtcgatagatcagtggacagatttacctttcgcgccctacttccaggcaagaggtatacgatccaactaacaactttgagcggcctgcggggggaggaacaccctaccgagtctctggccactgcacctacccatgtatggacaaggcccttgccacccgctaaccttaccgcggcacgtgtgacagcaaccagcgctcatgtcgtgtgggatgcaccaacacccggctcactattagaggcttatgttataaatgtgaccacctctcagtccaccaagagtcgatatgtccccaatggaaagctggccagttatacagtgcgggatctcctccctggacgtcgctaccagttgtccgtgatcgccgtacagtcaacggaactcggaccacagcattctgagcccgctcatctttacattattacttcaccccgagacggcgccgatcgacgctggcatcaaggaggccaccaccctagggtcttgaaaaaccgtcctcccccagcacggctccctgagctcagactcctgaacgatcattccgccccagaaactccaacacaacctccaagattcagtgaactcgtagatggaagggggcgagtgtccgccagattcggaggatctccatctaaagcggccaccgtgcgaagccaacccacagccagtgcacagctcgaaaatatggaggaagcccccaagagagtgagtctcgcactgcagctgcccgaacacggatcaaaggatatcggaagtgaatcagccgcactcgtcggaacacttggtctgacagactgttctcaagggccttag

SEQ ID NO: 36450 - DNA, 4059 bp, Artificial Sequence
  derived and/or modified sequence
atgaggcacggagtggcttgggccctcttggtcgcggccgctttgggactgggcgcaaggggggtacgaggggctgtggcattggcagatttttacccttttggcgcagaacgcggtgatgccgtcacccccaaacaagacgacggtggcagtggattacgcccgctaagcgttccgtttcctttctttggggctgaacacagtggcctttacgtaaacaacaatggaatcattagttttctgaaagaagtgagtcagtttacacctgtagccttccccatcgctaaagatagatgcgttgtcgctgccttctgggctgacgtagataaccgacgcgctggcgatgtgtactacagagaagccactgatcccgctatgctgagacgtgcaactgaggatgtccgacattactttccagagctccttgactttaacgctacatgggtcttcgtggccacctggtaccgggtgaccttctttgggggttcctcctcttctccagttaacaccttccagacagtcctgattaccgatggcaaactctcctttacaatcttcaactacgaatctattgtgtggaccaccgggactcacgcatcctcagggggcaacgccacgggactgggaggcatcgccgctcaggcaggcttcaacgctggtgacggccaaagatatttttcgatccctgggagtcgcaccgccgacatggctgaggtcgagaccactactaacgttggcgtcccaggaagatgggcctttcgtattgacgacgcacaagtaagagtagggggctgtggacacaccacttccgtatgcctggcactgcggccttgtctgaacggcggcaaatgtattgatgactgcgtgactggaaatccttcctatacatgctcttgcctgtccgggtttaccgggaggagatgccatctggacgtgaatgagtgtgcttcacaaccctgtcagaatggtggaacctgcacccacggcataaattcctttaggtgtcagtgtcccgcgggttttggtggccccacatgtgaaacggctcagtccccttgcgatacaaaggaatgccagcacggcggccagtgccaagtcgagaatggtagcgcagtgtgtgtgtgtcaggcaggttacacgggagctgcctgtgaaatggatgtggatgactgttcccctgatccctgcttgaatgggggctcctgtgtggatctagtgggaaattacacttgcctatgtgctgaaccctttaaaggccttcgatgcgagaccggagaccatcctgtgcccgatgcatgtcttagtgcaccatgccataacggcggcacatgtgtggacgctgatcagggatacgtctgcgagtgccctgaaggttttatgggcctcgattgcagggaaagagtaccagatgattgtgagtgtaggaatggaggaaggtgtttgggagctaacacaaccctatgccaatgccctctgggcttttttgggttattatgtgagttcgaaattacagccatgccttgtaacatgaatacacagtgccccgatgggggatattgtatggaacatggaggctcctacctgtgtgtatgtcataccgaccataatgcctctcactcattgccatctccatgcgattctgacccctgcttcaatggtggatcatgcgatgcccacgatgactcgtacacatgcgaatgccctagaggcttccacggtaaacattgcgagaaagcccgaccccatctttgtagctctggtccctgtagaaacggcggaacctgtaaggaagcaggtggcgaataccattgtagctgcccatataggttcaccggtagacactgtgaaattggcaaacccgatagttgcgcctccggaccatgccacaacggtgggacatgctttcattacattgggaaatacaaatgcgattgtccaccaggttttagcgggagacattgtgaaatcgccccgtctccatgctttcgaagtccgtgtgtgaacggcggaacctgtgaagaccgagacaccgatttcttttgccactgtcaggcaggatacatgggaagaaggtgccaggcggaagtggactgtggccctcctgaagaggtgaaacatgccacactgcggtttaacggaacaaggcttggtgctgtggctctgtacgcatgtgatcgcggttattcactctcggctccgtcaaggatccgggtctgtcagccacacggcgtctggagcgagcccccccagtgcctcgaaatagatgaatgcaggagtcagccatgtttacacggaggtagctgccaagatagagtagccggttacttatgtctgtgctccacaggatacgagggcgctcattgcgaattggagagggatgaatgtagagcccacccatgccggaacggcgggagttgtagaaacttacctggagcttatgtctgtagatgccccgccgggtttgttggagtacattgtgaaacagaagtggacgcgtgcgattcgtctccttgccaacatggcgggaggtgcgagtctgggggtggcgcttacctttgtgtttgtcccgaaagcttcttcggttaccattgcgaaaccgtttctgacccctgcttctcttcaccctgtggagggcgtgggtactgcttagctagtaacggctctcactcatgcacctgtaaggtgggctataccggcgaggattgcgcaaaagagctgttcccacctactgcgctgaaaatggaacgagtggaagaatcaggggtgagcatctcatggaacccacctaacgggcccgccgcccgacagatgcttgacggctacgctgtgacatatgtttcctctgacggttcctataggcgcactgactttgtggatcggaccagaagctcccaccaattacaagctttagccgcaggccgcgcctataacatatcagttttttctgtgaaacgcaactccaataataagaacgatattagtcgcccggcagtgctcctggcccgaaccaggcctcgcccagtcgaaggttttgaggtcactaacgtaacagcttctaccattagtgtccagtgggctttacatagaattagacacgccactgtgtcaggcgtcagagtcagtattcgacacccagaagctttgcgagaccaggccacagacgtggacaggagtgtggaccgtttcacatttagagctctcttacccggcaagcggtacactatccagttgaccactttaagtggactccgaggcgaagagcacccgaccgagtccctcgcaaccgcccctacacatgtctggacacggccgctacccccagctaacctcaccgctgcccgggtcactgctacttctgcccatgtcgtgtgggacgcccctactccaggctcactcctcgaagcctatgtcatcaacgtaacgactagtcagtcaaccaagtctagatatgtacctaatggaaagttagccagctatacagtgcgagacctattgccaggtcgccgttatcagctttcagtgattgcagttcagtcaaccgaattgggcccacagcactcggagcctgcgcatctttatataatcacgtctcctagggacggggccgaccggcgctggcaccagggcgggcaccatccaagggtattgaagaatcgaccacctcctgccagactacctgaattgagacttctaaacgaccattccgcaccagaaacccccacccagcctccgcgttttagtgaactagtggatggcagaggacgcgtgtcagccagattcggcggttccccaagtaaagctgccactgtccgaagccacgtccccgggaattgttcagaaaacccatgccaaaatggggggacctgtgtgccgggagctgatgcgcactcttgtgactgtgggccgggctttaagggacgccgctgtgaattagcatgtatcaaagtttccagaccatgtacccgactcttttcagaaacgaaggcattcccagtctgggaaggaggagtctgtcatcacgtcaagcagtccaaatcacaaaccctcgaaaagagctag

SEQ ID NO: 36451 - DNA, 4242 bp, Artificial Sequence
  derived and/or modified sequence
atgagacacggcgtggcctgggccctgctggtggccgccgccctgggcctgggcgccagaggcgtgagaggcgccgtggccctggccgacttctaccccttcggcgccgagagaggcgacgccgtgacccccaagcaggacgacggcggcagcggcctgagacccctgagcgtgcccttccccttcttcggcgccgagcacagcggcctgtacgtgaacaacaacggcatcatcagcttcctgaaggaggtgagccagttcacccccgtggccttccccatcgccaaggacagatgcgtggtggccgccttctgggccgacgtggacaacagaagagccggcgacgtgtactacagagaggccaccgaccccgccatgctgagaagagccaccgaggacgtgagacactacttccccgagctgctggacttcaacgccacctgggtgttcgtggccacctggtacagagtgaccttcttcggcggcagcagcagcagccccgtgaacaccttccagaccgtgctgatcaccgacggcaagctgagcttcaccatcttcaactacgagagcatcgtgtggaccaccggcacccacgccagcagcggcggcaacgccaccggcctgggcggcatcgccgcccaggccggcttcaacgccggcgacggccagagatacttcagcatccccggcagcagaaccgccgacatggccgaggtggagaccaccaccaacgtgggcgtgcccggcagatgggccttcagaatcgacgacgcccaggtgagagtgggcggctgcggccacaccaccagcgtgtgcctggccctgagaccctgcctgaacggcggcaagtgcatcgacgactgcgtgaccggcaaccccagctacacctgcagctgcctgagcggcttcaccggcagaagatgccacctggacgtgaacgagtgcgccagccagccctgccagaacggcggcacctgcacccacggcatcaacagcttcagatgccagtgccccgccggcttcggcggccccacctgcgagaccgcccagagcccctgcgacaccaaggagtgccagcacggcggccagtgccaggtggagaacggcagcgccgtgtgcgtgtgccaggccggctacaccggcgccgcctgcgagatggacgtggacgactgcagccccgacccctgcctgaacggcggcagctgcgtggacctggtgggcaactacacctgcctgtgcgccgagcccttcaagggcctgagatgcgagaccggcgaccaccccgtgcccgacgcctgcctgagcgccccctgccacaacggcggcacctgcgtggacgccgaccagggctacgtgtgcgagtgccccgagggcttcatgggcctggactgcagagagagagtgcccgacgactgcgagtgcagaaacggcggcagatgcctgggcgccaacaccaccctgtgccagtgccccctgggcttcttcggcctgctgtgcgagttcgagatcaccgccatgccctgcaacatgaacacccagtgccccgacggcggctactgcatggagcacggcggcagctacctgtgcgtgtgccacaccgaccacaacgccagccacagcctgcccagcccctgcgacagcgacccctgcttcaacggcggcagctgcgacgcccacgacgacagctacacctgcgagtgccccagaggcttccacggcaagcactgcgagaaggccagaccccacctgtgcagcagcggcccctgcagaaacggcggcacctgcaaggaggccggcggcgagtaccactgcagctgcccctacagattcaccggcagacactgcgagatcggcaagcccgacagctgcgccagcggcccctgccacaacggcggcacctgcttccactacatcggcaagtacaagtgcgactgcccccccggcttcagcggcagacactgcgagatcgcccccagcccctgcttcagaagcccctgcgtgaacggcggcacctgcgaggacagagacaccgacttcttctgccactgccaggccggctacatgggcagaagatgccaggccgaggtggactgcggcccccccgaggaggtgaagcacgccaccctgagattcaacggcaccagactgggcgccgtggccctgtacgcctgcgacagaggctacagcctgagcgcccccagcagaatcagagtgtgccagccccacggcgtgtggagcgagcccccccagtgcctggagatcgacgagtgcagaagccagccctgcctgcacggcggcagctgccaggacagagtggccggctacctgtgcctgtgcagcaccggctacgagggcgcccactgcgagctggagagagacgagtgcagagcccacccctgcagaaacggcggcagctgcagaaacctgcccggcgcctacgtgtgcagatgccccgccggcttcgtgggcgtgcactgcgagaccgaggtggacgcctgcgacagcagcccctgccagcacggcggcagatgcgagagcggcggcggcgcctacctgtgcgtgtgccccgagagcttcttcggctaccactgcgagaccgtgagcgacccctgcttcagcagcccctgcggcggcagaggctactgcctggccagcaacggcagccacagctgcacctgcaaggtgggctacaccggcgaggactgcgccaaggagctgttcccccccaccgccctgaagatggagagagtggaggagagcggcgtgagcatcagctggaacccccccaacggccccgccgccagacagatgctggacggctacgccgtgacctacgtgagcagcgacggcagctacagaagaaccgacttcgtggacagaaccagaagcagccaccagctgcaggccctggccgccggcagagcctacaacatcagcgtgttcagcgtgaagagaaacagcaacaacaagaacgacatcagcagacccgccgtgctgctggccagaaccagacccagacccgtggagggcttcgaggtgaccaacgtgaccgccagcaccatcagcgtgcagtgggccctgcacagaatcagacacgccaccgtgagcggcgtgagagtgagcatcagacaccccgaggccctgagagaccaggccaccgacgtggacagaagcgtggacagattcaccttcagagccctgctgcccggcaagagatacaccatccagctgaccaccctgagcggcctgagaggcgaggagcaccccaccgagagcctggccaccgcccccacccacgtgtggaccagacccctgccccccgccaacctgaccgccgccagagtgaccgccaccagcgcccacgtggtgtgggacgcccccacccccggcagcctgctggaggcctacgtgatcaacgtgaccaccagccagagcaccaagagcagatacgtgcccaacggcaagctggccagctacaccgtgagagacctgctgcccggcagaagataccagctgagcgtgatcgccgtgcagagcaccgagctgggcccccagcacagcgagcccgcccacctgtacatcatcaccagccccagagacggcgccgacagaagatggcaccagggcggccaccaccccagagtgctgaagaacagacccccccccgccagactgcccgagctgagactgctgaacgaccacagcgcccccgagacccccacccagccccccagattcagcgagctggtggacggcagaggcagagtgagcgccagattcggcggcagccccagcaaggccgccaccgtgagaagccagcccaccgccagcgcccagctggagaacatggaggaggcccccaagagagtgagcctggccctgcagctgcccgagcacggcagcaaggacatcggcaacgtgcccggcaactgcagcgagaacccctgccagaacggcggcacctgcgtgcccggcgccgacgcccacagctgcgactgcggccccggcttcaagggcagaagatgcgagctggcctgcatcaaggtgagcagaccctgcaccagactgttcagcgagaccaaggccttccccgtgtgggagggcggcgtgtgccaccacgtgtacaagagagtgtacagagtgcaccaggacatctgcttcaaggagagctgcgagagcaccagcctgaagaagacccccaacagaaagcagagcaagagccagaccctggagaagagctag

SEQ ID NO: 36452 - DNA, 4143 bp, Artificial Sequence
  derived and/or modified sequence
atgagacacggcgtggcctgggccctgctggtggccgccgccctgggcctgggcgccagaggcgtgagaggcgccgtggccctggccgacttctaccccttcggcgccgagagaggcgacgccgtgacccccaagcaggacgacggcggcagcggcctgagacccctgagcgtgcccttccccttcttcggcgccgagcacagcggcctgtacgtgaacaacaacggcatcatcagcttcctgaaggaggtgagccagttcacccccgtggccttccccatcgccaaggacagatgcgtggtggccgccttctgggccgacgtggacaacagaagagccggcgacgtgtactacagagaggccaccgaccccgccatgctgagaagagccaccgaggacgtgagacactacttccccgagctgctggacttcaacgccacctgggtgttcgtggccacctggtacagagtgaccttcttcggcggcagcagcagcagccccgtgaacaccttccagaccgtgctgatcaccgacggcaagctgagcttcaccatcttcaactacgagagcatcgtgtggaccaccggcacccacgccagcagcggcggcaacgccaccggcctgggcggcatcgccgcccaggccggcttcaacgccggcgacggccagagatacttcagcatccccggcagcagaaccgccgacatggccgaggtggagaccaccaccaacgtgggcgtgcccggcagatgggccttcagaatcgacgacgcccaggtgagagtgggcggctgcggccacaccaccagcgtgtgcctggccctgagaccctgcctgaacggcggcaagtgcatcgacgactgcgtgaccggcaaccccagctacacctgcagctgcctgagcggcttcaccggcagaagatgccacctggacgtgaacgagtgcgccagccagccctgccagaacggcggcacctgcacccacggcatcaacagcttcagatgccagtgccccgccggcttcggcggccccacctgcgagaccgcccagagcccctgcgacaccaaggagtgccagcacggcggccagtgccaggtggagaacggcagcgccgtgtgcgtgtgccaggccggctacaccggcgccgcctgcgagatggacgtggacgactgcagccccgacccctgcctgaacggcggcagctgcgtggacctggtgggcaactacacctgcctgtgcgccgagcccttcaagggcctgagatgcgagaccggcgaccaccccgtgcccgacgcctgcctgagcgccccctgccacaacggcggcacctgcgtggacgccgaccagggctacgtgtgcgagtgccccgagggcttcatgggcctggactgcagagagagagtgcccgacgactgcgagtgcagaaacggcggcagatgcctgggcgccaacaccaccctgtgccagtgccccctgggcttcttcggcctgctgtgcgagttcgagatcaccgccatgccctgcaacatgaacacccagtgccccgacggcggctactgcatggagcacggcggcagctacctgtgcgtgtgccacaccgaccacaacgccagccacagcctgcccagcccctgcgacagcgacccctgcttcaacggcggcagctgcgacgcccacgacgacagctacacctgcgagtgccccagaggcttccacggcaagcactgcgagaaggccagaccccacctgtgcagcagcggcccctgcagaaacggcggcacctgcaaggaggccggcggcgagtaccactgcagctgcccctacagattcaccggcagacactgcgagatcggcaagcccgacagctgcgccagcggcccctgccacaacggcggcacctgcttccactacatcggcaagtacaagtgcgactgcccccccggcttcagcggcagacactgcgagatcgcccccagcccctgcttcagaagcccctgcgtgaacggcggcacctgcgaggacagagacaccgacttcttctgccactgccaggccggctacatgggcagaagatgccaggccgaggtggactgcggcccccccgaggaggtgaagcacgccaccctgagattcaacggcaccagactgggcgccgtggccctgtacgcctgcgacagaggctacagcctgagcgcccccagcagaatcagagtgtgccagccccacggcgtgtggagcgagcccccccagtgcctggagatcgacgagtgcagaagccagccctgcctgcacggcggcagctgccaggacagagtggccggctacctgtgcctgtgcagcaccggctacgagggcgcccactgcgagctggagagagacgagtgcagagcccacccctgcagaaacggcggcagctgcagaaacctgcccggcgcctacgtgtgcagatgccccgccggcttcgtgggcgtgcactgcgagaccgaggtggacgcctgcgacagcagcccctgccagcacggcggcagatgcgagagcggcggcggcgcctacctgtgcgtgtgccccgagagcttcttcggctaccactgcgagaccgtgagcgacccctgcttcagcagcccctgcggcggcagaggctactgcctggccagcaacggcagccacagctgcacctgcaaggtgggctacaccggcgaggactgcgccaaggagctgttcccccccaccgccctgaagatggagagagtggaggagagcggcgtgagcatcagctggaacccccccaacggccccgccgccagacagatgctggacggctacgccgtgacctacgtgagcagcgacggcagctacagaagaaccgacttcgtggacagaaccagaagcagccaccagctgcaggccctggccgccggcagagcctacaacatcagcgtgttcagcgtgaagagaaacagcaacaacaagaacgacatcagcagacccgccgtgctgctggccagaaccagacccagacccgtggagggcttcgaggtgaccaacgtgaccgccagcaccatcagcgtgcagtgggccctgcacagaatcagacacgccaccgtgagcggcgtgagagtgagcatcagacaccccgaggccctgagagaccaggccaccgacgtggacagaagcgtggacagattcaccttcagagccctgctgcccggcaagagatacaccatccagctgaccaccctgagcggcctgagaggcgaggagcaccccaccgagagcctggccaccgcccccacccacgtgtggaccagacccctgccccccgccaacctgaccgccgccagagtgaccgccaccagcgcccacgtggtgtgggacgcccccacccccggcagcctgctggaggcctacgtgatcaacgtgaccaccagccagagcaccaagagcagatacgtgcccaacggcaagctggccagctacaccgtgagagacctgctgcccggcagaagataccagctgagcgtgatcgccgtgcagagcaccgagctgggcccccagcacagcgagcccgcccacctgtacatcatcaccagccccagagacggcgccgacagaagatggcaccagggcggccaccaccccagagtgctgaagaacagacccccccccgccagactgcccgagctgagactgctgaacgaccacagcgcccccgagacccccacccagccccccagattcagcgagctggtggacggcagaggcagagtgagcgccagattcggcggcagccccagcaaggccgccaccgtgagaagccacgtgcccggcaactgcagcgagaacccctgccagaacggcggcacctgcgtgcccggcgccgacgcccacagctgcgactgcggccccggcttcaagggcagaagatgcgagctggcctgcatcaaggtgagcagaccctgcaccagactgttcagcgagaccaaggccttccccgtgtgggagggcggcgtgtgccaccacgtgtacaagagagtgtacagagtgcaccaggacatctgcttcaaggagagctgcgagagcaccagcctgaagaagacccccaacagaaagcagagcaagagccagaccctggagaagagctag

SEQ ID NO: 36453 - DNA, 8174 bp, Artificial Sequence
  derived and/or modified sequence
atgcggcacggcgtcgcctgggcgctgctggtggccgcggccctggggcttggggcgcgcggggtgcgcggcgcggtggcccttgccgacttctacccgttcggcgccgagcgcggcgacgccgtcacccccaagcaggacgacggcggctcggggctgcggccgctctcggtgcccttcccgttcttcggtgccgagcactccggactctacgtgaacaacaacgggatcatctccttcctgaaggaggtttctcagttcaccccagtggccttccccattgccaaggaccgctgcgtggtggcagccttctgggcagatgtggacaaccggcgtgcaggcgacgtgtactaccgggaggccaccgacccagccatgctgcgccgagccacggaggacgtcaggcactacttccccgagctcctggacttcaatgccacctgggtttttgttgccacctggtaccgagtgaccttctttggaggcagttcctcatcccctgtcaacacattccagactgtgctcatcacagacggcaagctctccttcaccatcttcaactatgagtccatcgtgtggaccacaggcacacacgccagcagcgggggcaacgccactggcctcgggggcatcgcagcccaggctggcttcaacgcaggcgatgggcagcgttacttcagtatccccggctcgcgcacagcagacatggccgaggtggagaccaccaccaacgtgggtgtgcccgggcgctgggcgttcagaatcgatgatgcccaggtgcgcgtggggggctgcggccatacaacgtccgtgtgcctggccctgcgcccctgcctcaacggcggcaagtgcatcgacgactgcgtcacgggcaacccctcctacacctgctcctgcctctcgggcttcacggggcggaggtgccacctggacgtgaacgaatgtgcctcccagccctgtcagaatggtgggacctgtactcacggcatcaacagtttccgctgccagtgcccggctggctttgggggacccacctgtgagacagcccaatccccctgtgacaccaaagagtgtcaacatggtggccagtgccaggtggagaatggctctgcggtgtgtgtgtgccaggccggatacaccggagcagcctgcgagatggatgtggacgactgcagccctgacccctgcctgaatggaggctcttgtgttgacctagtggggaattacacctgcttgtgtgccgagcccttcaagggacttcgctgtgagacaggagaccatccagtgccagacgcctgcctctcggccccttgccacaatgggggcacctgtgtggatgcggaccagggctacgtgtgcgagtgccccgaaggcttcatgggcctggactgcagggagagagtccccgatgactgtgagtgccgcaacggaggcagatgcctgggcgccaacaccaccctctgccagtgccccctgggattctttgggcttctctgtgaatttgaaatcacagccatgccctgcaacatgaacacacagtgcccagatgggggctactgcatggagcacggcgggagctacctctgcgtctgccacaccgaccacaatgccagccactccctgccatcaccctgcgactcggacccctgcttcaacggaggctcctgcgatgcccatgacgactcctacacctgcgagtgcccgcgcgggttccacggcaagcactgcgagaaagcccggccacacctgtgcagctcagggccctgccggaacgggggcacgtgcaaggaggcgggcggcgagtaccactgcagctgcccctaccgcttcactgggaggcactgtgagatcgggaagccagactcgtgtgcctctggcccctgtcacaacggcggcacctgcttccactacattggcaaatacaagtgtgactgtcccccaggcttctccgggcggcactgcgagatagccccctccccctgcttccggagcccgtgtgtgaatgggggcacctgcgaggaccgggacacggatttcttctgccactgccaagcagggtacatgggacgccggtgccaggcagaggtggactgcggccccccggaggaggtgaagcacgccacactgcgcttcaacggcacgcggctgggcgcggtggccctgtatgcatgtgaccgtggctacagcctgagcgcccccagccgcatccgggtctgccagccacacggtgtctggagtgagcctccccagtgccttgaaatcgatgagtgccggtctcagccgtgcctgcatgggggctcttgtcaggaccgcgttgctgggtacctgtgcctctgcagcacaggctatgagggcgcccactgtgagctggagagggatgagtgccgagctcacccgtgcagaaatggagggtcctgcaggaacctcccaggggcctatgtctgccggtgccctgcaggcttcgttggagtccactgtgagacagaggtggacgcctgcgactccagcccctgccagcatggaggccggtgtgagagcggcggcggggcctacctgtgcgtctgcccagagagcttcttcggctaccactgcgagacagtgagtgacccctgcttctccagcccctgtgggggccgtggctattgcctggccagcaacggctcccacagctgcacctgcaaagtgggctacacgggcgaggactgcgccaaagagctcttcccaccgacggccctcaagatggagagagtggaggagagtggggtctctatctcctggaacccgcccaatggtccagccgccaggcagatgcttgatggctacgcggtcacctacgtctcctccgacggctcctaccgccgcacagactttgtggacaggacccgctcctcgcaccagctccaggccctggcggccggcagggcctacaacatctccgtcttctcagtgaagcgaaacagtaacaacaagaatgacatcagcaggcctgccgtgctgctggcccgcacgcgaccccgccctgtggaaggcttcgaggtcaccaatgtgacggctagcaccatctcagtgcagtgggccctgcacaggatccgccatgccaccgtcagtggggtccgtgtgtccatccgccaccctgaggccctcagggaccaggccaccgatgtggacaggagtgtggacaggttcacctttagggccctgctgcctgggaagaggtacaccatccagctgaccaccctcagtgggctcaggggagaggagcaccccacagagagcctggccaccgcgccgacgcacgtgtggacccggcccctgcctccagcaaacctgaccgccgcccgagtcactgccacctctgcccacgtggtctgggatgccccgactccaggcagcttgctggaggcttatgtcatcaatgtgaccaccagccagagcaccaagagccgctatgtccccaacgggaagctggcgtcctacacggtgcgcgacctgctgccgggacggcggtaccagctctctgtgatagcagtgcagagcacggagctcgggccgcagcacagcgagcccgcccacctctacatcatcacctcccccagggatggcgctgacagacgctggcaccagggaggacaccaccctcgggtgctcaagaacagaccgcccccggcgcgcctgccggagctgcgcctgctcaatgaccacagcgcccccgagacccccacccagccccccaggttctcggagcttgtggacggcagaggaagagtgagcgccaggttcggtggctcacccagcaaagcagccaccgtgagatcacaacccacagcctcggcgcagctcgagaacatggaggaagcccccaagcgggtcagcctggccctccagctccctgaacacggcagcaaggacatcggaaacgtccctggcaactgttcagaaaacccctgtcagaacggaggcacttgtgtgccgggcgcagacgcccacagctgtgactgcgggccagggttcaaaggcagacgctgcgagctcgcctgtataaaggtgtcccgcccctgcacaaggctgttctccgagacaaaggcctttccagtctgggagggaggcgtctgtcaccacgtgtataaaagagtctaccgagttcaccaagacatctgcttcaaagagagctgtgaaagcacaagcctcaagaagaccccaaacaggaaacaaagtaagagtcagacactggagaaatcttaaggatttaagacgttcttgttacactccaccaacctcacgagtttctaacacccaggaagatgaggtctaaaaactggatgaaaaaggacaccctgagaaaaggtcctagctggagtcagtcccctctgtgacctctctcctcaggcctctagaggacagatggccaggcctgtgcacacaccagcccaccctgagagacccctctgggaccaaccacctgtgagtcctgcgatgcgtttaagcagcctgtgccctcacccaagctgcagttcctgaaggtgtagtctgtgtctctgcggatgagatgacagctcgccattccccggaatcagtgaggctgtcagtcagccacgcttctgcagtatgcagaaacctgttcttagactccaaagccagagaaagaattctcccttcgaggcccaacaaattgagaaggaactgtgatggaccacttccaaaacagagacgggggcaggggctgaagggcagagaccaggtgatgtcagaaggaaagccgggttgcagacacagccgcccctgctctggtcctccagcgtgtttatgacgctcgtgcaggtcgacgagccatcctatggactagttaacactaaggtggagttcagacttttttagacaacggcgcgactggcagcctttctctatcaagggtcagacggtaaacgttttcagctttgcagaccagaggtccctgtggctacagtagcgcagacacagccacaggcatgtcattgaatggctgcggctatgttccaataaaaacttatttacaataacaggtggtggccaaattggcccatgggccttatttggtgaaccctgttctatgagatcacctaggcttcagccttaaacagtggaagccatcccctgaatgacaagtcacaagggtatcaaagaaagacccctgaattttcatggaaaaagctattcagacccctgcttggaaagctaaggcacactgccacgaagcagcaaggacgccttacaagtctcagtgcaacagagatggacacctgggctgggctggacaatgtttaaggttccttttagtccatgactcaagtgatactgttttaggctatcaggtagtaaacacgatcttagacatccccatctttgtaagcagaacagtacggcacttcaccacatctgcttcccaccatgcttctaagcagctgtcttccccctgctaatgttacaaccaaagcagccaccccacctcctctcgtgttgagcctcacgaccgctgacccagctggaaagccagcgccctgccgcgtcaccctgactctgctcagagccagcattccagccacaaagagggcctccttcctttcctctttcataaaaatgttttttgaagagttagagtatattttaggctttttatctttattaaaatttcatgtgcatgtgtctgtgtattctgcaatttgtcattttcagaaagaaggaacaggcaattcgcgaagtttcacctgtactcccgagctgttccccaggctccagacccacttgagagcagaaggtggagctcaatgaagggtctcgagctcagcgaagggtcactgggtgaactgagagaaaccacgttcacaaacgcgtactgcggacttcctgccgccctgggacctgtcactgtttgtccatgtaagctacagcattactagcagatgctaagatcgagtgatatcactggaaaagtaggtgaatcctactaggaaactttctactccctactaggacctcaagcccctcagccacacagcaaatgctaatatgctccagtgttagcttagaagccttgtgtcaacaagaactggctcctgagtcccaagcttggtgccacacagcaaatgctaatatgctccagtgttagcttagaagccttgtgtcaacaagaactggctcctgagtcccaagcttggtgccacacagcaaatgctaatatgctccagtgttagcttagaagccttgtgtcaacaagaactggctcctgagtcccaagtgctgtcacaggacttgcccattgggatgttttccacattaaatatcaagtaaaaagacttcctggtgctcaggaattacagttcgttcttgaaacattccaaagaggccaccacagcttttcccatgtggcttcttttaaaaactcaaatggcttccttgaaaatactcaaagtccacccaaggaaattagtaataatagaatcagaaaactgtcaggagcataaagatttctgtatcaaaatgaaagaagcaatcctgagttgctgaattacccatctgctaatgaaaccgggatggactgatcatctaaccaagtgcagactgaggattctacttagtcctccgactgggtacaacaacagcctaggttctagggagggtggcagtgaccgggatgccacaatggaagagaaaatgaaaacactggcacagtgaaatgtctcatttccaaacagttttgcctatggccaagcaaggcaataaagacaaactctcccttttccccattgcgtgtgggctgccaggtacaagtaagggaatctttgctgtgcccactgtcctccagtagagaacccaacaggcaagggccccactcaggtatcagctcacctcctgcacctccccttagcaggaactccttccactggcaaaggactgccactgccatctgactcaactgtggcgatgtggacggagtcaccgagctgcttttcttttgcaaaacaaaagtctttttctttgcagtcacgctgtaagacgaggctgctggagaaaacaaaagcacctagatttcagtgctgaatccccacaattgcatgcagctcacacctaccaggggtattccagtgcataggggaaaggaacccggctgaaaaaccagctccttatttttcttttaaataaaataatacgatcctaagtccatttaccatctgaagttgtcacgagtgaacagtcacattactgttgtggaccaggccttagatgagtttctcaggctcagcactgacattctgggccggatcatcctctcttgtgggaccatcctgtgcactgcaggatgtttcacagcacccctggcctctacccactagaatcctacaatctaccagatcctaggatctagttgatcctagaatgctaccaaggagacttgaattttggtcccatcatcaaaaatgccttctgcatcaatcctatgccagtttcccctaaaagagggctaactggaatgttctaggatgtaccaatcctccaggaccctcttagagctcatgccatcagagacaggcctctatctcagggatcaccccggctgacatcaaattcctcttctcttttcccaacatttcaaattgttcttcggactcattgagttccctaaggtgacacgcccccccccccccccacacccaccttggggggtcacggattgctccctgtggccctggcttcagcccacctgctccatgaccctatgctcttctcctctggttctcgaagctgtctgtaaccagggcaggggagataactgtatgggaccattccctggcctccacctgccccagcactctccaggccagcacagtctggcactacagactacagggccggagacaccaggcttggaagtgaccactggccaagagctgacataaaagccaacttccccaaacaggaagggcctgttcttcacaaagataaagaaaactgccagcattttgctggccttaagaagccatgcaaaattaaccagtacatcatgaattaacttcttttactctgctgtgcactgaataccattatgaagcaatatacttttggattaaaaataagcatttttgtggaaaatctgctacatgttttcataaaataaagtgctatgatgtactaaaacctca

SEQ ID NO: 36454 - DNA, 3975 bp, Artificial Sequence
  derived and/or modified sequence
atgagacacggcgtggcctgggccctgctggtggccgccgccctgggcctgggcgccagaggcgtgagaggcgccgtggccctggccgacttctaccccttcggcgccgagagaggcgacgccgtgacccccaagcaggacgacggcggcagcggcctgagacccctgagcgtgcccttccccttcttcggcgccgagcacagcggcctgtacgtgaacaacaacggcatcatcagcttcctgaaggaggtgagccagttcacccccgtggccttccccatcgccaaggacagatgcgtggtggccgccttctgggccgacgtggacaacagaagagccggcgacgtgtactacagagaggccaccgaccccgccatgctgagaagagccaccgaggacgtgagacactacttccccgagctgctggacttcaacgccacctgggtgttcgtggccacctggtacagagtgaccttcttcggcggcagcagcagcagccccgtgaacaccttccagaccgtgctgatcaccgacggcaagctgagcttcaccatcttcaactacgagagcatcgtgtggaccaccggcacccacgccagcagcggcggcaacgccaccggcctgggcggcatcgccgcccaggccggcttcaacgccggcgacggccagagatacttcagcatccccggcagcagaaccgccgacatggccgaggtggagaccaccaccaacgtgggcgtgcccggcagatgggccttcagaatcgacgacgcccaggtgagagtgggcggctgcggccacaccaccagcgtgtgcctggccctgagaccctgcctgaacggcggcaagtgcatcgacgactgcgtgaccggcaaccccagctacacctgcagctgcctgagcggcttcaccggcagaagatgccacctggacgtgaacgagtgcgccagccagccctgccagaacggcggcacctgcacccacggcatcaacagcttcagatgccagtgccccgccggcttcggcggccccacctgcgagaccgcccagagcccctgcgacaccaaggagtgccagcacggcggccagtgccaggtggagaacggcagcgccgtgtgcgtgtgccaggccggctacaccggcgccgcctgcgagatggacgtggacgactgcagccccgacccctgcctgaacggcggcagctgcgtggacctggtgggcaactacacctgcctgtgcgccgagcccttcaagggcctgagatgcgagaccggcgaccaccccgtgcccgacgcctgcctgagcgccccctgccacaacggcggcacctgcgtggacgccgaccagggctacgtgtgcgagtgccccgagggcttcatgggcctggactgcagagagagagtgcccgacgactgcgagtgcagaaacggcggcagatgcctgggcgccaacaccaccctgtgccagtgccccctgggcttcttcggcctgctgtgcgagttcgagatcaccgccatgccctgcaacatgaacacccagtgccccgacggcggctactgcatggagcacggcggcagctacctgtgcgtgtgccacaccgaccacaacgccagccacagcctgcccagcccctgcgacagcgacccctgcttcaacggcggcagctgcgacgcccacgacgacagctacacctgcgagtgccccagaggcttccacggcaagcactgcgagaaggccagaccccacctgtgcagcagcggcccctgcagaaacggcggcacctgcaaggaggccggcggcgagtaccactgcagctgcccctacagattcaccggcagacactgcgagatcggcaagcccgacagctgcgccagcggcccctgccacaacggcggcacctgcttccactacatcggcaagtacaagtgcgactgcccccccggcttcagcggcagacactgcgagatcgcccccagcccctgcttcagaagcccctgcgtgaacggcggcacctgcgaggacagagacaccgacttcttctgccactgccaggccggctacatgggcagaagatgccaggccgaggtggactgcggcccccccgaggaggtgaagcacgccaccctgagattcaacggcaccagactgggcgccgtggccctgtacgcctgcgacagaggctacagcctgagcgcccccagcagaatcagagtgtgccagccccacggcgtgtggagcgagcccccccagtgcctggagatcgacgagtgcagaagccagccctgcctgcacggcggcagctgccaggacagagtggccggctacctgtgcctgtgcagcaccggctacgagggcgcccactgcgagctggagagagacgagtgcagagcccacccctgcagaaacggcggcagctgcagaaacctgcccggcgcctacgtgtgcagatgccccgccggcttcgtgggcgtgcactgcgagaccgaggtggacgcctgcgacagcagcccctgccagcacggcggcagatgcgagagcggcggcggcgcctacctgtgcgtgtgccccgagagcttcttcggctaccactgcgagaccgtgagcgacccctgcttcagcagcccctgcggcggcagaggctactgcctggccagcaacggcagccacagctgcacctgcaaggtgggctacaccggcgaggactgcgccaaggagctgttcccccccaccgccctgaagatggagagagtggaggagagcggcgtgagcatcagctggaacccccccaacggccccgccgccagacagatgctggacggctacgccgtgacctacgtgagcagcgacggcagctacagaagaaccgacttcgtggacagaaccagaagcagccaccagctgcaggccctggccgccggcagagcctacaacatcagcgtgttcagcgtgaagagaaacagcaacaacaagaacgacatcagcagacccgccgtgctgctggccagaaccagacccagacccgtggagggcttcgaggtgaccaacgtgaccgccagcaccatcagcgtgcagtgggccctgcacagaatcagacacgccaccgtgagcggcgtgagagtgagcatcagacaccccgaggccctgagagaccaggccaccgacgtggacagaagcgtggacagattcaccttcagagccctgctgcccggcaagagatacaccatccagctgaccaccctgagcggcctgagaggcgaggagcaccccaccgagagcctggccaccgcccccacccacgtgtggaccagacccctgccccccgccaacctgaccgccgccagagtgaccgccaccagcgcccacgtggtgtgggacgcccccacccccggcagcctgctggaggcctacgtgatcaacgtgaccaccagccagagcaccaagagcagatacgtgcccaacggcaagctggccagctacaccgtgagagacctgctgcccggcagaagataccagctgagcgtgatcgccgtgcagagcaccgagctgggcccccagcacagcgagcccgcccacctgtacatcatcaccagccccagagacggcgccgacagaagatggcaccagggcggccaccaccccagagtgctgaagaacagacccccccccgccagactgcccgagctgagactgctgaacgaccacagcgcccccgagacccccacccagccccccagattcagcgagctggtggacggcagaggcagagtgagcgccagattcggcggcagccccagcaaggccgccaccgtgagaagccagcccaccgccagcgcccagctggagaacatggaggaggcccccaagagagtgagcctggccctgcagctgcccgagcacggcagcaaggacatcggcagcgagagcgccgccctggtgggcaccctgggcctgaccgactgcagccagggcccctag

SEQ ID NO: 36455 - DNA, 4059 bp, Artificial Sequence
  derived and/or modified sequence
atgagacacggcgtggcctgggccctgctggtggccgccgccctgggcctgggcgccagaggcgtgagaggcgccgtggccctggccgacttctaccccttcggcgccgagagaggcgacgccgtgacccccaagcaggacgacggcggcagcggcctgagacccctgagcgtgcccttccccttcttcggcgccgagcacagcggcctgtacgtgaacaacaacggcatcatcagcttcctgaaggaggtgagccagttcacccccgtggccttccccatcgccaaggacagatgcgtggtggccgccttctgggccgacgtggacaacagaagagccggcgacgtgtactacagagaggccaccgaccccgccatgctgagaagagccaccgaggacgtgagacactacttccccgagctgctggacttcaacgccacctgggtgttcgtggccacctggtacagagtgaccttcttcggcggcagcagcagcagccccgtgaacaccttccagaccgtgctgatcaccgacggcaagctgagcttcaccatcttcaactacgagagcatcgtgtggaccaccggcacccacgccagcagcggcggcaacgccaccggcctgggcggcatcgccgcccaggccggcttcaacgccggcgacggccagagatacttcagcatccccggcagcagaaccgccgacatggccgaggtggagaccaccaccaacgtgggcgtgcccggcagatgggccttcagaatcgacgacgcccaggtgagagtgggcggctgcggccacaccaccagcgtgtgcctggccctgagaccctgcctgaacggcggcaagtgcatcgacgactgcgtgaccggcaaccccagctacacctgcagctgcctgagcggcttcaccggcagaagatgccacctggacgtgaacgagtgcgccagccagccctgccagaacggcggcacctgcacccacggcatcaacagcttcagatgccagtgccccgccggcttcggcggccccacctgcgagaccgcccagagcccctgcgacaccaaggagtgccagcacggcggccagtgccaggtggagaacggcagcgccgtgtgcgtgtgccaggccggctacaccggcgccgcctgcgagatggacgtggacgactgcagccccgacccctgcctgaacggcggcagctgcgtggacctggtgggcaactacacctgcctgtgcgccgagcccttcaagggcctgagatgcgagaccggcgaccaccccgtgcccgacgcctgcctgagcgccccctgccacaacggcggcacctgcgtggacgccgaccagggctacgtgtgcgagtgccccgagggcttcatgggcctggactgcagagagagagtgcccgacgactgcgagtgcagaaacggcggcagatgcctgggcgccaacaccaccctgtgccagtgccccctgggcttcttcggcctgctgtgcgagttcgagatcaccgccatgccctgcaacatgaacacccagtgccccgacggcggctactgcatggagcacggcggcagctacctgtgcgtgtgccacaccgaccacaacgccagccacagcctgcccagcccctgcgacagcgacccctgcttcaacggcggcagctgcgacgcccacgacgacagctacacctgcgagtgccccagaggcttccacggcaagcactgcgagaaggccagaccccacctgtgcagcagcggcccctgcagaaacggcggcacctgcaaggaggccggcggcgagtaccactgcagctgcccctacagattcaccggcagacactgcgagatcggcaagcccgacagctgcgccagcggcccctgccacaacggcggcacctgcttccactacatcggcaagtacaagtgcgactgcccccccggcttcagcggcagacactgcgagatcgcccccagcccctgcttcagaagcccctgcgtgaacggcggcacctgcgaggacagagacaccgacttcttctgccactgccaggccggctacatgggcagaagatgccaggccgaggtggactgcggcccccccgaggaggtgaagcacgccaccctgagattcaacggcaccagactgggcgccgtggccctgtacgcctgcgacagaggctacagcctgagcgcccccagcagaatcagagtgtgccagccccacggcgtgtggagcgagcccccccagtgcctggagatcgacgagtgcagaagccagccctgcctgcacggcggcagctgccaggacagagtggccggctacctgtgcctgtgcagcaccggctacgagggcgcccactgcgagctggagagagacgagtgcagagcccacccctgcagaaacggcggcagctgcagaaacctgcccggcgcctacgtgtgcagatgccccgccggcttcgtgggcgtgcactgcgagaccgaggtggacgcctgcgacagcagcccctgccagcacggcggcagatgcgagagcggcggcggcgcctacctgtgcgtgtgccccgagagcttcttcggctaccactgcgagaccgtgagcgacccctgcttcagcagcccctgcggcggcagaggctactgcctggccagcaacggcagccacagctgcacctgcaaggtgggctacaccggcgaggactgcgccaaggagctgttcccccccaccgccctgaagatggagagagtggaggagagcggcgtgagcatcagctggaacccccccaacggccccgccgccagacagatgctggacggctacgccgtgacctacgtgagcagcgacggcagctacagaagaaccgacttcgtggacagaaccagaagcagccaccagctgcaggccctggccgccggcagagcctacaacatcagcgtgttcagcgtgaagagaaacagcaacaacaagaacgacatcagcagacccgccgtgctgctggccagaaccagacccagacccgtggagggcttcgaggtgaccaacgtgaccgccagcaccatcagcgtgcagtgggccctgcacagaatcagacacgccaccgtgagcggcgtgagagtgagcatcagacaccccgaggccctgagagaccaggccaccgacgtggacagaagcgtggacagattcaccttcagagccctgctgcccggcaagagatacaccatccagctgaccaccctgagcggcctgagaggcgaggagcaccccaccgagagcctggccaccgcccccacccacgtgtggaccagacccctgccccccgccaacctgaccgccgccagagtgaccgccaccagcgcccacgtggtgtgggacgcccccacccccggcagcctgctggaggcctacgtgatcaacgtgaccaccagccagagcaccaagagcagatacgtgcccaacggcaagctggccagctacaccgtgagagacctgctgcccggcagaagataccagctgagcgtgatcgccgtgcagagcaccgagctgggcccccagcacagcgagcccgcccacctgtacatcatcaccagccccagagacggcgccgacagaagatggcaccagggcggccaccaccccagagtgctgaagaacagacccccccccgccagactgcccgagctgagactgctgaacgaccacagcgcccccgagacccccacccagccccccagattcagcgagctggtggacggcagaggcagagtgagcgccagattcggcggcagccccagcaaggccgccaccgtgagaagccacgtgcccggcaactgcagcgagaacccctgccagaacggcggcacctgcgtgcccggcgccgacgcccacagctgcgactgcggccccggcttcaagggcagaagatgcgagctggcctgcatcaaggtgagcagaccctgcaccagactgttcagcgagaccaaggccttccccgtgtgggagggcggcgtgtgccaccacgtgaagcagagcaagagccagaccctggagaagagctag

SEQ ID NO: 36456 - DNA, 4242 bp, Artificial Sequence
  derived and/or modified sequence
atgagacatggggtggcatgggctctgctagtggctgcagccctgggactcggggccaggggcgtgagaggggccgttgccctagcagatttctacccatttggcgccgagcggggagacgccgtgacacccaaacaggacgatggcggtagcggcctcaggccgttatcagtgccattccccttcttcggagccgagcacagcgggttgtatgttaacaacaacggcatcatctctttccttaaagaagtttctcagtttactcccgtggctttcccaattgccaaagatcggtgtgttgtcgcagcattttgggcagacgtggacaatcggagagctggcgatgtgtactacagggaagcaactgatcccgccatgttaaggagagcaacagaggatgtcaggcactactttccagagttactggatttcaacgctacctgggtcttcgtggcgacgtggtacagggtgactttttttggcgggtctagtagtagtcccgtgaatacattccagacagtgttaatcactgacggaaagttatcatttacaatcttcaactacgagtccattgtctggaccacaggtacacatgcgtcatcgggaggaaatgctaccgggttgggcggcatcgcagcccaggcagggttcaatgccggagacggtcagcggtattttagcatcccaggctcacgcacagctgacatggcggaggtcgagactacaaccaacgtgggcgttcccggaaggtgggcatttaggattgatgatgcccaagtaagagtcggaggatgcggtcacaccaccagcgtgtgtcttgccctgcgcccttgcctaaatgggggtaagtgcattgacgattgtgttactggaaacccgagctacacctgctcgtgcctgtccggctttacaggacggcggtgccacctcgacgtaaatgaatgtgcctctcagccttgtcagaacggaggcacgtgcacccatgggatcaactcctttcgatgccaatgtccagcaggcttcggaggaccaacatgtgaaacagctcagtcaccttgcgacacgaaggaatgccagcacggcggccagtgccaggtcgagaatgggagcgcagtgtgcgtgtgtcaagccggttacacgggcgcagcatgcgaaatggacgtggatgattgtagccctgatccctgcctcaatggaggatcgtgcgttgacttggtgggaaattatacctgcctatgcgccgagcctttcaagggcctaaggtgtgaaaccggagaccatccggtcccggatgcgtgcctctccgccccctgtcataacggaggtacctgcgtggacgccgatcagggttatgtgtgtgaatgtccagaagggtttatgggactggactgcagagaacgtgtccctgacgattgcgagtgcaggaatggtggtcggtgtttaggggcaaacacaacgctgtgccaatgtccccttggcttctttgggcttctgtgcgagtttgaaatcacagctatgccgtgtaatatgaacactcagtgtccggacggaggatattgcatggagcatggaggctcatacctgtgtgtgtgtcatactgaccacaacgccagtcactccctcccttcgccctgcgattccgatccctgctttaacggcggctcctgtgacgcccacgacgacagttacacttgtgaatgcccacggggcttccatggcaagcactgtgaaaaggcccggcctcacctgtgcagctcagggccatgtcggaacggcggcacttgcaaggaggccggcggggagtatcactgttcttgtccttaccggttcaccggaaggcactgcgaaatcgggaagcctgactcatgcgccagcggaccatgtcacaacgggggcacttgctttcactacatcggtaaatataagtgcgactgtcctcctggcttttccggccgccactgtgaaatcgctcccagcccctgcttccgaagtccctgtgtgaatggagggacctgcgaggacagggataccgatttcttttgccattgccaggctggctacatgggtaggagatgccaggcagaagtggattgtggacctcccgaggaggtaaagcacgcgactctccgcttcaacggtacccggcttggggctgtggccctctatgcttgcgacaggggatactctctcagcgctcccagtagaatccgcgtttgtcaaccccatggagtttggtccgaacctccgcagtgcttagagatcgatgagtgtcggtcacagccatgcctgcacggagggtcttgtcaggatcgagttgctggctacctatgtctgtgctctacagggtacgaaggagctcactgtgaacttgaaagggatgagtgtcgggctcatccatgccgcaatggtggttcctgccgcaatctgccaggcgcttatgtttgccgctgcccagcggggttcgtgggggtgcattgtgagacggaggtggatgcgtgtgacagcagcccttgccaacacggcgggcgatgcgaatctggcgggggcgcgtacctctgcgtttgtccggaatctttctttgggtaccactgcgagactgtgagcgacccatgcttctcctccccttgtggggggcgcggatattgcctcgcgagtaacggaagccacagttgcacatgtaaggtggggtacactggtgaggattgtgcaaaggagctcttcccccccacagctttaaaaatggagagggtggaagaatctggtgttagcatctcctggaatccaccaaatggtcccgctgcacgtcagatgctggacgggtacgctgtcacctacgtgagttccgacggctcgtaccggagaaccgacttcgtggacaggactcgaagcagtcatcagctccaggccctcgctgctggccgggcctataacatatcagtgttcagcgtgaagcggaactcaaataataagaatgatatatcccgacctgccgtgctcctggcgcgaacgcgcccaaggccagttgagggatttgaggtgaccaacgtcacagcctccactatctctgttcaatgggcgttgcaccggatcaggcacgccaccgtttctggggtccgtgtgtcaattagacatcccgaagccctgagggaccaggctacggatgtcgataggagcgtcgaccgctttactttccgtgccttgctccccggcaagaggtacactatccagttgacaacactttcagggttgcgtggggaagagcatccgaccgaaagtctggccacagcccccacacatgtttggacaagaccattaccccctgcaaatctcacggccgcgagggtgaccgctacaagcgcgcatgtggtgtgggatgcaccgactccaggaagcctcctggaggcgtatgtaataaatgtaaccacatctcagagcaccaagtcccgctatgttccaaacggaaagctcgcatcatacaccgtgcgggacttgttgcctgggcgaagatatcagctttcagtgattgccgttcaatctaccgagctgggtcctcagcactcggagccagcacacctttatatcataacctctcctcgcgacggggcagaccgccggtggcaccaaggggggcaccatcccagagtgctgaaaaacagacctcctcctgccagactaccagagctgcgtctcttgaacgatcattcggcccctgagacacccacccagcccccacgatttagtgagctcgtggatggccgcgggcgggtctccgctaggtttggtgggtcgccgtccaaggccgccactgtgagatctcagcctactgcatcagcacagttagaaaatatggaagaggctcctaagagggtgtccctagctctccagctcccagagcatggcagcaaggacattgggaacgttccaggcaactgcagcgaaaacccttgccagaatggagggacctgcgtccccggtgcagatgcccatagctgcgattgcgggcctggcttcaaagggcgcagatgcgaactcgcttgcattaaagtctcccgcccgtgcaccaggcttttttccgagaccaaggcttttcccgtatgggagggaggcgtgtgccaccacgtttacaaaagggtgtatagggtgcatcaggacatctgttttaaagaatcttgtgaaagtaccagtctgaaaaaaactcccaaccgtaaacagtccaagtcccagacactcgaaaagagctag

SEQ ID NO: 36457 - DNA, 4143 bp, Artificial Sequence
  derived and/or modified sequence
atgaggcacggcgtggcttgggcactgctggtagccgccgctctgggactgggagcccgaggggtacgcggcgcagtcgcccttgctgatttctaccccttcggagctgagcgcggagatgcggtaacccctaagcaggacgacggtggcagcggcctaagaccgctgagtgtgcccttcccctttttcggggctgaacattctgggttatacgtcaataataatggcatcatctcattcctgaaggaggtttcccagtttacaccagttgcctttcccattgccaaggatcggtgcgtggtggccgccttctgggctgatgtggataatcgtagggcaggagatgtttattacagagaggctacggatcctgccatgttgcgtcgggcgaccgaagatgtccggcactattttcccgaacttctggactttaatgcaacttgggttttcgtggcaacatggtatagagtgaccttctttggaggcagcagctctagccctgtaaacacgttccagacagtcctgattacggacggaaaacttagcttcacgatatttaattacgagagcatcgtgtggacaacagggacccatgccagctccgggggaaatgccactggcctcggcggcattgcagcacaagccggcttcaatgcgggggacggtcagagatatttttctatcccaggaagtcggacggctgatatggctgaggttgagaccacgacgaacgtgggagttccagggcgctgggcatttcggatcgatgatgcacaggtgagagttggtgggtgcgggcacacaacgtctgtctgtttggccctgcgaccttgcctcaacggaggaaaatgcatcgatgactgcgtcaccggtaacccctcctatacatgcagctgcctctctggcttcacgggacgccggtgccacctagacgtgaacgagtgtgctagccaaccatgtcagaatgggggcacttgcacacatggcattaactcatttcgctgtcagtgcccagctggattcggcggccccacgtgcgaaaccgcccaatctccttgcgacactaaggaatgtcagcatggggggcagtgccaggtagaaaatggcagtgccgtctgcgtgtgccaggctgggtatacgggggccgcatgtgaaatggatgtggacgactgttctcccgacccctgcctgaatgggggcagttgcgtagatttagtcggaaattatacttgcctctgcgccgagcctttcaaaggtttacgatgcgaaactggcgaccaccctgtacccgacgcctgtctgagtgcaccttgccacaatggaggtacctgcgtcgatgcagaccagggctacgtctgcgaatgccctgaagggttcatgggattagactgtagagaacgcgtgcccgatgattgcgaatgtcgaaacggcgggcgttgcctgggtgcaaatacgaccctctgccagtgtccccttgggttcttcgggctgctctgcgagtttgagatcactgcaatgccttgcaacatgaatacacagtgtcctgacgggggatactgtatggaacacggagggagttatctatgcgtatgccacaccgaccataacgcctcccattcacttcccagtccctgcgactcagatccctgctttaacggcggctcctgcgatgcacacgatgactcctacacctgtgaatgtcccagaggtttccacggaaagcattgtgaaaaggcaagacctcatttgtgtagcagtggcccatgtcggaacggcgggacctgcaaggaagctggcggcgagtatcactgcagttgtccttaccggttcacaggacgccattgcgagatcggtaaacccgattcctgtgctagtgggccatgccacaatgggggaacatgtttccattacatcggtaagtacaaatgcgactgtccccctggcttctcaggccgccactgcgaaattgccccatctccttgctttcgctccccttgtgtcaatggcggtacttgcgaggatcgggacaccgacttcttttgccattgtcaggcaggatatatgggtcggagatgtcaggctgaagtggactgtggcccgcccgaagaggtgaagcacgcaacactgcgatttaatggcactagactaggtgccgtggctctctacgcatgcgaccggggctactcactgtccgccccctcccgtattcgcgtgtgtcagccccacggagtatggagtgagcctccccagtgcctggagattgatgaatgccggagccagccatgcttgcacggaggcagctgccaagaccgcgtcgctgggtacctctgtctctgttccactggctatgaaggcgcacactgtgaactggagcgggacgaatgccgtgcacatccttgtcggaatggcgggagctgtcgtaatctgccaggagcctacgtttgtcggtgccctgcaggcttcgtaggagttcactgcgagacagaggttgacgcgtgcgactcatctccctgtcagcatggaggcagatgtgagtctggcggaggcgcgtatttatgcgtttgtccagaatcattctttggttaccactgtgaaactgtttcagatccatgcttttcgtcaccttgcggcgggagggggtattgcctggcatcaaatggctctcattcgtgtacgtgcaaggtcggctacacgggcgaagactgcgccaaagaactgttccccccgactgcactgaagatggagcgtgtggaagaatccggcgtctcaattagttggaatccacctaatgggccagccgcgcgccagatgctcgatggctatgccgtaacatatgtatcatccgacggaagttatagacgaacagacttcgtcgaccgaaccaggtctagccatcagctacaggcgctcgcagcagggcgggcatacaatatttccgttttttcggttaaacgaaattcaaacaacaaaaacgacatctcccgaccagccgtgcttcttgctcggaccagacctcggcctgtcgaggggttcgaagtaacgaacgtgaccgcgtctactatcagtgtgcagtgggccctacatcgtatccgccacgctacggtgagtggtgtgcgagtgagcatccggcatcccgaagctcttcgtgaccaggcaactgacgtagatcggtcagtggatcggttcactttccgggcccttttgccgggaaaacgttataccatccaactcaccacactgagcggtttgcggggcgaggagcatccaacggaaagtttggcgactgctcccacgcacgtgtggaccaggccgctcccacctgctaatctaaccgccgctcgcgttactgctactagtgctcatgtcgtgtgggacgcgcccacccccggcagtctactcgaggcttacgtcatcaatgtcactacatcacaaagcactaaatcacggtatgtgcccaatggaaagctggctagctatacagtacgtgatttactgcccggacgccgataccagctctccgttatcgcagtgcagtccacggagcttggtccgcagcatagcgaacccgctcacctgtatataattacctccccgagggacggcgccgatagacgctggcaccagggtggacaccatcccagggtactcaagaaccgcccacctcccgccagactccccgagctcagactgctgaacgaccacagcgcgccagaaacaccaactcagccaccccggttttccgagttggtcgatgggaggggcagagtcagtgcccgattcggaggatccccgtccaaagcagctacagtacggtcacatgtgcctgggaattgctctgagaatccttgccagaacggcggaacttgcgtacccggcgccgatgcacattcgtgcgattgtggccctggctttaaaggccgtcggtgcgaactggcgtgtatcaaggtttctagaccgtgtactagactcttctctgagaccaaggcatttcccgtctgggaaggtggagtgtgtcaccatgtgtacaaacgggtgtacagagttcatcaggatatttgcttcaaagagtcatgtgagagtacctctcttaagaaaactccaaaccgaaaacagagtaagtctcaaaccctggaaaagtcatag

SEQ ID NO: 36458 - DNA, 5575 bp, Artificial Sequence
  derived and/or modified sequence
atgcggcacggcgtcgcctgggcgctgctggtggccgcggccctggggcttggggcgcgcggggtgcgcggcgcggtggcccttgccgacttctacccgttcggcgccgagcgcggcgacgccgtcacccccaagcaggacgacggcggctcggggctgcggccgctctcggtgcccttcccgttcttcggtgccgagcactccggactctacgtgaacaacaacgggatcatctccttcctgaaggaggtttctcagttcaccccagtggccttccccattgccaaggaccgctgcgtggtggcagccttctgggcagatgtggacaaccggcgtgcaggcgacgtgtactaccgggaggccaccgacccagccatgctgcgccgagccacggaggacgtcaggcactacttccccgagctcctggacttcaatgccacctgggtttttgttgccacctggtaccgagtgaccttctttggaggcagttcctcatcccctgtcaacacattccagactgtgctcatcacagacggcaagctctccttcaccatcttcaactatgagtccatcgtgtggaccacaggcacacacgccagcagcgggggcaacgccactggcctcgggggcatcgcagcccaggctggcttcaacgcaggcgatgggcagcgttacttcagtatccccggctcgcgcacagcagacatggccgaggtggagaccaccaccaacgtgggtgtgcccgggcgctgggcgttcagaatcgatgatgcccaggtgcgcgtggggggctgcggccatacaacgtccgtgtgcctggccctgcgcccctgcctcaacggcggcaagtgcatcgacgactgcgtcacgggcaacccctcctacacctgctcctgcctctcgggcttcacggggcggaggtgccacctggacgtgaacgaatgtgcctcccagccctgtcagaatggtgggacctgtactcacggcatcaacagtttccgctgccagtgcccggctggctttgggggacccacctgtgagacagcccaatccccctgtgacaccaaagagtgtcaacatggtggccagtgccaggtggagaatggctctgcggtgtgtgtgtgccaggccggatacaccggagcagcctgcgagatggatgtggacgactgcagccctgacccctgcctgaatggaggctcttgtgttgacctagtggggaattacacctgcttgtgtgccgagcccttcaagggacttcgctgtgagacaggagaccatccagtgccagacgcctgcctctcggccccttgccacaatgggggcacctgtgtggatgcggaccagggctacgtgtgcgagtgccccgaaggcttcatgggcctggactgcagggagagagtccccgatgactgtgagtgccgcaacggaggcagatgcctgggcgccaacaccaccctctgccagtgccccctgggattctttgggcttctctgtgaatttgaaatcacagccatgccctgcaacatgaacacacagtgcccagatgggggctactgcatggagcacggcgggagctacctctgcgtctgccacaccgaccacaatgccagccactccctgccatcaccctgcgactcggacccctgcttcaacggaggctcctgcgatgcccatgacgactcctacacctgcgagtgcccgcgcgggttccacggcaagcactgcgagaaagcccggccacacctgtgcagctcagggccctgccggaacgggggcacgtgcaaggaggcgggcggcgagtaccactgcagctgcccctaccgcttcactgggaggcactgtgagatcgggaagccagactcgtgtgcctctggcccctgtcacaacggcggcacctgcttccactacattggcaaatacaagtgtgactgtcccccaggcttctccgggcggcactgcgagatagccccctccccctgcttccggagcccgtgtgtgaatgggggcacctgcgaggaccgggacacggatttcttctgccactgccaagcagggtacatgggacgccggtgccaggcagaggtggactgcggccccccggaggaggtgaagcacgccacactgcgcttcaacggcacgcggctgggcgcggtggccctgtatgcatgtgaccgtggctacagcctgagcgcccccagccgcatccgggtctgccagccacacggtgtctggagtgagcctccccagtgccttgaaatcgatgagtgccggtctcagccgtgcctgcatgggggctcttgtcaggaccgcgttgctgggtacctgtgcctctgcagcacaggctatgagggcgcccactgtgagctggagagggatgagtgccgagctcacccgtgcagaaatggagggtcctgcaggaacctcccaggggcctatgtctgccggtgccctgcaggcttcgttggagtccactgtgagacagaggtggacgcctgcgactccagcccctgccagcatggaggccggtgtgagagcggcggcggggcctacctgtgcgtctgcccagagagcttcttcggctaccactgcgagacagtgagtgacccctgcttctccagcccctgtgggggccgtggctattgcctggccagcaacggctcccacagctgcacctgcaaagtgggctacacgggcgaggactgcgccaaagagctcttcccaccgacggccctcaagatggagagagtggaggagagtggggtctctatctcctggaacccgcccaatggtccagccgccaggcagatgcttgatggctacgcggtcacctacgtctcctccgacggctcctaccgccgcacagactttgtggacaggacccgctcctcgcaccagctccaggccctggcggccggcagggcctacaacatctccgtcttctcagtgaagcgaaacagtaacaacaagaatgacatcagcaggcctgccgtgctgctggcccgcacgcgaccccgccctgtggaaggcttcgaggtcaccaatgtgacggctagcaccatctcagtgcagtgggccctgcacaggatccgccatgccaccgtcagtggggtccgtgtgtccatccgccaccctgaggccctcagggaccaggccaccgatgtggacaggagtgtggacaggttcacctttagggccctgctgcctgggaagaggtacaccatccagctgaccaccctcagtgggctcaggggagaggagcaccccacagagagcctggccaccgcgccgacgcacgtgtggacccggcccctgcctccagcaaacctgaccgccgcccgagtcactgccacctctgcccacgtggtctgggatgccccgactccaggcagcttgctggaggcttatgtcatcaatgtgaccaccagccagagcaccaagagccgctatgtccccaacgggaagctggcgtcctacacggtgcgcgacctgctgccgggacggcggtaccagctctctgtgatagcagtgcagagcacggagctcgggccgcagcacagcgagcccgcccacctctacatcatcacctcccccagggatggcgctgacagacgctggcaccagggaggacaccaccctcgggtgctcaagaacagaccgcccccggcgcgcctgccggagctgcgcctgctcaatgaccacagcgcccccgagacccccacccagccccccaggttctcggagcttgtggacggcagaggaagagtgagcgccaggttcggtggctcacccagcaaagcagccaccgtgagatcacacgtccctggcaactgttcagaaaacccctgtcagaacggaggcacttgtgtgccgggcgcagacgcccacagctgtgactgcgggccagggttcaaaggcagacgctgcgagctcgcctgtataaaggtgtcccgcccctgcacaaggctgttctccgagacaaaggcctttccagtctgggagggaggcgtctgtcaccacgtgtataaaagagtctaccgagttcaccaagacatctgcttcaaagagagctgtgaaagcacaagcctcaagaagaccccaaacaggaaacaaagtaagagtcagacactggagaaatcttaaggatttaagacgttcttgttacactccaccaacctcacgagtttctaacacccaggaagatgaggtctaaaaactggatgaaaaaggacaccctgagaaaaggtcctagctggagtcagtcccctctgtgacctctctcctcaggcctctagaggacagatggccaggcctgtgcacacaccagcccaccctgagagacccctctgggaccaaccacctgtgagtcctgcgatgcgtttaagcagcctgtgccctcacccaagctgcagttcctgaaggtgtagtctgtgtctctgcggatgagatgacagctcgccattccccggaatcagtgaggctgtcagtcagccacgcttctgcagtatgcagaaacctgttcttagactccaaagccagagaaagaattctcccttcgaggcccaacaaattgagaaggaactgtgatggaccacttccaaaacagagacgggggcaggggctgaagggcagagaccaggtgatgtcagaaggaaagccgggttgcagacacagccgcccctgctctggtcctccagcgtgtttatgacgctcgtgcaggtcgacgagccatcctatggactagttaacactaaggtggagttcagacttttttagacaacggcgcgactggcagcctttctctatcaagggtcagacggtaaacgttttcagctttgcagaccagaggtccctgtggctacagtagcgcagacacagccacaggcatgtcattgaatggctgcggctatgttccaataaaaacttatttacaataacaggtggtggccaaattggcccatgggccttatttggtgaaccctgttctatgagatcacctaggcttcagccttaaacagtggaagccatcccctgaatgacaagtcacaagggtatcaaagaaagacccctgaattttcatggaaaaagctattcagacccctgcttggaaagctaaggcacactgccacgaagcagcaaggacgccttacaagtctcagtgcaacagagatggacacctgggctgggctggacaatgtttaaggttccttttagtccatgactcaagtgatactgttttaggctatcaggtagtaaacacgatcttagacatccccatctttgtaagcagaacagtacggcacttcaccacatctgcttcccaccatgcttctaagcagctgtcttccccctgctaatgttacaaccaaagcagccaccccacctcctctcgtgttgagcctcacgaccgctgacccagctggaaagccagcgccctgccgcgtcaccctgactctgctcagagccagcattccagccacaaagagggcctccttcctttcctctttcataaaaatgttttttgaagagttagagtatattttaggctttttatctttattaaaatttcatgtgc

SEQ ID NO: 36459 - DNA, 3975 bp, Artificial Sequence
  derived and/or modified sequence
atgcggcacggagtggcgtgggctctcctcgtcgctgcagctctaggccttggagccaggggcgtcagaggcgcagtcgcattggctgatttctatcctttcggagctgagcggggagacgctgttactccgaaacaggatgacggaggcagcggtcttagacccctttcagtgccctttcccttcttcggtgctgaacactctggtttatatgttaataacaacggcatcattagcttccttaaggaggtctcccagtttacgcctgttgcatttcctatagcaaaagatcgttgcgtagtggccgccttttgggctgatgtggataatcgccgcgccggcgatgtgtactatagggaggcaaccgatcccgcgatgcttcggagagctaccgaagatgtaaggcattacttcccggagttactggacttcaacgctacctgggtctttgttgccacctggtatagggtcacatttttcggaggttcatcctcttccccagtcaataccttccagaccgtgcttattacagatggaaagttgagctttaccatttttaactatgaaagtatcgtctggactacgggtacgcacgcctcgagcgggggaaacgctaccggactaggcggcatcgcagctcaggccggctttaatgccggcgacggacagaggtatttcagtattcctggaagtcggactgcagacatggccgaggtggagactaccactaatgttggggttccgggtcgctgggccttccggattgatgacgctcaggtcagggttgggggttgcggtcacaccacctcagtgtgtctcgcactacgaccctgcttgaacggtggcaagtgtatcgatgactgcgtaacgggaaatccatcatatacatgcagctgcctgtcaggctttacagggaggagatgtcacctggatgtcaacgagtgtgccagtcaaccctgccagaacgggggaacatgcacccacggtataaatagctttagatgccagtgccctgcgggattcggcgggccaacttgcgaaaccgcacagagtccatgtgacaccaaagagtgccagcatggagggcagtgtcaggtcgaaaacggatccgcagtttgcgtctgtcaggccggatacacaggtgcagcctgcgagatggacgttgatgactgttctcctgatccatgcttgaacggaggatcttgcgtggatttggttggaaactatacatgcctatgcgccgagccttttaagggccttagatgtgaaactggcgaccacccggtgcccgacgcttgcctgagcgccccctgtcataatggcggcacttgcgttgatgctgatcagggatacgtgtgcgaatgtcctgagggatttatggggcttgattgtagagagagggtccctgacgactgtgaatgccggaacggagggagatgcctgggcgctaacactaccttgtgtcagtgcccactcggctttttcggtttactttgtgagtttgaaatcacggcgatgccctgcaacatgaacacgcagtgcccggacggcggatactgcatggagcacggaggctcctacctgtgcgtatgccataccgatcataacgcctcccacagtcttccttcaccatgtgactccgatccgtgtttcaatggcggatcatgtgacgcccacgacgattcttatacatgcgaatgcccgcgtggattccatgggaagcattgtgagaaggcacgtccccacctgtgtagctctgggccctgcaggaatggagggacctgcaaagaggcagggggagaatatcattgctcatgtccctatcggtttacaggacgccactgtgagattgggaagcctgattcatgcgcatctggaccctgccacaacggcggcacttgtttccactacatcgggaaatacaaatgtgactgcccgcccggcttcagtggccgacattgtgaaatcgcccccagcccctgcttcagatccccatgtgtgaacggaggtacatgtgaggaccgagacacagactttttctgtcactgccaagctggctacatgggccgacggtgtcaggccgaagtggattgtggcccacccgaggaggttaagcacgccactttaagattcaatggaactcggttaggagctgttgccctctacgcctgcgaccggggttactcactttctgccccttcccgtatcagggtctgccagcctcatggggtgtggagcgagccccctcagtgcctggaaattgacgagtgtcggtcccaaccttgtctgcatggaggcagttgccaagaccgggttgcaggatatctctgtctgtgctccacgggatatgagggcgcccactgcgagttagagcgcgacgaatgccgggcccacccttgtaggaatggtgggtcgtgcagaaatctgccaggcgcgtatgtttgtagatgccccgctggcttcgtgggcgtgcactgcgagactgaagttgacgcttgtgattcctctccttgtcaacacggcggtagatgtgagtctggcgggggggcatatctgtgtgtgtgtccagaaagtttctttggctaccactgcgagaccgtgtcagatccatgcttctcttccccgtgtggcggccgaggctattgtctagccagcaacggatcccactcgtgtacttgcaaagtcggctacacaggggaggattgcgccaaggaactgtttcctcccactgctctgaagatggaaagagttgaagagtctggggtctccatctcttggaacccacctaacgggcccgccgcgcgccagatgctcgatggatatgcagtcacctacgtttcatcagacgggtcatacaggcgcaccgactttgttgatcgcacccgctccagccaccaattgcaggccctggctgcaggtagagcgtacaacattagcgttttcagcgttaagagaaactctaataacaagaacgatatctcccgcccagccgtcttacttgcaagaacacgcccccgccctgtggaggggttcgaagtgactaatgtgacagcaagtacaatctctgtgcaatgggctttgcatcggatccgccacgccaccgtctctggcgtgcgcgttagcattcgccaccccgaggcactgcgggaccaggcaaccgacgtagaccggagcgttgataggttcacctttcgcgccctgctgcctggaaaacgttacacaatccagctgaccaccttaagcggattacgaggagaagagcatcccactgagagcctggctaccgctccaacacacgtttggactaggcctctccctcctgccaatctgactgccgccagagtcacagccacctctgcccatgtggtctgggatgcgcctacaccagggagcttgctggaggcctacgtgatcaatgttactacaagccagagtaccaaatccaggtatgtgccgaatggcaaattggccagttacacagtccgtgatttactccccgggcgaaggtaccagctttcagtgatcgccgtccagagcaccgaattgggtccacagcattccgagccggcccatctgtacattattacttccccgagagatggtgccgacagacgttggcatcaggggggtcaccaccctcgggtcctgaagaacaggcccccacctgcccggttgcccgagctcagacttctgaatgaccacagcgcgcctgagactccaactcagcctccccgcttctctgagttggtggatggccgcggacgagtttccgcccgcttcggcggatctccctccaaggctgcaactgtcaggtctcaacctactgcgagcgcccagctggagaacatggaggaggcacctaagcgggtgagcctagcacttcagctgccggaacacgggagcaaagacatcggctctgaaagtgccgctctagtaggtaccctgggattgaccgactgctcccagggaccatag

SEQ ID NO: 36460 - DNA, 4059 bp, Artificial Sequence
  derived and/or modified sequence
atgcgccatggtgtagcttgggccctacttgtcgctgccgctcttggcttgggagcaagaggcgttcgcggagccgtggcgctcgctgacttctacccatttggcgccgaacggggcgatgccgtcacgccaaaacaagatgacgggggctcagggctgaggccgttaagcgtcccattccccttcttcggtgccgagcattccggactgtatgttaataataacgggataatttcctttcttaaagaagtctcccagtttacacccgttgcattccctatcgcgaaggatcggtgtgtagttgcggcgttctgggctgatgtggataataggcgcgcgggagacgtgtattacagggaagctaccgacccagctatgctgcggcgggccactgaggatgtgaggcactactttccggagctgctcgacttcaacgccacgtgggtattcgtggcgacctggtatagggtaaccttttttggagggagcagctcctcccccgtaaacacattccaaacagtacttattaccgatggcaagctgtcattcaccatttttaactacgagtctatcgtgtggaccactggaactcatgctagcagcggcgggaatgctactgggctgggcggcatcgccgcccaagcaggcttcaatgctggggacgggcagagatatttctcgatccctgggtcccgaacggctgatatggccgaagtcgagacaactaccaacgtcggggtccctggccggtgggcctttcgcatagacgacgcgcaagtcagggtgggtgggtgtggacataccacctcagtatgtctggcattgcgcccatgtctgaacggcgggaagtgtattgatgattgcgttaccgggaatccatcatatacttgtagttgcctgagtggctttaccggaagaagatgccacctggatgttaatgaatgtgcctcccagccatgccagaacggtggaacctgcacacatgggatcaacagttttaggtgccagtgcccggctggctttggagggcccacctgcgaaacagctcagtcaccctgcgacactaaggagtgtcaacatgggggccagtgtcaggtggagaacggttcggctgtctgtgtatgccaggctggctatacaggcgcggcctgtgagatggatgtggatgattgcagcccagatccctgccttaacggtggatcatgcgtagacctagtgggcaactacacttgcctatgcgcggagcccttcaaggggctccgttgtgagactggtgaccaccctgtgcccgacgcctgtttgtcggcaccctgccataacggcggtacatgcgtcgatgctgatcaagggtacgtctgtgaatgccccgagggcttcatgggcctcgattgtcgggaacgggtgccagacgactgcgagtgtagaaatggcggtcgctgtctgggtgccaataccactctgtgccaatgcccgctcgggtttttcggcctgctttgtgaatttgagatcacagctatgccgtgtaacatgaacactcagtgccccgacggcggttactgcatggagcatgggggatcttacctctgtgtctgtcataccgaccacaatgctagccattcactgccttccccctgcgatagcgacccatgtttcaacggcgggtcatgtgacgcacatgatgattcatatacttgcgaatgccctcgaggatttcatggcaagcactgtgaaaaggcccgtccccacctctgctccagtggcccttgtaggaacggggggacatgtaaggaggccggcggtgagtatcactgctcatgcccctatcgctttacagggagacattgcgaaattgggaagcctgatagctgcgcctcagggccatgtcacaatgggggcacatgttttcattacatcgggaagtataagtgcgactgcccacctggcttctccgggcgccactgtgaaatcgctccatctccttgcttccggtctccttgtgtcaatggcggcacttgcgaagacagagataccgactttttctgtcattgtcaggcaggttatatgggaagacggtgccaggctgaagtggactgcggacctcccgaggaagttaaacacgccactttacgcttcaacggcacgagattaggtgcggtcgccctctacgcatgtgatcggggatactctttgtccgccccttcgaggatccgggtgtgtcaaccccatggcgtgtggtcagagccccctcagtgcttagaaatcgacgaatgccgaagtcagccgtgtctgcatggtggatcttgtcaagatagggtcgcggggtacctgtgcctctgttccaccggctatgagggggctcattgcgagctagagagagacgaatgtcgcgcccacccttgccgaaatggcgggagctgcagaaacttgcctggggcgtatgtttgtcgctgtcctgctggattcgtcggggtgcactgcgagaccgaggtcgacgcctgcgactcttctccgtgccagcacggagggaggtgtgagagcggaggcggggcctatctgtgcgtttgccctgagagtttctttggttaccattgcgagacagtcagcgatccatgcttcagttccccctgtggtggccggggatattgcttggcctcgaacgggtctcatagctgtacatgcaaggttgggtacaccggagaagattgcgcaaaggaacttttccctccaactgccctgaaaatggagagggtcgaggagtcaggtgttagcatctcctggaatcctccgaacgggcccgccgcacgtcaaatgttggatggttacgcagtcacatacgtgtcaagcgacggctcatatagacgtaccgatttcgtagaccggacgagatcaagtcatcagttacaagcactcgcagccggacgcgcatacaacatctccgtgttcagtgtgaagagaaatagtaacaataaaaatgacataagtcgtccggctgtccttcttgcaaggacccgacccaggcctgtggagggtttcgaagttactaacgttaccgcctctaccatctccgtccagtgggccctccatcgaatcagacacgccacggtgtcaggggtgagagtgtccattagacaccctgaggcgctgcgggaccaggctacggacgttgaccggtccgtggatcgctttaccttcagggcactgcttccgggcaaacgctataccattcaactcaccacactgtcaggcctgcgtggtgaggagcatccaactgaatccctggccactgctccaacgcacgtttggaccagacctctccctcccgcaaacctaaccgccgcccgggtgactgctacttcggctcacgtagtgtgggatgcgcccactccagggtctcttttggaagcttacgtgataaacgtaactacctcccagtcaacgaaaagcagatatgtacccaatggcaaactcgcttcctacacagtgcgcgatcttttgcccgggagaagataccagctttcagtaatcgccgtgcaaagtactgagctgggtccgcaacattccgagccggcgcacttgtacataatcacttcccctcgcgatggtgccgatcgccgctggcaccagggaggacatcacccgagggtactgaagaaccggcccccacctgcaaggctgcctgagctccgtttactcaatgaccattcagcacccgaaacccccacccagccccccagatttagtgaattggtcgatggcaggggccgggtatctgccagatttggaggttctccatcaaaggcggccaccgtgcgatcccacgtgcctggtaattgcagtgagaacccttgtcagaatggcggaacatgcgtgcctggagccgacgcacacagctgcgactgcggtccgggctttaagggccgaaggtgtgagctggcgtgcatcaaggtgagcagaccgtgtacgcgccttttcagtgaaaccaaggcttttcctgtgtgggaaggcggcgtctgtcaccacgtgaaacagagcaaatcgcagaccctggagaagtcttag

SEQ ID NO: 36461 - DNA, 4242 bp, Artificial Sequence
  derived and/or modified sequence
atgagacatggagtggcctgggccctgctggtggccgccgccctgggcctgggcgcccggggcgtgagaggagctgtggccctggccgacttctacccctttggagctgagagaggagatgctgtgacccccaagcaggatgatggcggcagcggcctgcggcccctgtctgtgcccttccccttctttggagctgagcacagcggcctgtatgtgaacaacaacggcatcatctccttcctgaaggaggtgtcccagttcacccctgtggccttccccatcgccaaggacagatgtgtggtggccgccttctgggcagatgtggacaacagaagagctggagatgtgtactaccgggaggccacagatcctgccatgctgcggcgggccacagaagatgtgcgccactacttccctgagctgctggacttcaatgccacctgggtgtttgtggccacctggtacagagtgaccttcttcggcggcagcagcagcagccctgtgaacaccttccagacagtgctgatcacagatggcaagctgtccttcaccatcttcaactatgagagcatcgtgtggaccaccggcacccacgccagcagcggcggcaatgccaccggcctgggcggcattgctgcccaggccggcttcaatgctggagatggccagcgctacttcagcatccctggcagcaggacagctgacatggccgaggtggagaccaccaccaacgtgggcgtgcccggccgctgggccttcagaattgatgatgcccaggtgcgggtgggcggctgcggccacaccacctctgtgtgcctggccctgcggccctgcctgaatggaggaaaatgtattgatgactgtgtgacaggcaaccccagctacacctgcagctgcctgagcggcttcaccggccgccgctgccacctggatgtgaatgaatgtgccagccagccctgccagaatggaggcacctgcacccacggcatcaacagcttccgctgccagtgcccagctggctttggaggccccacctgtgaaacagcccagagcccctgtgacaccaaggagtgccagcacggcggccagtgccaggtggagaatggcagcgctgtgtgtgtgtgccaggccggctacaccggggccgcctgtgagatggatgtggatgactgcagcccagacccctgcctgaatggaggcagctgtgtggacctggtgggcaactacacctgcctgtgtgccgagcccttcaagggcctgcgctgtgagaccggggaccaccctgtgcctgatgcctgcctgagcgccccctgccacaacggcggcacctgtgtggatgctgaccagggctacgtgtgtgagtgcccagagggcttcatgggcctggactgccgggagcgggtgcctgatgactgtgaatgtagaaatggaggccgctgcctgggcgccaacaccaccctgtgccagtgccccctgggcttcttcggcctgctgtgtgaatttgagatcacagccatgccctgcaacatgaacacccagtgcccagatggcggctactgcatggagcacggcggcagctacctgtgtgtgtgccacacagaccacaatgccagccacagcctgcccagcccctgtgacagcgacccctgcttcaacggcggcagctgtgatgcccatgatgacagctacacctgtgagtgcccccggggcttccacggcaagcactgtgagaaggcccggccccacctgtgcagcagcggcccctgcagaaatggaggcacctgcaaggaggccggcggggagtaccactgcagctgcccctaccgcttcaccggccgccactgtgaaattggcaagccagacagctgtgccagcggcccctgccacaacggcggcacctgcttccactacatcggcaagtacaagtgtgactgccccccaggcttcagcggccgccactgtgagatcgcccccagcccctgcttccgcagcccctgtgtgaatggaggcacctgtgaagatcgggacacagacttcttctgccactgccaggccggctacatgggccgccgctgccaggccgaggtggactgtggccccccagaggaggtgaagcacgccaccctgcgcttcaacggcacccggctgggcgctgtggccctgtatgcctgtgaccggggctacagcctgagcgcccccagccgcatccgggtgtgccagccccacggcgtgtggagcgagcccccccagtgcctggagattgatgagtgccgcagccagccctgcctgcacggcggcagctgccaggacagagtggccggctacctgtgcctgtgcagcacaggctatgaaggagcccactgtgagctggagagagatgagtgccgggcccacccctgcagaaatggaggcagctgcaggaacctgcccggggcctacgtgtgccgctgcccagctggctttgtgggcgtgcactgtgaaacagaggtggatgcctgtgacagcagcccctgccagcacggcggccgctgtgagagcggcggcggggcctacctgtgtgtgtgcccagagagcttcttcggctaccactgtgagaccgtgtctgacccctgcttcagcagcccctgtggcggccggggctactgcctggccagcaatggcagccacagctgcacctgcaaggtgggctacaccggggaggactgtgccaaggagctgttccccccaacagccctgaagatggagcgggtggaggagagcggcgtgtccatctcctggaacccccccaacggccctgctgcccggcagatgctggatggctatgctgtgacctacgtgtccagtgatggcagctacagaagaacagactttgtggacaggaccaggagcagccaccagctgcaggccctggccgccggccgggcctacaacatctctgtgttttctgtgaagaggaacagcaacaacaagaatgacatcagcaggcctgctgtgctgctggcccggacccggcccaggcctgtggagggctttgaggtgaccaacgtgacagccagcaccatctctgtgcagtgggccctgcaccgcatcagacatgccaccgtgtctggagtgcgggtgtccatccgccaccctgaggccctgcgggaccaggccacagatgtggacagatctgtggaccgcttcaccttccgggccctgctgcccgggaagcgctacaccatccagctgaccaccctgagcggcctgcggggggaggagcaccccacagagagcctggccacagcccccacccacgtgtggacccggcccctgcccccagccaacctgacagctgcccgggtgacagccaccagcgcccacgtggtgtgggatgcccccaccccaggcagcctgctggaggcctacgtgatcaacgtgaccaccagccagagcaccaagagccgctacgtgcccaacgggaagctggccagctacacagtgcgggacctgctgcccggccgccgctaccagctgtctgtgattgctgtgcagagcacagagctgggcccccagcacagcgagcccgcccacctgtacatcatcaccagccccagagatggagctgaccggcgctggcaccagggcggccaccacccccgggtgctgaagaaccggcccccaccagcccggctgcctgagctgcggctgctgaatgaccacagcgcccctgagacccccacccagcccccacgcttcagcgagctggtggatggccggggccgggtgtctgccaggtttggaggcagccccagcaaggccgccaccgtgcgcagccagcccacagccagcgcccagctggagaacatggaggaggcccccaagagggtgtccctggccctgcagctgcctgagcacggcagcaaggacattggaaatgtgcccggcaactgcagcgagaacccctgccagaatggaggcacctgtgtgcctggagcagatgcccacagctgtgactgtggccctggcttcaagggccgccgctgtgagctggcctgcatcaaggtgtcccggccctgcaccaggctcttcagcgagaccaaggccttccctgtgtgggagggcggcgtgtgccaccacgtgtacaagagggtgtacagagtgcaccaggacatctgcttcaaggagagctgtgagagcaccagcctgaagaagacccccaacaggaagcagagcaagagccagaccctggagaagagctag

SEQ ID NO: 36462 - DNA, 4143 bp, Artificial Sequence
  derived and/or modified sequence
atgagacatggagtggcctgggccctgctggtggccgccgccctgggcctgggcgcccggggcgtgagaggagctgtggccctggccgacttctacccctttggagctgagagaggagatgctgtgacccccaagcaggatgatggcggcagcggcctgcggcccctgtctgtgcccttccccttctttggagctgagcacagcggcctgtatgtgaacaacaacggcatcatctccttcctgaaggaggtgtcccagttcacccctgtggccttccccatcgccaaggacagatgtgtggtggccgccttctgggcagatgtggacaacagaagagctggagatgtgtactaccgggaggccacagatcctgccatgctgcggcgggccacagaagatgtgcgccactacttccctgagctgctggacttcaatgccacctgggtgtttgtggccacctggtacagagtgaccttcttcggcggcagcagcagcagccctgtgaacaccttccagacagtgctgatcacagatggcaagctgtccttcaccatcttcaactatgagagcatcgtgtggaccaccggcacccacgccagcagcggcggcaatgccaccggcctgggcggcattgctgcccaggccggcttcaatgctggagatggccagcgctacttcagcatccctggcagcaggacagctgacatggccgaggtggagaccaccaccaacgtgggcgtgcccggccgctgggccttcagaattgatgatgcccaggtgcgggtgggcggctgcggccacaccacctctgtgtgcctggccctgcggccctgcctgaatggaggaaaatgtattgatgactgtgtgacaggcaaccccagctacacctgcagctgcctgagcggcttcaccggccgccgctgccacctggatgtgaatgaatgtgccagccagccctgccagaatggaggcacctgcacccacggcatcaacagcttccgctgccagtgcccagctggctttggaggccccacctgtgaaacagcccagagcccctgtgacaccaaggagtgccagcacggcggccagtgccaggtggagaatggcagcgctgtgtgtgtgtgccaggccggctacaccggggccgcctgtgagatggatgtggatgactgcagcccagacccctgcctgaatggaggcagctgtgtggacctggtgggcaactacacctgcctgtgtgccgagcccttcaagggcctgcgctgtgagaccggggaccaccctgtgcctgatgcctgcctgagcgccccctgccacaacggcggcacctgtgtggatgctgaccagggctacgtgtgtgagtgcccagagggcttcatgggcctggactgccgggagcgggtgcctgatgactgtgaatgtagaaatggaggccgctgcctgggcgccaacaccaccctgtgccagtgccccctgggcttcttcggcctgctgtgtgaatttgagatcacagccatgccctgcaacatgaacacccagtgcccagatggcggctactgcatggagcacggcggcagctacctgtgtgtgtgccacacagaccacaatgccagccacagcctgcccagcccctgtgacagcgacccctgcttcaacggcggcagctgtgatgcccatgatgacagctacacctgtgagtgcccccggggcttccacggcaagcactgtgagaaggcccggccccacctgtgcagcagcggcccctgcagaaatggaggcacctgcaaggaggccggcggggagtaccactgcagctgcccctaccgcttcaccggccgccactgtgaaattggcaagccagacagctgtgccagcggcccctgccacaacggcggcacctgcttccactacatcggcaagtacaagtgtgactgccccccaggcttcagcggccgccactgtgagatcgcccccagcccctgcttccgcagcccctgtgtgaatggaggcacctgtgaagatcgggacacagacttcttctgccactgccaggccggctacatgggccgccgctgccaggccgaggtggactgtggccccccagaggaggtgaagcacgccaccctgcgcttcaacggcacccggctgggcgctgtggccctgtatgcctgtgaccggggctacagcctgagcgcccccagccgcatccgggtgtgccagccccacggcgtgtggagcgagcccccccagtgcctggagattgatgagtgccgcagccagccctgcctgcacggcggcagctgccaggacagagtggccggctacctgtgcctgtgcagcacaggctatgaaggagcccactgtgagctggagagagatgagtgccgggcccacccctgcagaaatggaggcagctgcaggaacctgcccggggcctacgtgtgccgctgcccagctggctttgtgggcgtgcactgtgaaacagaggtggatgcctgtgacagcagcccctgccagcacggcggccgctgtgagagcggcggcggggcctacctgtgtgtgtgcccagagagcttcttcggctaccactgtgagaccgtgtctgacccctgcttcagcagcccctgtggcggccggggctactgcctggccagcaatggcagccacagctgcacctgcaaggtgggctacaccggggaggactgtgccaaggagctgttccccccaacagccctgaagatggagcgggtggaggagagcggcgtgtccatctcctggaacccccccaacggccctgctgcccggcagatgctggatggctatgctgtgacctacgtgtccagtgatggcagctacagaagaacagactttgtggacaggaccaggagcagccaccagctgcaggccctggccgccggccgggcctacaacatctctgtgttttctgtgaagaggaacagcaacaacaagaatgacatcagcaggcctgctgtgctgctggcccggacccggcccaggcctgtggagggctttgaggtgaccaacgtgacagccagcaccatctctgtgcagtgggccctgcaccgcatcagacatgccaccgtgtctggagtgcgggtgtccatccgccaccctgaggccctgcgggaccaggccacagatgtggacagatctgtggaccgcttcaccttccgggccctgctgcccgggaagcgctacaccatccagctgaccaccctgagcggcctgcggggggaggagcaccccacagagagcctggccacagcccccacccacgtgtggacccggcccctgcccccagccaacctgacagctgcccgggtgacagccaccagcgcccacgtggtgtgggatgcccccaccccaggcagcctgctggaggcctacgtgatcaacgtgaccaccagccagagcaccaagagccgctacgtgcccaacgggaagctggccagctacacagtgcgggacctgctgcccggccgccgctaccagctgtctgtgattgctgtgcagagcacagagctgggcccccagcacagcgagcccgcccacctgtacatcatcaccagccccagagatggagctgaccggcgctggcaccagggcggccaccacccccgggtgctgaagaaccggcccccaccagcccggctgcctgagctgcggctgctgaatgaccacagcgcccctgagacccccacccagcccccacgcttcagcgagctggtggatggccggggccgggtgtctgccaggtttggaggcagccccagcaaggccgccaccgtgcgcagccacgtgcccggcaactgcagcgagaacccctgccagaatggaggcacctgtgtgcctggagcagatgcccacagctgtgactgtggccctggcttcaagggcagaagatgtgagctggcctgcatcaaggtgtcccggccctgcaccaggctcttcagcgagaccaaggccttccctgtgtgggagggcggcgtgtgccaccacgtgtacaagagggtgtacagagtgcaccaggacatctgcttcaaggagagctgtgagagcaccagcctgaagaagacccccaacaggaagcagagcaagagccagaccctggagaagagctag

SEQ ID NO: 36463 - DNA, 3975 bp, Artificial Sequence
  derived and/or modified sequence
atgagacatggagtggcctgggccctgctggtggccgccgccctgggcctgggcgcccggggcgtgagaggagctgtggccctggccgacttctacccctttggagctgagagaggagatgctgtgacccccaagcaggatgatggcggcagcggcctgcggcccctgtctgtgcccttccccttctttggagctgagcacagcggcctgtatgtgaacaacaacggcatcatctccttcctgaaggaggtgtcccagttcacccctgtggccttccccatcgccaaggacagatgtgtggtggccgccttctgggcagatgtggacaacagaagagctggagatgtgtactaccgggaggccacagatcctgccatgctgcggcgggccacagaagatgtgcgccactacttccctgagctgctggacttcaatgccacctgggtgtttgtggccacctggtacagagtgaccttcttcggcggcagcagcagcagccctgtgaacaccttccagacagtgctgatcacagatggcaagctgtccttcaccatcttcaactatgagagcatcgtgtggaccaccggcacccacgccagcagcggcggcaatgccaccggcctgggcggcattgctgcccaggccggcttcaatgctggagatggccagcgctacttcagcatccctggcagcaggacagctgacatggccgaggtggagaccaccaccaacgtgggcgtgcccggccgctgggccttcagaattgatgatgcccaggtgcgggtgggcggctgcggccacaccacctctgtgtgcctggccctgcggccctgcctgaatggaggaaaatgtattgatgactgtgtgacaggcaaccccagctacacctgcagctgcctgagcggcttcaccggccgccgctgccacctggatgtgaatgaatgtgccagccagccctgccagaatggaggcacctgcacccacggcatcaacagcttccgctgccagtgcccagctggctttggaggccccacctgtgaaacagcccagagcccctgtgacaccaaggagtgccagcacggcggccagtgccaggtggagaatggcagcgctgtgtgtgtgtgccaggccggctacaccggggccgcctgtgagatggatgtggatgactgcagcccagacccctgcctgaatggaggcagctgtgtggacctggtgggcaactacacctgcctgtgtgccgagcccttcaagggcctgcgctgtgagaccggggaccaccctgtgcctgatgcctgcctgagcgccccctgccacaacggcggcacctgtgtggatgctgaccagggctacgtgtgtgagtgcccagagggcttcatgggcctggactgccgggagcgggtgcctgatgactgtgaatgtagaaatggaggccgctgcctgggcgccaacaccaccctgtgccagtgccccctgggcttcttcggcctgctgtgtgaatttgagatcacagccatgccctgcaacatgaacacccagtgcccagatggcggctactgcatggagcacggcggcagctacctgtgtgtgtgccacacagaccacaatgccagccacagcctgcccagcccctgtgacagcgacccctgcttcaacggcggcagctgtgatgcccatgatgacagctacacctgtgagtgcccccggggcttccacggcaagcactgtgagaaggcccggccccacctgtgcagcagcggcccctgcagaaatggaggcacctgcaaggaggccggcggggagtaccactgcagctgcccctaccgcttcaccggccgccactgtgaaattggcaagccagacagctgtgccagcggcccctgccacaacggcggcacctgcttccactacatcggcaagtacaagtgtgactgccccccaggcttcagcggccgccactgtgagatcgcccccagcccctgcttccgcagcccctgtgtgaatggaggcacctgtgaagatcgggacacagacttcttctgccactgccaggccggctacatgggccgccgctgccaggccgaggtggactgtggccccccagaggaggtgaagcacgccaccctgcgcttcaacggcacccggctgggcgctgtggccctgtatgcctgtgaccggggctacagcctgagcgcccccagccgcatccgggtgtgccagccccacggcgtgtggagcgagcccccccagtgcctggagattgatgagtgccgcagccagccctgcctgcacggcggcagctgccaggacagagtggccggctacctgtgcctgtgcagcacaggctatgaaggagcccactgtgagctggagagagatgagtgccgggcccacccctgcagaaatggaggcagctgcaggaacctgcccggggcctacgtgtgccgctgcccagctggctttgtgggcgtgcactgtgaaacagaggtggatgcctgtgacagcagcccctgccagcacggcggccgctgtgagagcggcggcggggcctacctgtgtgtgtgcccagagagcttcttcggctaccactgtgagaccgtgtctgacccctgcttcagcagcccctgtggcggccggggctactgcctggccagcaatggcagccacagctgcacctgcaaggtgggctacaccggggaggactgtgccaaggagctgttccccccaacagccctgaagatggagcgggtggaggagagcggcgtgtccatctcctggaacccccccaacggccctgctgcccggcagatgctggatggctatgctgtgacctacgtgtccagtgatggcagctacagaagaacagactttgtggacaggaccaggagcagccaccagctgcaggccctggccgccggccgggcctacaacatctctgtgttttctgtgaagaggaacagcaacaacaagaatgacatcagcaggcctgctgtgctgctggcccggacccggcccaggcctgtggagggctttgaggtgaccaacgtgacagccagcaccatctctgtgcagtgggccctgcaccgcatcagacatgccaccgtgtctggagtgcgggtgtccatccgccaccctgaggccctgcgggaccaggccacagatgtggacagatctgtggaccgcttcaccttccgggccctgctgcccgggaagcgctacaccatccagctgaccaccctgagcggcctgcggggggaggagcaccccacagagagcctggccacagcccccacccacgtgtggacccggcccctgcccccagccaacctgacagctgcccgggtgacagccaccagcgcccacgtggtgtgggatgcccccaccccaggcagcctgctggaggcctacgtgatcaacgtgaccaccagccagagcaccaagagccgctacgtgcccaacgggaagctggccagctacacagtgcgggacctgctgcccggccgccgctaccagctgtctgtgattgctgtgcagagcacagagctgggcccccagcacagcgagcccgcccacctgtacatcatcaccagccccagagatggagctgaccggcgctggcaccagggcggccaccacccccgggtgctgaagaaccggcccccaccagcccggctgcctgagctgcggctgctgaatgaccacagcgcccctgagacccccacccagcccccacgcttcagcgagctggtggatggccggggccgggtgtctgccaggtttggaggcagccccagcaaggccgccaccgtgcgcagccagcccacagccagcgcccagctggagaacatggaggaggcccccaagagggtgtccctggccctgcagctgcctgagcacggcagcaaggacatcggcagcgagagcgctgccctggtgggcaccctgggcctgacagactgcagccagggcccctag

SEQ ID NO: 36464 - DNA, 4059 bp, Artificial Sequence
  derived and/or modified sequence
atgagacatggagtggcctgggccctgctggtggccgccgccctgggcctgggcgcccggggcgtgagaggagctgtggccctggccgacttctacccctttggagctgagagaggagatgctgtgacccccaagcaggatgatggcggcagcggcctgcggcccctgtctgtgcccttccccttctttggagctgagcacagcggcctgtatgtgaacaacaacggcatcatctccttcctgaaggaggtgtcccagttcacccctgtggccttccccatcgccaaggacagatgtgtggtggccgccttctgggcagatgtggacaacagaagagctggagatgtgtactaccgggaggccacagatcctgccatgctgcggcgggccacagaagatgtgcgccactacttccctgagctgctggacttcaatgccacctgggtgtttgtggccacctggtacagagtgaccttcttcggcggcagcagcagcagccctgtgaacaccttccagacagtgctgatcacagatggcaagctgtccttcaccatcttcaactatgagagcatcgtgtggaccaccggcacccacgccagcagcggcggcaatgccaccggcctgggcggcattgctgcccaggccggcttcaatgctggagatggccagcgctacttcagcatccctggcagcaggacagctgacatggccgaggtggagaccaccaccaacgtgggcgtgcccggccgctgggccttcagaattgatgatgcccaggtgcgggtgggcggctgcggccacaccacctctgtgtgcctggccctgcggccctgcctgaatggaggaaaatgtattgatgactgtgtgacaggcaaccccagctacacctgcagctgcctgagcggcttcaccggccgccgctgccacctggatgtgaatgaatgtgccagccagccctgccagaatggaggcacctgcacccacggcatcaacagcttccgctgccagtgcccagctggctttggaggccccacctgtgaaacagcccagagcccctgtgacaccaaggagtgccagcacggcggccagtgccaggtggagaatggcagcgctgtgtgtgtgtgccaggccggctacaccggggccgcctgtgagatggatgtggatgactgcagcccagacccctgcctgaatggaggcagctgtgtggacctggtgggcaactacacctgcctgtgtgccgagcccttcaagggcctgcgctgtgagaccggggaccaccctgtgcctgatgcctgcctgagcgccccctgccacaacggcggcacctgtgtggatgctgaccagggctacgtgtgtgagtgcccagagggcttcatgggcctggactgccgggagcgggtgcctgatgactgtgaatgtagaaatggaggccgctgcctgggcgccaacaccaccctgtgccagtgccccctgggcttcttcggcctgctgtgtgaatttgagatcacagccatgccctgcaacatgaacacccagtgcccagatggcggctactgcatggagcacggcggcagctacctgtgtgtgtgccacacagaccacaatgccagccacagcctgcccagcccctgtgacagcgacccctgcttcaacggcggcagctgtgatgcccatgatgacagctacacctgtgagtgcccccggggcttccacggcaagcactgtgagaaggcccggccccacctgtgcagcagcggcccctgcagaaatggaggcacctgcaaggaggccggcggggagtaccactgcagctgcccctaccgcttcaccggccgccactgtgaaattggcaagccagacagctgtgccagcggcccctgccacaacggcggcacctgcttccactacatcggcaagtacaagtgtgactgccccccaggcttcagcggccgccactgtgagatcgcccccagcccctgcttccgcagcccctgtgtgaatggaggcacctgtgaagatcgggacacagacttcttctgccactgccaggccggctacatgggccgccgctgccaggccgaggtggactgtggccccccagaggaggtgaagcacgccaccctgcgcttcaacggcacccggctgggcgctgtggccctgtatgcctgtgaccggggctacagcctgagcgcccccagccgcatccgggtgtgccagccccacggcgtgtggagcgagcccccccagtgcctggagattgatgagtgccgcagccagccctgcctgcacggcggcagctgccaggacagagtggccggctacctgtgcctgtgcagcacaggctatgaaggagcccactgtgagctggagagagatgagtgccgggcccacccctgcagaaatggaggcagctgcaggaacctgcccggggcctacgtgtgccgctgcccagctggctttgtgggcgtgcactgtgaaacagaggtggatgcctgtgacagcagcccctgccagcacggcggccgctgtgagagcggcggcggggcctacctgtgtgtgtgcccagagagcttcttcggctaccactgtgagaccgtgtctgacccctgcttcagcagcccctgtggcggccggggctactgcctggccagcaatggcagccacagctgcacctgcaaggtgggctacaccggggaggactgtgccaaggagctgttccccccaacagccctgaagatggagcgggtggaggagagcggcgtgtccatctcctggaacccccccaacggccctgctgcccggcagatgctggatggctatgctgtgacctacgtgtccagtgatggcagctacagaagaacagactttgtggacaggaccaggagcagccaccagctgcaggccctggccgccggccgggcctacaacatctctgtgttttctgtgaagaggaacagcaacaacaagaatgacatcagcaggcctgctgtgctgctggcccggacccggcccaggcctgtggagggctttgaggtgaccaacgtgacagccagcaccatctctgtgcagtgggccctgcaccgcatcagacatgccaccgtgtctggagtgcgggtgtccatccgccaccctgaggccctgcgggaccaggccacagatgtggacagatctgtggaccgcttcaccttccgggccctgctgcccgggaagcgctacaccatccagctgaccaccctgagcggcctgcggggggaggagcaccccacagagagcctggccacagcccccacccacgtgtggacccggcccctgcccccagccaacctgacagctgcccgggtgacagccaccagcgcccacgtggtgtgggatgcccccaccccaggcagcctgctggaggcctacgtgatcaacgtgaccaccagccagagcaccaagagccgctacgtgcccaacgggaagctggccagctacacagtgcgggacctgctgcccggccgccgctaccagctgtctgtgattgctgtgcagagcacagagctgggcccccagcacagcgagcccgcccacctgtacatcatcaccagccccagagatggagctgaccggcgctggcaccagggcggccaccacccccgggtgctgaagaaccggcccccaccagcccggctgcctgagctgcggctgctgaatgaccacagcgcccctgagacccccacccagcccccacgcttcagcgagctggtggatggccggggccgggtgtctgccaggtttggaggcagccccagcaaggccgccaccgtgcgcagccacgtgcccggcaactgcagcgagaacccctgccagaatggaggcacctgtgtgcctggagcagatgcccacagctgtgactgtggccctggcttcaagggcagaagatgtgagctggcctgcatcaaggtgtcccggccctgcaccaggctcttcagcgagaccaaggccttccctgtgtgggagggcggcgtgtgccaccacgtgaagcagagcaagagccagaccctggagaagagctag

SEQ ID NO: 36465 - DNA, 4242 bp, Artificial Sequence
  derived and/or modified sequence
atgcggcacggcgtggcctgggccctgctggtggccgccgccctgggactgggtgccagaggcgtgaggggggccgttgccctcgcggatttttacccatttggagctgagcgcggggatgctgttactcccaagcaagacgacggaggcagcggtttaagacctctcagcgtgccatttcccttcttcggagccgaacactcaggtttatatgtcaacaacaatgggatcattagtttccttaaagaggtgtcccagtttaccccggttgccttccctatcgcaaaagaccgctgtgtggtggcggcattctgggcggacgtcgacaaccggcgtgcaggagacgtatactatcgcgaggcaactgatcctgctatgcttaggcgtgcgaccgaagacgtgagacactatttcccagagctcctggacttcaatgcaacatgggtcttcgtggccacatggtaccgggttactttcttcggcggtagctcctcgtccccggttaacacctttcagactgtcttgataaccgatggcaagctgagctttaccatcttcaattatgagagtatcgtctggaccaccgggacacacgcgagctcgggaggaaacgccacaggtttgggcggcattgctgcccaggccggttttaatgcaggagacggacagagatacttcagtataccgggttcaaggacagctgacatggctgaagtggagactaccactaacgttggggtccctggcagatgggcttttcgaatagatgacgcccaggtccgagtaggcggctgtggccacacgactagcgtttgtcttgctctgcgaccttgcttgaacggaggcaagtgtatcgatgattgcgtgacaggcaacccaagttatacatgctcctgtctgtctggttttacaggacgcaggtgtcacctggacgtgaacgaatgcgcctcccaaccttgccaaaatggcggcacttgcacccatggtattaattctttcaggtgccagtgtcccgccggctttggcggtccaacgtgcgaaacagcccagagcccctgcgatactaaggagtgtcagcacgggggacagtgtcaagtggagaacggaagcgcagtgtgtgtttgccaggccggatacacaggggcagcctgcgagatggacgttgatgattgctccccagacccatgccttaatggcggatcctgcgtggatttggtgggcaattatacatgcctctgtgcggaaccatttaagggcctgagatgcgaaactggcgatcaccccgtgcctgacgcctgcctatcggccccctgccacaatggcggcacatgcgtcgacgctgatcaaggatacgtctgcgaatgccccgagggtttcatggggctggattgtagggagcgggtgcccgatgactgcgaatgtagaaacggcggcagatgcctgggggcaaatacaaccttatgtcagtgcccgctgggcttttttggcctgttgtgcgagtttgaaattactgccatgccttgtaatatgaatactcagtgtccggacgggggctactgtatggagcacggaggatcatacttatgcgtttgtcacactgatcataacgccagccatagcttgcctagtccgtgtgactctgacccgtgcttcaacggcggttcttgcgatgcacatgatgatagctatacatgcgagtgcccccgagggttccatggaaagcactgtgaaaaggcacgcccgcacctctgttcttccggtccttgcagaaacggcggcacttgtaaggaggccgggggcgaataccactgtagctgtccttatcgttttacaggccggcactgcgaaattggaaaaccagattcatgcgcatcagggccatgtcacaacggcggaacctgtttccattatatcggtaaatataaatgcgattgccccccaggtttcagtggccgccattgtgaaatagcgccttcaccatgcttccggtccccatgcgtgaacggtgggacatgcgaggatagggatacagactttttctgccattgccaggccggctacatgggacgcagatgtcaagctgaagtcgactgtggcccccctgaggaagtgaaacacgctactctgcgtttcaatggcacccgtttgggggctgtcgccctgtatgcttgtgacagggggtactccctcagcgccccctctagaattagggtctgccaaccacatggagtgtggtccgaaccgccccagtgcctggagatcgatgagtgccgatcccagccctgtcttcacggcggatcttgtcaggacagggtagctgggtacctatgtttgtgtagtactggttacgagggcgcacattgcgaactcgagcgagacgaatgcagagcccatccgtgtcgaaatggcggaagctgccgcaatctgccaggggcctatgtgtgtaggtgtcccgctggcttcgtgggtgtccattgcgagaccgaggtagacgcgtgtgacagttctccatgccagcatggcgggcggtgcgagtcaggcggaggcgcctatctatgtgtgtgcccagagagtttctttggctatcactgcgaaaccgtgtccgatccgtgtttttcaagcccttgtgggggtaggggctattgcctcgcctccaatggatcccatagttgcacatgtaaagtcgggtatacaggcgaggactgcgctaaggagctctttcctccaaccgcactgaaaatggaaagagttgaagagtccggggtaagcatctcttggaacccccctaatggcccagccgcgaggcagatgctcgacggatacgctgttacctatgtttccagcgacggaagctaccgccggacagattttgttgacaggactcggtctagtcaccaattacaggccctggctgcaggacgagcctataatatcagtgtattttcagtgaaaaggaatagcaacaataagaatgacataagccggccggcagtgctgcttgcacggacgaggccaagacctgtggaaggctttgaagtaacaaacgtgacagcaagcaccatttctgtgcagtgggctctgcaccgcatcaggcacgcgactgtgtccggcgttcgcgtatctattcggcacccagaagctctgagagaccaggcaacggatgtggaccgatccgtggaccgatttacattccgggccttgcttccagggaaaaggtatacgatccaattgaccaccttaagcggattacggggcgaggagcaccccaccgaaagtctggcaaccgcaccaacccacgtttggacccgccccctgcctccagccaacctgaccgccgcccgggtgacggccaccagtgcacacgtcgtgtgggacgcacccacccccgggtcattactcgaagcgtatgtaatcaacgttactacaagccagagcacaaaaagcagatacgttccaaatgggaagctcgcctcctacacggtccgggacctgctcccaggtcgcaggtaccagctttccgtcattgctgtacagtccacagagctgggaccgcaacactccgagccggcccacctatacataatcacgtctccccgggacggagctgatcggcgatggcatcagggtggtcaccacccgcgggttctaaaaaatcggccaccccccgctcgcctacccgagctgcgactgctgaacgaccatagcgccccggagaccccaacccaaccaccacggttttctgagcttgtggacggccgcgggcgtgtgtccgctagattcggaggctctccaagtaaggccgccactgtgcgttcacagcccacagccagcgctcagctggaaaatatggaggaagcccccaaaagagtcagcctcgctttgcagttgcccgaacatggctcaaaagacattggcaatgtgcctgggaattgctctgaaaatccctgccagaacgggggcacttgtgtgcctggcgcagatgcacactcatgcgattgcgggccaggattcaagggtagacgctgcgagctggcttgcatcaaagtttcgcgtccatgtactcggctgttttccgaaactaaagccttccccgtgtgggaaggcggtgtatgtcatcacgtctataagcgtgtttaccgtgttcatcaggatatctgttttaaggagtcctgcgagtctacaagcctgaagaaaacccccaaccgcaaacagagcaagtcgcagaccctggagaaaagctag

SEQ ID NO: 36466 - DNA, 4143 bp, Artificial Sequence
  derived and/or modified sequence
atgcggcacggcgtggcctgggccctgctggtggccgccgccctgggcctcggcgcccgcggcgtacgaggggctgtggcccttgcagatttttacccatttggagctgaacggggcgacgcagtcactcccaaacaggacgatgggggtagtgggctgcggcctttatcggttccctttccattcttcggcgccgagcattcaggactttatgttaacaataatggcatcatatctttcctgaaagaggtttcacagttcactcctgtcgcttttccgattgctaaagatcgatgcgtcgtcgcggcattttgggctgatgttgataacagacgggcaggcgacgtatactacagagaggctacagacccagctatgctgagaagagctacggaagacgttcgccattattttcccgagttactggacttcaatgccacttgggttttcgttgctacatggtatcgtgtgaccttttttggggggtcttcttctagcccagtcaacaccttccagacggtcctaattacagatggaaaactttcgttcacaatcttcaactacgaatcgatcgtgtggacaaccggaacacacgcttctagtggcggaaatgccaccggtttaggcggcatcgcagctcaggcaggcttcaatgctggcgacggccagcgttatttctcaattccagggtctcgtaccgctgacatggccgaggtcgagactacaaccaatgtaggcgtgcccggccgttgggccttcaggatcgacgatgcccaggttcgggttggtggatgtggacacactacgagtgtatgcttggcactgagaccatgtttaaacggagggaaatgcattgatgactgcgtgaccgggaacccatcctacacctgctcatgcctatctgggttcactggccggaggtgtcatttagatgtgaatgagtgcgcctcccagccatgtcaaaatggaggcacctgcacacatggtataaactcgtttagatgccagtgccctgctggcttcggcggtcccacgtgcgaaactgcacagtccccctgtgacacgaaagaatgccaacatggcgggcagtgtcaggtggagaacggctctgccgtgtgtgtttgccaggccggatatacgggcgctgcttgcgaaatggatgtggacgactgttcaccggacccttgcctgaacggcgggtcttgcgtagatctcgtcgggaactatacttgtctgtgcgccgaaccttttaagggcctgagatgcgagacaggcgatcacccagtgcccgacgcctgcctgtctgccccttgccacaatggtgggacctgcgtggacgcggaccagggatatgtatgcgaatgccctgaaggcttcatgggcctcgactgccgagaacgtgtgccagacgactgcgagtgccgcaatggggggcggtgccttggagctaatacaaccctctgtcagtgcccgttgggattctttgggctgttgtgcgagtttgagataaccgctatgccatgcaatatgaacactcagtgccctgacggcggatactgtatggaacacggtggttcgtacctgtgcgtttgccacaccgatcacaacgcttcgcatagccttccaagcccatgtgattctgatccctgcttcaatggtgggtcatgtgacgcgcacgatgacagctatacatgtgagtgtccacgggggttccacggcaaacattgcgaaaaagctcgcccacatctctgttccagcggaccctgccggaatggaggtacttgcaaagaagccggcggcgagtatcactgcagctgcccctaccggttcaccggaagacactgtgagataggtaagccggacagttgtgcaagcggtccctgccacaacggcggaacatgttttcattatatcggtaagtataaatgtgattgccctccagggttctctggcagacactgtgagattgccccgagcccttgttttagatctccctgcgtgaacggcggcacctgcgaagacagagacacagattttttttgtcactgtcaggccggctacatgggccgaaggtgtcaggccgaggtggactgtggtccacccgaggaggtgaagcatgcaacactgcgtttcaatggaacgcgcttgggggccgtggccctttatgcttgcgacagaggatactccctgtccgcccccagccgaatcagggtttgccagccacacggggtgtggtcggagcccccacagtgcctggaaattgatgagtgcagatctcaaccctgtctgcacggcggaagctgtcaagaccgggtggccggatacttgtgcctctgctctaccggttacgagggggcccactgtgagctcgagagagacgaatgtcgcgcacatccttgtcgcaatggtggttcttgtcggaacctgcccggcgcctacgtttgtcggtgccccgcaggttttgtaggcgtccattgcgagacggaggtagatgcttgtgactccagcccttgtcagcatggtgggcggtgtgaatctgggggcggcgcatatctctgtgtctgtccagaatccttttttggttatcactgcgagacagtgtctgatccatgcttctcctccccatgtggcggccgcgggtattgcttagcctccaatggctcacactcatgcacatgtaaggtaggctatactggagaggattgtgccaaagaactatttccaccgacagcattgaagatggagcgagttgaggaatctggagtgagtattagctggaaccctcctaacggacctgccgctaggcagatgctggacggatacgcagtcacgtacgtatcttccgacggttcttatcggaggacagattttgtggatcggacccggtcctcacatcagctgcaggccctggcagcaggccgagcctataatatttcagtcttttctgtaaagcgcaacagtaataacaaaaacgatatttcaagacctgcagttctcctagcccggaccaggccccggccagtggaaggattcgaagtcactaacgtaacagctagcaccatctccgtacaatgggctcttcatcgcatcagacacgctaccgtctccggggtacgggtgagtatccgccaccctgaagcactgcgagatcaggccactgacgtcgatcgaagcgtggataggtttaccttcagggctctgctgccagggaagcgttataccatccagttaactaccttgtccggcctccggggtgaggaacatcctaccgagagtctggctacagcaccaacccatgtctggactagacctcttccccccgccaatttgaccgcggccagagttacggccacctctgctcacgtcgtgtgggatgcccccacacctggctccctgttggaggcctacgtaatcaatgtgacaacaagtcagagcacaaagtcgcgctacgtacccaatggcaagctggcatcctacacggtgcgagatttattacctggccggcgctaccaattgagcgtcattgccgtgcagtctaccgaactgggtccccagcattccgaaccagctcatctgtacataattacaagtcctcgagacggtgctgaccgtaggtggcatcaaggaggacaccaccctcgggtactgaaaaatcgccccccccctgccagattgccggagcttcgcttactcaatgaccactctgcgcctgagacacctacccagccgccgcggttctctgagctcgtggacggcaggggccgggtttccgcccggtttggtggctctcccagtaaggctgccaccgtgaggtcacatgtgcctgggaattgctcggagaacccctgccagaatggcggcacctgtgtgcccggggcggacgctcattcttgcgattgtggcccgggatttaagggccgcaggtgcgagttggcttgcattaaggttagcaggccctgcactcgcctgttctcagaaactaaagcttttccagtctgggagggaggcgtctgccatcatgtgtataagcgtgtttacagagttcaccaggatatctgttttaaggagtcctgcgaatctacatcactgaaaaagacccctaatagaaagcagagcaagagtcagactctggaaaaaagctag

SEQ ID NO: 36467 - DNA, 3975 bp, Artificial Sequence
  derived and/or modified sequence
atgcggcacggcgtggcctgggccctgctggtggccgccgccctgggactcggagcaagaggggtgcggggagcagttgccctggcagacttttaccctttcggagcggagaggggagacgcagttacccctaagcaagacgacggtggctcaggcctgagaccactgagcgtgccgtttcccttctttggagctgagcactccgggctctatgtgaacaacaacggcatcatttcttttcttaaggaagtcagtcaatttacgccggttgcgttccccatcgccaaggatagatgtgtcgtcgctgcgttttgggccgatgtggataaccgaagggccggggacgtgtactatcgcgaagcaacagaccccgccatgctgagacgcgccacagaggacgttaggcattacttccccgaactgctggacttcaatgcaacttgggtgtttgtagcaacttggtaccgggtgacttttttcggagggtcaagctcctcgcccgtgaatactttccagactgtactcatcaccgatggtaagctgtcattcacaattttcaactatgaatccatcgtctggactaccgggacacatgcctcttccggcggtaatgcgactgggctagggggtattgccgcccaggctggctttaatgctggtgacgggcagcgctattttagcattccaggtagtcgcacagctgacatggcagaagtcgagaccacaaccaatgtgggagtgccagggaggtgggcttttaggatcgacgatgctcaggtgagagtaggcggttgtggacacactaccagcgtgtgtctagcccttcgtccttgcctcaacggcggcaagtgcattgacgattgtgttactggtaaccctagctacacctgctcatgcctatccggttttactgggaggcgatgtcatctcgatgtcaacgagtgcgcctcccagccctgtcaaaatggtggcacatgtactcacggcataaactcattcagatgccaatgtcctgccggcttcggcgggcccacttgcgagactgcccagagcccctgtgacacgaaggagtgccagcacggtggccagtgccaggttgagaacggaagcgcagtttgcgtgtgtcaggctggctacaccggagccgcttgcgagatggatgtcgatgactgctcacctgatccatgtttgaacggcggatcctgtgtggacttggtgggaaattatacttgtctgtgcgctgagccctttaaaggactgaggtgtgaaacaggcgaccacccagtacccgacgcctgcctgagcgcaccgtgtcacaacgggggaacatgcgtggatgccgaccaaggatatgtctgtgaatgtcccgaagggttcatgggtcttgattgcagggagagagtacctgacgattgtgaatgtcggaacggtggaagatgtctgggagccaatacgacgttgtgccagtgtcccctcggtttcttcggattgctgtgcgagtttgaaattacggctatgccctgcaacatgaatacccagtgcccagacggtggttattgtatggaacatggtggctcctacctgtgtgtgtgtcataccgaccacaacgcatcgcacagtctgcccagcccatgcgacagtgacccctgctttaatggaggtagctgtgacgcccacgatgatagctacacctgtgaatgccctcggggcttccacggcaaacactgtgagaaagcccgcccacatctctgttcctcagggccgtgtagaaatggggggacgtgcaaagaggctggaggcgagtaccactgttcctgtccatacagattcacaggacggcactgtgaaatcggaaagccagattcttgtgcatccgggccttgtcacaacggcggtacatgtttccactacatcggaaaatacaagtgtgactgccctccaggctttagcggtcgccactgcgagattgctccaagcccttgttttagaagcccctgcgttaacggaggaacctgcgaggatcgagataccgattttttctgccattgccaggcagggtacatggggcgccgttgtcaggccgaggtcgattgcggcccaccagaagaggtgaagcatgccaccctgagatttaacggcacccggttgggagccgtcgcactctacgcttgcgatcgaggatactctctgtccgccccatcgcgaattcgagtgtgtcagccccatggcgtctggtcagaaccaccccagtgcctggagattgatgagtgtcgctcccagccctgtctgcacggcgggtcctgtcaggaccgcgtcgctggctatctctgtctgtgcagtacgggctacgagggggcccattgtgaattggagcgcgacgaatgccgggcccatccgtgccgaaacggtgggtcatgtcgtaatctccctggcgcgtacgtctgtcgttgcccggccggcttcgtgggagtgcattgcgaaacagaagtggatgcctgtgactcttccccttgccaacatggaggccgctgcgagagcggcggtggagcttatttgtgcgtctgccccgaatcctttttcggctaccattgtgagacagtttccgatccctgttttagttccccatgcggcggcaggggttactgcctcgcatctaacggctcccacagttgcacctgcaaggtaggctacactggggaagactgcgctaaggagttgtttccacccacggctttaaaaatggaaagagtggaggaaagcggggtatctatatcttggaatccacccaacgggcccgcagctaggcaaatgcttgacggttatgctgtgacttacgtatcctcagacggatcatataggagaactgattttgtggaccgcacacgctcaagccaccagcttcaggcccttgcagccggtagagcatacaatatatctgtattttcagttaaacggaactctaataacaaaaatgatatcagcaggcccgctgtgttgcttgcaaggacacgcccccgtccggttgaggggtttgaggtgacgaacgtgactgctagtactatttctgtacagtgggccctgcatcgaatcaggcacgccactgtaagtggcgtgagagtcagcatccggcaccctgaagcccttcgtgaccaggccacagatgtggacagatccgtggacagattcaccttccgtgccctgctgcctggaaagagatatacaatccaactgacaaccctgtccgggttgcgcggagaggaacatcccacagaatcacttgccaccgcccccacacatgtttggacaaggcctttgcctcctgccaatctgaccgcggcaagggtgaccgccacaagcgcccatgtggtctgggatgcccccacgcctggctccctgttggaagcttacgtgatcaacgttacgacgtcacagtcgacaaaatctcgctacgtgcctaacggcaagctggcctcatatactgtgcgagatcttctgcccggtcggcggtaccagctgagtgtaatcgctgtgcagagcactgaactggggccgcagcattccgaacctgcccatctctatatcataactagccctcgggacggtgccgacaggagatggcatcagggaggccatcacccccgggtgcttaaaaacaggccgccgccagctaggctgcctgaactgcggttgttgaacgatcactccgcccctgaaacacccacacagccccccaggttcagcgaattagtcgacggacgagggcgcgtctcagccaggttcggcgggagtccttctaaagctgccacagtaaggtcccagccaaccgcaagcgcgcaactcgaaaacatggaagaagcgcccaagcgggttagtctggctctccagctcccggagcacggatccaaagatatcggaagcgagagtgctgcactcgtgggaacgctaggtctgaccgattgttcacaaggaccatag

SEQ ID NO: 36468 - DNA, 4059 bp, Artificial Sequence
  derived and/or modified sequence
atgcggcacggcgtggcctgggccctgctggtggccgccgccctgggcctgggtgcccgaggagttaggggagctgtagccctggcagacttctatccttttggcgctgagaggggtgacgcagtgacaccaaagcaggacgacgggggctctggcctgcgacccttgagtgttccattccccttcttcggtgctgagcattctgggctttatgttaataacaacggaataatcagctttctgaaagaagtttctcagttcacaccagtggcattcccaatcgcgaaagatcggtgcgtcgtggccgcattttgggccgatgtggacaacagaagagctggcgacgtgtactacagggaagcaactgaccccgcaatgctcagacgcgccactgaagatgtgcggcactacttcccagagctcttggactttaatgctacctgggtattcgtggccacatggtacagagtcacgttttttggaggctcttccagctctcccgtgaacacattccagactgtcctgatcaccgacggaaaactgagctttactattttcaactacgaaagcatcgtctggactacggggacccacgcctcgtctggaggaaatgccaccggactgggaggaattgccgcccaggctgggttcaatgctggtgacgggcagcggtacttttccattccggggagcaggaccgctgatatggcggaggtggaaactacaactaacgtgggggtgccggggaggtgggcctttagaatcgatgacgcccaggtgagggtaggcggatgcggccataccacttccgtttgcctggccctgcgcccttgcctaaatggtgggaagtgcattgatgattgtgtaacaggaaatcctagctatacttgcagttgcctcagcggattcactggccgcaggtgccacctagacgttaatgaatgcgccagtcaaccgtgtcagaacggaggaacctgcacccacggaatcaactcatttcgctgccagtgcccagccggtttcgggggccccacatgcgagacagcgcagtcaccatgcgacacgaaagagtgccagcacggaggccagtgtcaggtcgagaatggctccgcagtctgcgtgtgccaagctggctataccggtgcagcctgcgagatggacgtggacgactgttctcctgatccatgtctcaacggaggttcatgcgtagacctcgtgggcaattatacatgcctatgtgccgaaccttttaaaggcttgaggtgcgaaacgggggaccatcccgtgccagatgcttgcctctccgcaccgtgccataatggcgggacctgcgttgacgctgatcagggctatgtgtgtgagtgtccagaaggctttatgggactggattgtcgcgaacgagtccctgacgattgtgagtgtcggaacggcggtcgctgcctgggagccaacactactctgtgtcagtgcccactggggttttttgggttactatgtgagttcgaaatcacagctatgccttgcaatatgaacacccaatgtcccgatggcgggtactgtatggagcatggcggcagctatctgtgcgtatgtcatactgatcacaacgcatcccacagcctgccatctccctgcgacagcgacccctgcttcaacggaggaagttgtgacgctcacgacgacagctatacatgcgagtgcccgaggggctttcacggcaaacattgcgagaaagctaggccccacctttgtagtagcggtccttgccgcaatggtggaacctgcaaagaggccggtggtgagtaccattgctcatgcccctaccggttcaccggacgccactgcgaaattgggaagcccgattcgtgcgcctcgggaccctgccacaacggagggacctgttttcattacataggcaagtacaaatgcgattgcccccccggattctctggtagacactgcgagattgcacctagtccgtgtttccggagtccgtgtgttaacggcggcacatgtgaggaccgtgatacagattttttttgccattgtcaggctgggtacatgggaagacgctgtcaagcagaagtcgactgcggaccgcccgaggaggtgaaacatgccactctccgatttaatgggactagactcggtgccgtggcactgtacgcctgcgataggggatattctctgtccgctcctagccgcattagggtctgccagccccacggtgtgtggagtgaaccaccccagtgcctcgaaatcgacgagtgccggagccagccatgtctgcacggtggttcctgtcaggatagggtcgccggctacttatgcctgtgttccaccggatatgagggagcccactgcgagttggagcgagatgaatgccgggctcacccttgcagaaacgggggtagctgtcgaaacttgccaggcgcttatgtgtgtagatgccccgctgggttcgtgggggtgcactgcgagacagaggtagacgcctgcgattcgtcaccctgtcagcatggaggacggtgtgaatctggtggcggggcatacttgtgtgtgtgccctgaatcctttttcgggtatcactgcgagacagtttcggatccctgctttagctccccttgtggtggtcgaggatactgcctcgcctcaaacggctctcactcatgcacatgcaaagtgggctacaccggagaggattgcgccaaggaactctttccacccaccgcccttaagatggagagagtcgaagagtccggagttagcatctcatggaatccacctaatgggcctgctgcccggcagatgctcgatgggtatgctgtgacgtacgtgtcatcagacggaagctaccgtagaacggatttcgtcgatcggacgcggagcagtcatcagctgcaggctcttgccgctggcagggcctacaacatcagtgtgttttctgtgaaacgtaactccaataataagaacgacatctcaagacccgctgtactattggccagaacccgccctcgacctgtcgaagggtttgaagtgaccaacgtgaccgccagcacgatttccgtacaatgggccttacatagaatccggcatgctacagtttctggcgtgcgggtgtcaattcgacatcccgaggcgctccgtgaccaggctaccgacgtcgatcgctcagttgatcgctttactttccgggccctgctgcctggaaagagatacacaattcagctgaccaccctgtccgggcttcgaggagaggagcatcccaccgaatccctggccaccgctcctacgcatgtttggacacggcctctgcccccagcaaatctgaccgccgcaagagtgacagctacaagcgcgcacgtcgtgtgggacgccccgacacctgggagcctgcttgaagcttacgttattaacgttaccacatcccaaagtaccaagtcgcgctacgtcccaaatggcaaattggcctcttatactgtcagggatttactccccggccggcgatatcagctgtcagttatcgccgtgcagtcaaccgaactggggcctcaacactcggaacctgcccatctgtacattattacaagcccgcgggatggtgctgataggaggtggcatcagggtgggcaccaccctcgggtgcttaagaaccgtcccccgcctgccaggttgcccgagctgcgactgctgaacgatcatagcgcccccgagacaccaactcagccacctagattttcagaactggttgatgggcggggaagagtgtccgcgcgcttcggaggaagcccctccaaagccgcaacggtaaggagccatgtccccgggaattgctctgagaatccttgtcagaacggaggtacttgcgtgccgggggcggatgcccactcttgcgattgtgggcccgggttcaaaggcaggcgatgtgaactggcgtgcataaaggtttcgagaccatgcactcggctgttctccgagaccaaggcattccccgtctgggaggggggagtttgccaccacgtgaaacaatcaaaaagccagacgttagagaagtcttag

SEQ ID NO: 36469 - RNA, 4242 nt, Artificial Sequence
  derived and/or modified sequence
augcgccacggugucgcuugggcccuguuaguggcugccgcacugggucuuggagcacgcggcgugcgcggggcuguggcccuagcugauuucuacccuuuuggggccgagcguggcgacgcugugacgccaaagcaggacgacgguggcucgggucugcgcccucuguccguccccuucccauuuuuuggggcagagcacagcggucuguaugugaauaauaaugggaucaucaguuucuugaaagaggugagccaauucacaccuguugccuuuccuauugccaaggaccgcugcgugguugccgcauucugggcagacguggacaacagacgggcuggagacgucuacuacagagaagccaccgacccagccaugcugaggcgagccacggaggacguccggcacuacuuuccugagcuucuagacuucaacgcuacuuggguguucguggcuacuugguauagggugaccuucuucggcggguccucguccucaccugucaauacauuucagacaguguuaaucacugauggaaagcucucauucacaauuuucaacuaugaauccauaguauggaccacuggcacacacgccaguucaggaggaaaugccaccggccuuggcggcaucgccgcucaggcuggguuuaacgccggugacggccaacgguauuuuucgauccccggcagcagaacagcugauauggccgagguggaaacuaccacuaauguuggggucccaggccgcugggccuuccgcaucgacgaugcucaggucagagucggcggaugcgggcacacaaccucagucugccuagccuugcgcccaugucucaauggcgguaaauguauugacgacuguguuacagggaacccuucuuacacauguagcugccuuuccgguuuuacaggcaggcguugccaccucgaugugaacgagugugcuucacagccaugccaaaauggcgguacguguacacaugggauaaauucauuucguugucaaugucccgccgguuuuggaggcccaacgugcgaaaccgcacagucgccgugugacaccaaggaaugucagcacggugggcagugucagguggaaaacggcuccgccgugugcgugugccaggcaggauauacgggagcagcgugcgagauggauguggacgacugcaguccggaccccugccucaacggcggcucaugcguggauuuggugggcaauuauacaugccuuugcgccgagccauucaaaggccugaggugcgagacuggcgaccaucccguaccagaugcuugccuuagcgccccuugccauaauggaggcaccugcgucgacgcagaucaaggauauguuugcgaaugucccgaaggcuucaugggacuggacugucgggaacggguacccgacgacugugagugucgcaacggcggacgcugccuaggagccaacacgacacugugucaguguccauugggcuuuuuugggcucuugugugaauuugagaucacugccaugccuugcaacaugaacacccaguguccagacggaggcuauuguauggaacacggcgggaguuaucucugcguaugccacaccgaucacaaugccucacacagucugccaucccccugcgauuccgaucccugcuucaauggggguuccugcgaugcccacgaugacaguuauaccugcgagugcccacgcggauuccauggaaagcauugcgaaaaagcaagaccacaccuuugcuccucuggaccauguaggaacggcggaacaugcaaagaggcuggcggcgaauaucauuguagcuguccauaccgauucaccgggcgccauugugagaucgggaaaccugauaguugugccagcggacccugucauaacgggggaaccuguuuccacuauaucggaaaguacaagugugacugcccaccugguuucagcggucggcacugugaaauugcccccagccccugcuuucgcuccccaugcgucaacggcggaacgugugaggaccgggacaccgacuucuuuugucauugccaggcuggauauaugggacgcaggugucaagcggaagucgauugcggacccccugaggaagucaagcacgccacacuacgcuuuaauggcacacggcucggggcaguggcauuauacgcuugugauagaggauacucccuuucagccccaagcagaauuagaguuugucagccucauggaguguggucagagcccccucagugccuggagauugacgagugcagaagccagccaugccuccauggcggcucuugucaggaccgggucgccggauaucugugucugugcucaaccggauacgaaggugcucauugcgagcucgagcgagacgaguguagggcacacccuugucgcaauggagguagcugucgcaaccugcccggugccuacguauguagauguccagcuggguuuguggguguacauugcgagacagagguagacgcgugcgacagcucuccgugucagcacggugggaggugugaaucugggggaggagccuaccuuuguguguguccagaguccuuuuuuggguaccacugugaaaccguuucugaucccuguuucucauccccuugcggcggaaggggauacugccuagcaaguaacgggagucacucuugcaccuguaaaguaggauacacaggggaagacugugcuaaagaacucuucccaccaacagcauuaaagauggaacgggucgaggaaucuggggucucuauuucuuggaacccaccuaaugggccagcagcucggcagaugcucgauggcuaugcugugacuuacguuuccagcgauggauccuaccgccgaaccgacuucguagaccgcacacguuccucacaucagcugcaggccuuggcagccggacgcgccuauaauauaaguguuuucuccguaaaaagaaauuccaauaacaagaaugacaucaguagacccgccguucugcucgcaagaacgagaccuaggccuguggaggguuuugaagucacaaauguaacugcauccacuaucucagugcagugggcccuccacaggauucggcaugcuacagucucaggggucagggucuccaucaggcauccugaagcccuaagagaucaagccaccgauguggauagguccguggaccgauuuaccuuccgggcuuugcugccuggaaagcgauauacaauccaguugaccacccucagcggucuaagaggugaagaacacccuacugagagccucgccaccgcaccuacacacguguggacccgcccccugccaccagccaaccuaacagcugcaagagugaccgccaccucggcccacguuguuugggacgcuccuaccccagggucuuugcuggaggcguacgucaucaaugugacuacaucacagagcacgaagagccguuauguccccaaugguaagcucgcauccuacacaguucgcgaucuccuccccggcaggagguaucagcuguccgucaucgccgugcagucuacagagcuaggaccacaacauucggagccggcacaccuuuacaucauuaccuccccuagagacggugccgaucggcgcuggcaucaagggggacaccacccucgcguucuaaagaacagaccaccuccagcacgacugccugaacugcgccugcugaaugaccacucugccccagagacgccuacucagccuccaagauucucugaguuaguggacggccgaggaagaguaagugcuagauucggcgggagccccucaaaggccgccacggugcggagccaaccaacugcgagugcacaguuagagaacauggaggaggcgcccaagcgugucucccuagcccugcaguugccugagcacggcagcaaagacauuggcaacgugccgggaaacugcuccgagaauccuugucagaaugguggcaccugugucccuggagcugacgcacauuccugcgacuguggacccggcuucaagggccggcgaugcgaauuagccuguauuaaggucucucgcccguguacgagacuuuucuccgagaccaaagccuuccccgugugggagggcggcgucugccaucauguguacaaaagaguguacaggguucaccaagauauaugcuucaaagagucuugcgagaguacaaguuuaaagaaaaccccaaacagaaagcaaucuaaaagccagacacuggaaaaaucuuag

SEQ ID NO: 36470 - RNA, 4143 nt, Artificial Sequence
  derived and/or modified sequence
augcgucaugguguggcaugggcucuccugguugccgcugcccucgggcucggugcgaggggcgugcgcggcgcugucgcuuuggccgauuucuacccuuuuggcgccgagagaggcgacgcugucacaccaaagcaagacgacggugggucaggccugcgaccgcugucggugccauucccuuuuuuuggcgcugagcacucgggauuauacgugaauaacaauggcaucauaucuuuccugaaagaggugagccaguuuacccccguggccuucccuauugcgaaggauaggugcgucgucgcugcauuuugggcugauguggacaauaggcgugccggagauguuuacuaucgugaagcaacggacccggcuaugcuccggagggccacggaggacgugcggcacuacuuccccgagcugcucgacuucaacgcaaccuggguguucguugccaccugguacagggucacuuuuuuuggagggagcuccuccuccccggugaacacauuccaaacaguacuaauuacugaugggaaacugucuuucaccauuuucaacuaugaaucuauuguguggaccacagggacacacgcuagcucugggggaaacgcuacuggguuagguggcauugcugcacaggccggcuucaacgcuggggaugggcagcgauacuucucuauuccuggcagccggaccgcggacauggcggaagucgagaccaccacgaaugucggugugccaggacguugggcuuuucgaauugaugacgcgcaaguacgcguaggaggcugcggacauaccacuaguguuugccucgcccucagaccaugccugaauggugguaagugcauugacgauugugugaccggaaacccaagcuauacaugcuccugucuaucuggcuuuacuggaaggagaugccaccucgacgugaacgaaugugcaagucagccuugucaaaauggcgguacuuguacacacggaaucaauaguuucagaugccagugucccgcugguuuugggggacccacaugcgaaacggcucagagucccugugacacuaaggaaugucagcauggagggcagugccagguggagaauggcuccgcugucuguguuugccaggcuggcuacaccggagcugcuugcgagauggacgucgacgauugcuccccggacccaugccugaauggggggucuugcguggaccuugugggcaauuauacuugucuuugugcagaaccuuucaaaggucuacgcugcgaaacuggugaucaucccguucccgacgcaugcuuguccgccccuugucacaauggcggaaccuguguggacgcagaccagggcuaugucugcgaauguccggaaggcuuuaugggauuagacugccgagagagagugccagaugauugcgagugucgcaauggcggccgaugucugggcgccaauacuacuuugugccaguguccucucggcuucuucggucugcugugcgaguucgaaauaacagcaaugcccuguaauaugaacacucagugucccgacgggggauacuguauggagcacggcggcagcuacuugugugucugccacacagaucauaaugccucgcacucacucccaagcccaugcgacucugauccauguuucaauggcggcaguugcgaugcacaugaugacuccuacacgugugagugcccaagaggauuccacggaaaacacugcgagaaggcacguccccaccucuguagcagcggacccugucggaacggaggcacuugcaaggaagccggaggugaguaucacuguucauguccguauagauuuacuggucgacauugugagauuggaaagccugacuccugcgccuccggacccugucacaacggcggcaccugcuuucacuauauaggcaaguacaaaugcgauugcccucccggauucagcgggcgccauugugaaaucgcgccgagcccuuguuuuaggucgccaugcguuaauggaggcacgugcgaggauagggauaccgacuucuuuugccacugccaggccggcuacauggggcggaggugccaggccgaagucgacugcgguccccccgaggaggucaagcaugccacacugcgcuuuaaugguacuagacugggugccgucgcacuguacgcaugcgaccgugguuacucuuugagcgccccgucacggauacgggugugucagccccacggcguguggucagaaccaccucagugccucgagaucgacgaaugccgcagccaaccuugccugcauggcgguuccugccaagaucgcguggccggcuaucugugucuuugcuccaccgguuacgagggagcgcauugcgagcuugaacgagacgaguguagggcccauccuugccgcaacggugguucuugccggaaucuccccggggccuacguaugcagauguccugcagguuuugucgguguccauugcgaaaccgagguggacgcuugugacaguucaccaugccagcacggcgggcgaugcgaaucaggagguggcgccuaccuuugcguguguccagaaucauucuucggcuaccauugugaaacaguuuccgaucccuguuucuccuccccuuguggaggccgcggcuauugccuggcaucgaacgggucgcacucaugcacauguaagguaggcuauaccggcgaagauugugccaaggaguuauucccuccuacagcccuaaagauggaacgggucgaggagucgggggugucgauuuccuggaauccccccaauggaccagcugcccgccaaaugcucgacggauaugcagucaccuaugugucuucagacgguuccuaucgcagaaccgacuuugucgaccguaccagaaguucucaccagcuucaggcccuugccgcuggucgugcauauaacauuucaguuuucucuguuaagcgaaacaguaacaauaagaacgacaucucgcggccagcugugcuucuagcacgaacaaggccaagaccugucgaaggauuugagguaacgaacgugaccgccaguacaauuaguguucagugggcccuccacaggauucgacacgccacagugucugggguccgcguguccauucggcacccggaagcccuuagagaucaagccacagauguugacagaagcguggacagauuuacauuccgcgcccuuuugccuggaaagcgguauacuauccagcucacuacccucucugggcuccggggcgaagagcacccaacggaaagccuggccacggcacccacgcauguguggacucgcccacugccucccgccaaucugacugccgcucgggucaccgccaccuccgcacacgucguaugggaugcaccaacucccgguucauugcuggaggcuuacgucaucaacgugacaacuagucagucuacaaaauccagauacgugccaaauggaaagcuggccagcuacacuguccgcgaccugcuccccggccggagguaucaguugucggugauugcaguucagucuaccgagcuugggccacaacacuccgagccggcacauuuguauaucaucaccuccccucgcgacggcgcagaccgaagauggcaucagggcggacaccacccucgcgugcucaagaaccgaccaccaccugcuagauuaccugagcuacgacugcugaaugaccacagcgcccccgaaacgccuacacagccuccaagguucagugaacuugucgacgggaggggccgggugucugcuagauucgguggcagcccaucuaaggcagcuacagugcggucucacguucccggcaauuguuccgagaacccuugccaaaacggcgguacuugugugcccggggccgaugcucauucuugcgauuguggaccaggguucaaggggagacggugugagcuugccuguauuaaggucagucgaccuuguacgcgucuguuuagcgagaccaaggccuuuccagucugggaagggggagucugucaucacgucuauaaacgaguguaccgaguucaucaggauauaugcuucaaagaaucaugcgaaaguaccagcuuaaaaaagaccccaaacagaaagcagucuaaaagccagacccuugagaaaagcuag

SEQ ID NO: 36471 - RNA, 3975 nt, Artificial Sequence
  derived and/or modified sequence
augagacauggcguggccugggccuugcugguggccgccgcucuggggcugggcgccagaggagugcgcggggccguggcacuagcggacuucuauccuuuuggugcugaaagaggcgaugccguuacacccaagcaggaugauggugggucggggcuucgcccccugagugugcccuucccuuucuucggcgccgagcacuccggucuguauguaaacaacaacggcaucaucucauuccucaaggaagugagccaauucacccccguggccuuuccaaucgccaaagaccgcugugugguugcagcuuucugggccgacgucgauaacagaagggcaggcgacguguauuaccgcgaggcaacagauccugcaaugcuucgcagagccaccgaggacgugcgccacuauuuucccgagcugcuggacuuuaacgccacaugggucuucguagcuacaugguaccgcgugacuuucuuuggcggcagcuccagcaguccuguuaauacguuccagaccgugcuuauuacugacgguaagcugucuuucacgauauucaauuacgagucgauuguguggacuaccggaacacacgcuucaaguggaggaaaugcaaccggccuuggcgggauagcggcccaagccggguuuaacgcuggagauggacaacgauacuucagcauuccuggcucaagaacagccgacauggcagaaguggagacaacuaccaacguuggggugccuggacggugggcguuuagaauugaugaugcacaggugcgggucggaggcugcggccacacuaccuccgugugccuggccuugagacccugucuuaacggugggaagugcauugaugauugcgugaccggaaauccaaguuauacuugcuccugcuugagcggcuucaccggacggcgcugccaccucgacguaaaugagugugcaagucagccaugucagaacggaggcaccugcacacaugguaucaauaguuuccgaugucaaugccccgcaggcuucggcggacccacuugugaaacagcacagagcccaugcgauacuaaggaaugccagcacggaggacagugccagguggagaauggcagcgccgugugcgugugccaagcaggcuacaccggggcugcuugugagauggauguugacgauuguuccccugacccuugucuaaauggcgggucaugcguggaccucguuggcaauuauaccugucuuugcgccgagccauucaaaggccuucgcugugaaaccggagaccaccccgugccagacgccugccucucagcucccugccauaacggaggaaccugcguugaugcagaucaggguuauguuugcgagugccccgaggguuuuaugggucuggauugucgggagagagugcccgaugacugugagugcagaaauggggggcgcugccugggggcaaacacuacauugugucaguguccccuggguuucuuuggccuacucugugaauuugaaauaacggcaaugccuuguaacaugaauacccaguguccagacggcggcuauuguauggaacaugguggaaguuaccuguguguuugucacaccgaucacaacgcaucacauagccugccuaguccuugugauucugauccauguuucaaugggggaucuugugaugcucaugaugauaguuauaccugugagugcccuagaggguuccacgggaagcauugugagaaggcacgcccacauuuauguucaucugggcccugccgcaacggggguaccugcaaggaggcuggcggcgaauaucacugcagcugucccuacagguuuacagggcgccauugugaaaucggcaagccugauucaugcgcuagcggaccuugccauaacgggggcacuugcuuucacuacaucgggaaguacaagugcgacugcccgcccggcuuuagcggcaggcacugugagaucgcuccaaguccaugcuuucgcagcccaugugugaauggaggcaccugcgaagacagggauaccgauuuuuuuugccacugccaagcaggauacaugggucgacggugccaggcagagguggacugcggaccuccugaagaagucaaacaugcaacacugcguuucaacgggacccgacugggagcaguugcccuguacgcuugcgaccguggguacagccuaucggcuccaucuagaauuagggucugucagccccaugguguuuggagcgaaccaccucagugucucgaaaucgacgagugccgcucacagccuugccugcauggcggguccugccaggaccgcgucgcuggauaucugugccuguguuccacuggguacgagggagcccacugugaacuagaacgugaugaaugcagagcccacccuuguagaaacggcgguucuugccggaaccucccuggggcauacgucuguagaugccccgccggguucguuggugugcacugcgaaaccgagguggacgcuugcgacagcuccccuugucagcacggaggucggugugagaguggagguggggcauauuugugcgugugucccgagaguuuuuuuggguaccacugcgagaccguuucugauccuugcuucaguucccccugcggaggaagaggauauugccuugccagcaauggcucucacaguugcacgugcaaaguugguuacacuggugaagacugugcgaaggagcuuuucccaccgacagccuuaaaaauggagaggguggaagagaguggugucagcaucuccuggaauccccccaacggcccugccgccagacagauguuagacgguuacgccgugaccuacgugagcagugacgguagcuacaggcggacggauuuuguagaccggacucguucuucucaucagcugcaggcccucgccgccggucgagcuuauaauaucagugucuuuagcgucaagagaaacucaaacaacaagaaugacauaucccggccagcugugcugcucgccagaacccgaccuagacccguagaaggcuucgaagugaccaaugucaccgcgucaaccauaucaguccaaugggcacuucauaggaucagacacgcaacgguuucagguguuagaguaaguauccggcaucccgaggcccugcgggaccaagccaccgauguggaccgcucggucgaucgguuuacauucagggcgcuucugcccgguaagagguacacaauucagcugacgacucucucaggccugcguggugaggaacacccaacugagagccuggcuaccgcuccuacacacguguggacccgaccauuacccccugccaaucugacugccgcccgagugacagcuacaagcgcccauguagugugggacgcaccaacaccuggaagccugcucgaggcuuacgugaucaaugugaccacaucccaguccaccaagucgcgguaugugccaaaugggaaacuggccucguacacuguccgcgaucuacucccgggccgaagguaccaguuaagcgugaucgcaguucaaagcaccgaauuaggcccucaacacucagagcccgcgcauuuauauauuaucaccucuccaagagauggugcggaccggcgcuggcaccaaggaggacaucaccccagaguccugaaaaaccgcccuccccccgccaggcucccagaacugagacuucuuaaugaucauuccgccccugagacccccacccagcccccacgcuucagcgagcuggucgacggucgcgggcgagucagugcucgcuuuggaggaucuccuagcaaggcugcuaccgugcgcucccagcccacagcuucggcccaauuggagaacauggaggaggccccuaagcgcguaucucuggccuugcagcuuccugaacaugguagcaaggacaucgguucugaauccgcagcccugguaggcacccugggguugaccgacugcucacagggccccuag

SEQ ID NO: 36472 - RNA, 4059 nt, Artificial Sequence
  derived and/or modified sequence
augaggcacggaguggcuugggcccucuuggucgcggccgcuuugggacugggcgcaagggggguacgaggggcuguggcauuggcagauuuuuacccuuuuggcgcagaacgcggugaugccgucacccccaaacaagacgacgguggcaguggauuacgcccgcuaagcguuccguuuccuuucuuuggggcugaacacaguggccuuuacguaaacaacaauggaaucauuaguuuucugaaagaagugagucaguuuacaccuguagccuuccccaucgcuaaagauagaugcguugucgccgccuuuugggcggaugucgauaaccggcgcgcgggugauguguacuaucgagaagccaccgauccagccaugcugagacgagcuacagaagauguccgccauuacuuuccagaacuccuugacuuuaaugcaacuuggguuuucguagcuaccugguacagggugaccuuuuuuggcggauccuccagcucgccaguaaacacguuccagaccgugcugauaacagacgguaaacucucuuuuacgaucuucaauuaugagucuauugucuggaccaccgguacccaugcuucaucuggggguaacgccacagggcucggcggcaucgccgcccaagccggguuuaacgcuggagauggucagcgauauuuuagcauccccggcuccaggaccgcagauauggccgaggucgaaacgacaacuaacgucgggguccccgggcgaugggccuucagaauugaugaugcccaggugagggugggcgguugcggccauacaaccuccgugugccucgcauuacguccaugccugaaugguggaaagugcauugacgacugcgugaccgggaaccccaguuauaccuguucuugcuugagcggcuuuaccgggcgcaggugucaccuggacgugaacgaaugcgcgucacagcccugccagaacgguggaacuuguacacauggcauaaauagcuuccguugccagugucccgcuggcuuugguggcccaaccugugagacagcccagagcccuugcgacacuaaagaaugccagcacggcggucagugccaggucgagaacggcuccgccgucugcgugugccaagcgggguacaccggggcugcgugugagauggauguugaugauugcuccccagacccaugucuuaauggcggcagcugcgucgaucuuguaggcaacuacaccugccucugcgcugagcccuuuaagggacuucgcugugaaaccggagaccauccaguuccagacgccugucugucugcaccaugucauaaugggggaaccuguguggacgcggaccagggguacgucugcgaaugcccggagggauucaugggccuugacuguagagagcgcgugcccgaugauugugaauguaggaauggggggcgcugucuaggcgccaauacuacccugugccagugcccucuuggguuuuucggguugcugugugaguucgagaucacugcaaugcccuguaacaugaauacucaauguccagauggcggauauuguauggaacaugguggcucauaccugugugugugucacacugaccacaacgcuucccauucacugcccucgccuugcgauuccgauccuugcuuuaauggugggucuugcgaugcccacgacgauuccuacaccugcgagugcccaagaggauuucaugggaaacauugugagaaggcucggccccaccuguguuccucaggaccuugcagaaauggcggcacuuguaaagaggccggcggcgaguaccauugcuccuguccguauagauucacuggaagacacugcgaaaucggaaaaccagauuccugcgccucuggacccugccacaacggcgggacguguuuucauuacauagggaaguacaagugcgacugcccccccggauucucgggaagacauugugagaucgcuccaucgccguguuuuaggucuccaugcgugaacgggggaacuugugaggaccgggacacggauuuuuuuugucacugucaggcaggcuacaugggaaggcgcugccaggcugaaguggacugcggacccccagaggaggugaaacacgcaacucuccgauucaaugggacacgccugggagcugucgcucucuaugcuugugaccggggauauagucugagcgcgcccucacgcaucagaguaugccaaccgcacggagucuggucugagcccccgcagugucuugaaaucgaugaguguaggucucaacccugucugcacggaggcagcugccaggaucgaguggccgguuauuuaugccucuguucaacaggcuacgagggcgcccauugugagcuagagcgagacgagugccgugcgcaccccugcaggaacggcggcucaugccggaaccuccccggagcuuacgugugcagauguccagcaggguucgugggcgugcauugcgaaacagaaguugacgcaugcgauuccucccccugucagcacggggggcgaugcgaauccggggguggggccuacuuaugcgugugccccgagagcuucuucggguaccauugugagaccguaucggacccauguuuuuccuccccauguggcgggcguggcuacugcuuagccucuaacgggucccacucauguaccuguaaaguaggauauacuggagaagauugcgcaaaagagcuguucccaccuacugcgcugaaaauggaacgaguggaagaaucaggggugagcaucucauggaacccaccuaacgggcccgccgcccgacagaugcuugacggcuacgcugugacauauguuuccucugacgguuccuauaggcgcacugacuuuguggaucggaccagaagcucccaccaauuacaagcuuuagccgcaggccgcgccuauaacauaucaguuuuuucugugaaacgcaacuccaauaauaagaacgauauuagucgcccggcagugcuccuggccaggacuaggccacgcccaguugagggguuugaaguuaccaacgugacugcuucaacaauuucugugcagugggcccuccaccgcauuagacacgcuaccgugucaggcgugcgcgucucaauccgacaucccgaagcacuccgcgaccaggcaacugacguugaccguagcguggaccgcuuuacuuucagagcccuuuugccuggaaagcgcuacaccauucagcugaccacucuguccggacuuaggggggaagaacaccccaccgagucucuagccacugccccuacccacguuuggacacggccgcuacccccagcuaaccucaccgcugcccgggucacugcuacuucugcccaugucgugugggacgccccuacuccaggcucacuccucgaagccuaugucaucaacguaacgacuagucagucaaccaagucuagauauguaccuaauggaaaguuagccagcuauacagugcgagaccuauugccaggucgccguuaucagcuuucagugauugcaguucagucaaccgaauugggcccacagcacucggagccugcgcaucuuuauauaaucacgucuccuagggacggcgccgaccgucgguggcaucagggaggccaccacccuagagugcucaagaaccggccccccccugcgcggcucccugaauugagguuacugaacgaccacagugccccagaaacuccgacacagcccccccgguucagcgagcugguggacggccgaggcaggguauccgcucgguuuggcgggagcccuaguaaggcugcuaccguccguucccacguucccgggaauuguucagagaauccaugccaaaacggcgggacgugcgucccuggagccgacgcucacucaugugauugcgggcccggguuuaagggccggagaugcgagcuagccuguauaaaagugucaaggccuuguacacggcucuuuagcgaaacuaaggcauucccaguuugggagggcgguguuugccaccaugugaagcaguccaagagccagaccuuggagaaguccuag

SEQ ID NO: 36473 - RNA, 4242 nt, Artificial Sequence
  derived and/or modified sequence
augcgccacggggucgccugggcccuucugguggccgccgcauugggcuugggggcgagagggguucgaggagcugucgcacuagccgacuucuauccuuuuggggcugagagaggcgacgcagugacacccaaacaagacgacggcggcagcggucuccggccacuaucuguacccuucccauucuuuggagcggagcacaguggacuguaugugaauaacaaugggauuauuaguuuucucaaggaaguuagucaguuuaccccuguagcguuuccuaucgcuaaagacagauguguaguggccgccuucugggcggauguggacaaccgaagggcgggcgacgucuacuacagggaagcgacagauccugcaaugcugcgcagagccacggaggauguacggcacuacuuuccagaauuacuagauuuuaaugccacauggguauucguugcuacuugguaucgcgucaccuucuuuggcgggucaucaucaucacccgugaacacauuucaaacagugcuuauuacagaugggaaacugagcuucacaauuuuuaacuacgaaucaaucguguggacuacagguacucaugcuagcuccgggggaaacgcaacuggccugggggggaucgcagcccaagcugguuuuaaugcaggggacggccagcgauacuucucuaucccugguagucggaccgcugacauggccgagguggaaaccacaaccaacgugggggugccuggcaggugggcauuucguaucgaugacgcacaggugcgaguggggggaugcgggcauacuaccucagucugccuggcuuuacguccuugcuuaaacggagggaaguguauagaugacuguguuaccggaaaccccucuuauacgugcagcugcuuaagcgguuucacuggacguagaugucacuuggacgugaacgagugcgccucccagccaugccaaaacgguggcacguguacccacgggaucaauuccuuucguugucagugcccggcaggauuuggaggaccaacgugcgagaccgcccaaaguccaugugauacuaaggaaugccagcacggaggucagugccagguggaaaacggaagcgcuguaugcgucugccaggccggauacacaggagcagccugcgagauggauguagaugacuguucucccgauccuugccuuaacggugguucguguguggaccuuguagggaauuauacauguuugugcgccgagccuuucaaagggcugagaugugagacaggagaucaccccgugccugaugcgugccuuagcgcucccugccauaauggggguacguguguggaugccgaccagggguacguuugcgaaugucccgaagguuucauggguuuggacugcagagagagggugccugaugauugugaaugucggaauggaggccgcugccugggagcgaauacuacccugugccaauguccccugggcuuuuucggguuacugugugaguucgaaaucacagccaugccaugcaacaugaacacccaaugcccagacgggggauacugcauggaacacggggggaguuauuugugcguaugccauaccgaucauaaugccagucauucccucccuucuccuugcgacagcgaccccugcuucaacggcggaaguugcgaugcacacgacgacucauauaccugcgagugcccuagaggauuccacggaaagcauugcgaaaaagcucgcccccaccuguguucuucugguccaugcagaaacggcggaacaugcaaagaagccgggggagaauaucauugcucuuguccuuaccgcuuuacuggaaggcauugcgaaauagguaagccagacaguugugccagcggucccugucauaacggcgguaccugcuuccacuauaucggcaaguauaaaugcgauugcccuccaggguucucuggccggcacugcgaaaucgcgccaucaccguguuucagauccccuugugugaauggaggcacuugugaagaccgagauacugauuuuuucugccacugucaagccggauauauggggcgaagaugccaggcugaaguugauugcggaccaccagaggagguaaagcaugcaacgcuacguuuuaacgguacccgacugggagcaguggcgcuguaugccugugaucgagguuacucccuuagugcacccucaaggaucaggguuugccagccacacggcguguggucagaacccccccaaugcuuagaaaucgacgaauguagaagccaaccaugccuucauggcggcagcugucaggauagaguggccggcuauuugugccuauguucuaccgguuacgaaggagcccacugcgagcucgaacgagacgaauguagagcccaucccuguagaaauggcggaucaugucgcaaucuaccaggagcuuaugugugccgcugcccugcuggguuugucgggguucauugcgagaccgagguugacgcgugugacucgagcccuugccaacaugggggacguugugaaaguggugggggugccuaccugugugugugccccgaaagcuuuuuuggcuaccacugugagaccguaucggacccauguuucucuaguccuugcggcggucgcgguuacugucuggccucuaacggaucccauucuuguacauguaaaguggguuacacuggggaagacugugcuaaagaacucuucccaccaacagcauuaaagauggaacgggucgaggaaucuggggucucuauuucuuggaacccaccuaaugggccagcagcucggcagaugcucgauggcuaugcugugacuuacguuuccagcgauggauccuaccgccgaaccgacuucguagaccgcacacguuccucacaucagcugcaggccuuggcagccggacgcgccuauaauauaaguguuuucuccguaaaaagaaauuccaauaacaagaaugacaucaguagacccgccguucugcucgcccguacccggccacggcccguagaaggguucgaggucacaaacgugacggcuuccacuauuucagugcaaugggcacugcauagaauucggcaugcgacuguuaguggugugagagugaguauuaggcaucccgaggcccuuagggaccaagcaacagauguggacagaucuguggacagguucaccuuucgcgcccuccuccccggcaaaagauauacgauucaacugaccacacuuagcggccuucgcggugaagagcauccuaccgagucacuagccacagcccccacccauguguggacaaggccccuucccccugcgaacuuaacagccgcacgggugaccgcgaccuccgcucauguggucugggacgcucccacaccaggaagcuuauuagaagccuauguuaucaaugucacuaccagccagucaacuaaaucucguuacgucccaaacggaaaacuggcauccuauacaguuagagaccuccugccgggccgacgguaccaacucucuguuaucgccguacagagcacagaacugggcccucagcacucggaacccgcacaucuuuacauuauuacuuccccaagagauggagccgauagaagauggcaucaaggcggucaccaucccagagugcucaagaaucgcccccccccugcacgucugcccgaacugagauugcuuaaugaucacuccgcccccgagacccccacacagccaccaagguuuuccgaacuaguagacgggcgcggaagagucuccgcuagauuuggaggcucuccuagcaaggcagcuaccgucaggucccaaccaaccgcauccgcccaacucgagaacauggaagaggccccaaaacgcgugaguuuggcucugcagcuaccagagcacgggucaaaggacauagggaaugugcccggcaauuguagcgaaaauccuugucagaauggaggaacaugcguccccggagccgacgcccauucaugugacuguggaccaggauuuaaaggacgcaggugcgaacuugcaugcauuaaaguauccagacccugcacacgacuguucagcgagaccaaggcuuucccagugugggaagggggagucugucaccauguauauaaaagaguuuacagaguccaccaggacaucugcuucaaggaauccugcgagucaacgagccugaaaaaaacaccuaacagaaagcagaguaaaagccagacccuugaaaaauccuag

SEQ ID NO: 36474 - RNA, 4143 nt, Artificial Sequence
  derived and/or modified sequence
augagacaugguguggcuugggcacugcugguggcggccgcguugggucuuggggcaagggguguaaggggcgccguugcccucgccgauuuuuacccuuucggcgccgagcggggugaugcaguuacaccuaagcaggacgacggagguucuggcuuaagaccgcuaucaguaccuuuucccuucuucggcgccgagcacucuggccuuuacgucaacaacaauggaauaaucucauucuuaaaagagguuagucaguuuaccccgguugcuuucccaauugccaaagaccgaugcguuguggccgcguucugggccgacguugauaaccggagggccggcgauguuuauuauagagaagccaccgauccagcuaugcuuagaagggccacggaggacgucagacauuauuuuccagaacuccucgauuucaaugcaacauggguauucgucgcgacaugguaucgggugacuuucuucggaggcaguucuucaucaccuguuaacaccuuccagacaguauugauuaccgacggaaagcuuaguuuuacgauuuucaacuaugaauccauuguuuggacaacagggacacacgccuccucugggggaaacgcuacuggguuagguggcauugcugcacaggccggcuucaacgcuggggaugggcagcgauacuucucuauuccuggcagccggaccgcggacauggcggaagucgagaccaccacgaaugucggugugccaggacguugggcuuuucgaauugaugacgcgcaaguacgcguaggaggcugcggacauaccacuaguguuugccucgcccucagaccaugccugaauggugguaagugcauugacgauugugugaccggaaacccaagcuauacaugcuccugucuaucugguuucacaggaaggcgcugucacuuggacgugaaugaaugcgcgagucaaccuugucagaauggaggcaccuguacacacggaaucaauaguuuccggugccaguguccagccggguucggaggaccaacgugcgaaacggcucaauccccaugcgacacuaaagagugucaacacggcggccaaugucaaguagagaaugguagugccgugugugucugucaggcagguuacacgggggccgccugcgagauggaugucgaugauuguuccccugacccaugucucaaugggggcucauguguggaccuugucggaaacuauacuugucugugcgcggaaccuuuuaaggggcuccgcugugaaacaggcgaccacccuguaccagaugcuuguuugucugcuccuugccauaauggaggcaccuguguugaugcagaccagggcuacgucugcgaaugucccgagggauuuaugggccucgacugcagagagagaguuccugacgauugcgaaugccggaauggcgguagaugcuuaggagcaaacacgaccuuaugucaguguccccucggguuuuucggcuuacugugugaguucgagauuaccgcuaugccaugcaauaugaacacccagugccccgauggcgguuacuguauggagcacggagguaguuaucuaugcgucugccacacagaucacaaugcaucucacucucucccaagccccugugacagcgacccuuguuuuaauggugguucaugugaugcgcaugaugacuccuauaccugugaguguccacgcggauuucacggcaagcauugugagaaggcccggccucaccucuguuccucaggccccuguagaaauggcggaacauguaaagaagcugggggcgaauaucacuguuccugccccuaccgguuuacaggacggcacugcgaaaucggcaagccugauuccugugccucaggcccuugccacaauggggggacuugcuuccacuauaucggaaaauauaaaugugacugcccucccggauuuucuggacgucauugcgaaauugccccuagcccuuguuuuagaucuccuugcguuaauggugggacgugcgaagauagagauaccgauuuuuucugccacugccaggcuggguauaugggccgcaggugccaggcggaaguggauugcggccccccagaggaaguuaagcacgccacccuccgauuuaaugguacucgucugggggccgucgcucucuaugcaugugaucgcggauauagucugucugcaccuagcaggauucggguuugccaaccgcauggggucuggucugaaccaccucaaugccuggaaauagacgaaugccggucccagccuugucugcacgggggaucaugccaagaucgggucgccggguacuuaugucugugcucaaccggcuaugagggggcccacugcgaauuggaaagagacgagugucgagcccacccaugcagaaauggagggagcugucguaaccuaccgggcgcauauguauguagauguccugccggcuuugugggcguacauugcgaaacagagguugacgccugugacucgagcccuugccaacauggaggcaggugcgagagcggugguggggccuaucucugcguguguccagaaucguuuuucggcuaucauugcgagacagucucugacccauguuucaguagcccaugugguggcagaggcuauugccuggcgucaaacggaagccauaguuguacuugcaaggucggcuauacaggagaggacugugccaaagagcucuuuccaccaaccgcccucaagauggagagaguugaagaaaguggcgucucaaucaguuggaauccuccaaauggucccgcagccaggcagaugcuagauggguaugcugucaccuaugucaguucggacgggucuuaucgcagaaccgacuucguggacaggacccggucaucucaucagcuucaggcucuagccgccggccgcgccuacaauaucucaguuuucucagucaaaagaaacucgaacaauaagaaugauaucucccgaccugcuguccuccuggcucgaacccgcccgcggcccguagaggguuuugaggugaccaaugugacagccuccacuaucucaguacagugggcucugcaucgcauuaggcaugcuaccguuucugguguucgagucuccauaaggcacccagaagcacugagagaccaggccacugauguggaucgcagcguggacagguuuacguuuagagcacugcuacccgggaagagguauacgauucaacuuacaacguugucuggacuccgcggagaggaacaucccaccgaaagcuuggcuaccgcucccacccacgucuggacacggccacugccccccgcaaaccucaccgccgcacgcguaaccgcaaccuccgcucacgucgugugggacgcuccuacaccuggcucuuuacuggaggcauauguaauuaacgugacuacuagccagucuacaaagucucgguacguuccuaacgggaaguuagcaagcuauacaguccgcgauuuacuuccuggaagacgcuaucagcucuccguaaucgcuguccagaguacagaacucgguccccagcacuccgaacccgcacauuuguacaucauuacuucacccagggauggugcagaccgcagauggcaccaagguggccaccacccaagaguacucaaaaacagaccacccccugcccgucugccugaauugaggcuacugaaugaucacagcgcacccgaaaccccuacacagcccccucguuuuuccgaacucgucgauggacgcggcagagugagcgcucgcuucgggggcucaccgucaaaagccgcaacagugcguagccacgugcccggaaacuguucggaaaaccccugucagaacggaggcacaugcgugccuggagcugacgcccacuccugcgacugcgggcccggguucaaggguagacggugcgagcuggccuguauuaaagucucgcguccuugcacucgacuguuuuccgagacaaaggcguucccagugugggagggaggcgucugucaucacguuuacaaaagaguuuaccgcguucaucaggacauuugcuuuaaggagucgugugaauccaccucauugaaaaaaacaccaaauaggaaacagucuaagucgcagacucuggagaaaucuuag

SEQ ID NO: 36475 - RNA, 3975 nt, Artificial Sequence
  derived and/or modified sequence
augagacauggcguugcuugggccuugcugguagccgcugcucuggggcugggcgcgagaggaguucguggggcgguugcucucgccgauuucuaucccuuuggggcggagaggggcgaugccguuacgcccaaacaggaugacggcgguucuggauugcgcccgcuguccgugccuuuuccuuucuucggcgcugaacacaguggacuguaugugaacaauaaugggauaaucaguuucuugaaagagguuucacaguuuaccccaguugcguuuccuauagccaaagaccgcugcguggucgcagccuucugggcugacguagacaaccgccgcgcaggagacgucuauuauagggaagcgaccgaucccgcaaugcucagacgcgcuacagaggacgugcgacacuacuuuccagaacuguuagauuucaaugccacuuggguguuuguugccacuugguaucgaguaaccuuuuucggcgggagcuccuccucuccgguaaauacuuuucagacuguauugauuaccgacggcaagcucagcuuuaccaucuucaacuaugaaucuaucguauggaccacaggcacacacgcaucuucaggagguaacgcuaccggacucgggggaaucgccgcccaggcuggguucaacgcuggcgauggucagcgcuauuucucgaucccuggaucacgaacagcagacauggccgaagucgaaaccacuacuaauguggguguacccgggcggugggcuuuccguaucgacgaugcccaggugagggugggcggaugcggccacacuacaagcgugugccuggcucugcgaccuugucuuaacggaggaaaaugcauugaugacugugugaccggcaauccuuccuauaccugcagcugucucucuggcuuuacugguagaagaugccaucuagacgugaaugaaugcgccagccagccaugucagaacggaggcaccugcacacaugggauuaacucuuuuaggugccaauguccagcuggauuugggggaccuaccugcgaaacagcccaaucuccuugugauacuaaggaaugccagcacgggggacagugccaaguggaaaacggauccgcuguaugugugugccaagcaggauauaccggagccgcaugugaaauggacguggacgacugcucccccgauccuugucucaauggaggcucuuguguggaccuaguaggcaacuauaccugucugugcgccgaaccguucaagggacuucgcugugagaccggcgaccaccccgugcccgacgcaugucugucagcaccuugucacaaugggggcacauguguugacgccgaucaagguuacgugugcgaguguccggaagguuucaugggccucgauugcagggagagaguuccugaugacugcgaaugccgaaauggcggaagaugucuaggcgccaacacuacccugugccaaugcccucuagguuucuuuggccuccugugcgaauucgagauuacagcgaugcccuguaacaugaauacccagugucccgauggcggcuauuguauggaacacggcggcucuuaucucugugugugccauaccgaccacaaugcuucacacucccuacccuccccuugcgauucagacccauguuucaaugguggaucuugugaugcccacgacgacuccuauaccugugagugcccccgaggcuuucacgguaagcacugcgaaaaggcacguccucaccuuugcaguucugggcccugcagaaauggaggaacguguaaagaggcaggaggcgaauaucacuguucuuguccuuauagguuuacaggcagacacugcgaaauuggaaaaccugacucaugugcaagugguccaugccauaacggcggcaccuguuuccacuacaucggaaaguauaagugugacugcccuccgggguuuagcggacgccauugcgaaauugcuccaaguccuugcuuccgaagcccaugcguuaacggaggaacuugcgaggauagagauaccgauuuuuuuugccacugucaagcaggguacaugggcagacggugucaggccgaaguggauugugguccacccgaagaggugaaacaugccacucugcgcuuuaacggaacccggcucggagcaguggcccucuaugcaugugauagagguuacaguuugagcgcaccuucgcgaauccgagugugucagccccacggagucuggucagaaccuccacagugccuggaaaucgacgaaugcagaagucagccuugucugcacggggguagcugucaggacagaguggcaggauaccucugccucugcucaaccgguuaugaaggagcccacugcgagcucgaaagagacgaaugucgcgcacauccaugcaggaacggcgguuccugccguaaucucccaggggccuacguuugucggugucccgcuggauuuguaggagugcacugugaaaccgaaguagaugcgugugacagcucaccaugccaacauggcggccgcugugaauccgguggcggugcuuaucuguguguuugucccgaaucauuuuuuggguaccauugcgaaacagucucggaccccuguuucaguagcccuuguggcggccgcggauacugcuuagcuuccaaugggucucacucaugcacauguaaggucggguacacgggcgaggacugcgcuaaagagcuuuucccgccaacagcacuaaaaauggagcggguugaggaaucuggcguuucuauuucuuggaauccccccaauggacccgccgccagacaaauguuagacggauacgcaguuacuuacgugucgagcgauggcucuuacaggcgaacagacuucguagaucgcacccguuccagccaccagcugcaggcgcucgcugccggacgggccuauaauaucagcguauucucuguuaagcggaauuccaacaauaaaaaugauaucucaagacccgccguccuccuugcuagaacgagaccucgaccgguugaggguuucgaagucaccaacguaacagcauccacuaucuccguccaaugggcgcuucacaggauccgccacgcaacugugucuggaguccgcguguccauccgccauccagaggcucugagagaucaagcaacugacgucgauagaucaguggacagauuuaccuuucgcgcccuacuuccaggcaagagguauacgauccaacuaacaacuuugagcggccugcggggggaggaacacccuaccgagucucuggccacugcaccuacccauguauggacaaggcccuugccacccgcuaaccuuaccgcggcacgugugacagcaaccagcgcucaugucgugugggaugcaccaacacccggcucacuauuagaggcuuauguuauaaaugugaccaccucucaguccaccaagagucgauauguccccaauggaaagcuggccaguuauacagugcgggaucuccucccuggacgucgcuaccaguuguccgugaucgccguacagucaacggaacucggaccacagcauucugagcccgcucaucuuuacauuauuacuucaccccgagacggcgccgaucgacgcuggcaucaaggaggccaccacccuagggucuugaaaaaccguccucccccagcacggcucccugagcucagacuccugaacgaucauuccgccccagaaacuccaacacaaccuccaagauucagugaacucguagauggaagggggcgaguguccgccagauucggaggaucuccaucuaaagcggccaccgugcgaagccaacccacagccagugcacagcucgaaaauauggaggaagcccccaagagagugagucucgcacugcagcugcccgaacacggaucaaaggauaucggaagugaaucagccgcacucgucggaacacuuggucugacagacuguucucaagggccuuag

SEQ ID NO: 36476 - RNA, 4059 nt, Artificial Sequence
  derived and/or modified sequence
augaggcacggaguggcuugggcccucuuggucgcggccgcuuugggacugggcgcaagggggguacgaggggcuguggcauuggcagauuuuuacccuuuuggcgcagaacgcggugaugccgucacccccaaacaagacgacgguggcaguggauuacgcccgcuaagcguuccguuuccuuucuuuggggcugaacacaguggccuuuacguaaacaacaauggaaucauuaguuuucugaaagaagugagucaguuuacaccuguagccuuccccaucgcuaaagauagaugcguugucgcugccuucugggcugacguagauaaccgacgcgcuggcgauguguacuacagagaagccacugaucccgcuaugcugagacgugcaacugaggauguccgacauuacuuuccagagcuccuugacuuuaacgcuacaugggucuucguggccaccugguaccgggugaccuucuuuggggguuccuccucuucuccaguuaacaccuuccagacaguccugauuaccgauggcaaacucuccuuuacaaucuucaacuacgaaucuauuguguggaccaccgggacucacgcauccucagggggcaacgccacgggacugggaggcaucgccgcucaggcaggcuucaacgcuggugacggccaaagauauuuuucgaucccugggagucgcaccgccgacauggcugaggucgagaccacuacuaacguuggcgucccaggaagaugggccuuucguauugacgacgcacaaguaagaguagggggcuguggacacaccacuuccguaugccuggcacugcggccuugucugaacggcggcaaauguauugaugacugcgugacuggaaauccuuccuauacaugcucuugccuguccggguuuaccgggaggagaugccaucuggacgugaaugagugugcuucacaacccugucagaaugguggaaccugcacccacggcauaaauuccuuuaggugucagugucccgcggguuuugguggccccacaugugaaacggcucaguccccuugcgauacaaaggaaugccagcacggcggccagugccaagucgagaaugguagcgcagugugugugugucaggcagguuacacgggagcugccugugaaauggauguggaugacuguuccccugaucccugcuugaaugggggcuccuguguggaucuagugggaaauuacacuugccuaugugcugaacccuuuaaaggccuucgaugcgagaccggagaccauccugugcccgaugcaugucuuagugcaccaugccauaacggcggcacauguguggacgcugaucagggauacgucugcgagugcccugaagguuuuaugggccucgauugcagggaaagaguaccagaugauugugaguguaggaauggaggaagguguuugggagcuaacacaacccuaugccaaugcccucugggcuuuuuuggguuauuaugugaguucgaaauuacagccaugccuuguaacaugaauacacagugccccgaugggggauauuguauggaacauggaggcuccuaccuguguguaugucauaccgaccauaaugccucucacucauugccaucuccaugcgauucugaccccugcuucaaugguggaucaugcgaugcccacgaugacucguacacaugcgaaugcccuagaggcuuccacgguaaacauugcgagaaagcccgaccccaucuuuguagcucuggucccuguagaaacggcggaaccuguaaggaagcagguggcgaauaccauuguagcugcccauauagguucaccgguagacacugugaaauuggcaaacccgauaguugcgccuccggaccaugccacaacggugggacaugcuuucauuacauugggaaauacaaaugcgauuguccaccagguuuuagcgggagacauugugaaaucgccccgucuccaugcuuucgaaguccgugugugaacggcggaaccugugaagaccgagacaccgauuucuuuugccacugucaggcaggauacaugggaagaaggugccaggcggaaguggacuguggcccuccugaagaggugaaacaugccacacugcgguuuaacggaacaaggcuuggugcuguggcucuguacgcaugugaucgcgguuauucacucucggcuccgucaaggauccgggucugucagccacacggcgucuggagcgagcccccccagugccucgaaauagaugaaugcaggagucagccauguuuacacggagguagcugccaagauagaguagccgguuacuuaugucugugcuccacaggauacgagggcgcucauugcgaauuggagagggaugaauguagagcccacccaugccggaacggcgggaguuguagaaacuuaccuggagcuuaugucuguagaugccccgccggguuuguuggaguacauugugaaacagaaguggacgcgugcgauucgucuccuugccaacauggcgggaggugcgagucuggggguggcgcuuaccuuuguguuugucccgaaagcuucuucgguuaccauugcgaaaccguuucugaccccugcuucucuucacccuguggagggcguggguacugcuuagcuaguaacggcucucacucaugcaccuguaaggugggcuauaccggcgaggauugcgcaaaagagcuguucccaccuacugcgcugaaaauggaacgaguggaagaaucaggggugagcaucucauggaacccaccuaacgggcccgccgcccgacagaugcuugacggcuacgcugugacauauguuuccucugacgguuccuauaggcgcacugacuuuguggaucggaccagaagcucccaccaauuacaagcuuuagccgcaggccgcgccuauaacauaucaguuuuuucugugaaacgcaacuccaauaauaagaacgauauuagucgcccggcagugcuccuggcccgaaccaggccucgcccagucgaagguuuugaggucacuaacguaacagcuucuaccauuaguguccagugggcuuuacauagaauuagacacgccacugugucaggcgucagagucaguauucgacacccagaagcuuugcgagaccaggccacagacguggacaggaguguggaccguuucacauuuagagcucucuuacccggcaagcgguacacuauccaguugaccacuuuaaguggacuccgaggcgaagagcacccgaccgagucccucgcaaccgccccuacacaugucuggacacggccgcuacccccagcuaaccucaccgcugcccgggucacugcuacuucugcccaugucgugugggacgccccuacuccaggcucacuccucgaagccuaugucaucaacguaacgacuagucagucaaccaagucuagauauguaccuaauggaaaguuagccagcuauacagugcgagaccuauugccaggucgccguuaucagcuuucagugauugcaguucagucaaccgaauugggcccacagcacucggagccugcgcaucuuuauauaaucacgucuccuagggacggggccgaccggcgcuggcaccagggcgggcaccauccaaggguauugaagaaucgaccaccuccugccagacuaccugaauugagacuucuaaacgaccauuccgcaccagaaacccccacccagccuccgcguuuuagugaacuaguggauggcagaggacgcgugucagccagauucggcgguuccccaaguaaagcugccacuguccgaagccacguccccgggaauuguucagaaaacccaugccaaaauggggggaccugugugccgggagcugaugcgcacucuugugacugugggccgggcuuuaagggacgccgcugugaauuagcauguaucaaaguuuccagaccauguacccgacucuuuucagaaacgaaggcauucccagucugggaaggaggagucugucaucacgucaagcaguccaaaucacaaacccucgaaaagagcuag

SEQ ID NO: 36477 - protein, 596 aa, Artificial Sequence
  derived and/or modified sequence
MEALLSTPINPNNFPAKLWRLVNSPRYRSIRWDGRGEGLLIDQPLFEAELLSPPGPGGGGGTAGAGAEPELFKTTSFTSFIRQLNLYGFRKVVLGGPGGGKPAGNGPLHHFHNPHFRRDQPQLLVHLKRLTSANKAKLAAGLEVPCRPPNRFQRLLITSASAATAPLQHQQPPPPAGPRPEPHGPVAVGQFHRSFRRDSLSPYSCVSTPSHDHSTYPLKGLDRTPVPHRIWQNSLGMHPGQVETSPTFSDKGVPFPVLQRFPTEVTYTLQPSTTSVHVQQGPQTMVSSSQKYSNYTPSAQYSQAYYPTAVLQCCSPTHMDALSSCVTPNASSYAHCNYFQNPSMQSSYPVEFLPSNWPCSTTDENTKTEVNLEAVFQIVDELHSSPKLEMVKVEPVENQCPTSPSYRGQHILANSNNSNPCSASQASQLEPLTPVGSDIMSFVVGTEQAVACSLPQSPEYIYTIHTAQPVENSTIQESAAIQQAHVKLKEHLNHNPSPSSVVFVQEGPPFSTHQVDANIKCQTSSRENILPSEQMGFLISEMGPASKPSEDTGLATPARYREHRSNSQQGKSPDLHLLVDVACKQERFPKEEELKE

SEQ ID NO: 36478 - protein, 496 aa, Artificial Sequence
  derived and/or modified sequence
GGIENGVGELGSGGEAPARRGDGGAALHPHQPQQLPRQAVAPGEQPALPLHPLGRPRRGAAYRSAALRGRAAQPPAGPRPEPHGPVAVGQFHRSFRRDSLSPYSCVSTPSHDHSTYPLKGLDRTPVPHRIWQNSLGMHPGQVETSPTFSDKGVPFPVLQRFPTEVTYTLQPSTTSVHVQQGPQTMVSSSQKYSNYTPSAQYSQAYYPTAVLQCCSPTHMDALSSCVTPNASSYAHCNYFQNPSMQSSYPVEFLPSNWPCSTTDENTKTEVNLEAVFQIVDELHSSPKLEMVKVEPVENQCPTSPSYRGQHILANSNNSNPCSASQASQLEPLTPVGSDIMSFVVGTEQAVACSLPQSPEYIYTIHTAQPVENSTIQESAAIQQAHVKLKEHLNHNPSPSSVVFVQEGPPFSTHQVDANIKCQTSSRENILPSEQMGFLISEMGPASKPSEDTGLATPARYREHRSNSQQGKSPDLHLLVDVACKQERFPKEEELKE

SEQ ID NO: 36479 - DNA, 1791 bp, Artificial Sequence
  derived and/or modified sequence
atggaggccttgctgtccactcccatcaaccctaataatttcccagcaaagctgtggagattagttaattctccacgctaccgctccatccgatgggatggcagaggcgagggactcttgatcgaccagcccctgttcgaggcagagttgctgagtccacctggcccaggaggcgggggaggcaccgccggggccggcgctgagccagaactctttaagactacctcattcacaagctttatcaggcaactaaatctgtatggctttcgcaaagtcgtcctcggcggtcccggcggcgggaagccagctgggaatgggccactgcaccatttccacaatccgcacttccgtcgggatcaacctcagctgctggtccacctaaagcgcttaacttcggcaaacaaagcaaaattagccgcaggcctggaagtgccctgtcgcccaccaaatcggtttcagcgcctgctgattacctctgcgtccgcagcgactgcccctttgcagcaccagcagcccccccccccagccggcccgagacccgagccgcacggtccggtggcagtcggacaatttcacagaagcttccggcgagattccctcagtccttacagttgtgtgtcaaccccctctcacgaccactcgacttatcctctgaagggcctggatcggactccagtgcctcaccgaatttggcagaatagtttgggcatgcatcctggccaggtggagactagtccaacgtttagcgataaaggggtaccctttcctgtgctgcaaagatttcccaccgaggtcacttatactctccaaccaagcacaacttccgtgcacgtgcagcaaggaccgcagacaatggttagctcttcccagaagtacagtaactacacaccaagtgcccaatattctcaagcatactacccgaccgccgtactgcagtgctgtagcccaacgcatatggatgccctgtcgtcatgcgtgacccccaacgcctcctcctacgcccactgtaattactttcagaacccaagcatgcagagttcttaccccgtcgagtttcttccctctaactggccttgtagtacaacagacgagaatacaaaaacagaggtgaacctcgaagccgtcttccagatcgtggatgagcttcacagctcccctaaacttgagatggtgaaagtggagcctgtggagaaccaatgcccaacctcaccctcgtaccgcggtcaacatatactggcaaatagcaacaacagcaacccttgctcggccagccaagcctcccaattggagcccctgacgcctgtcggatccgacatcatgtcatttgtggtggggacggaacaagctgtggcctgctccctccctcagtctcccgaatacatatatacaattcatacagcacaaccagtagaaaactccaccattcaggagtcagccgccatccagcaggcacatgtcaaattaaaggagcacctgaatcacaacccctctcccagcagtgtcgttttcgttcaggaaggtccacctttctcaactcatcaagtggatgccaatatcaagtgtcagacatcctccagagaaaatatcctgcccagtgagcagatggggttcttgatcagtgagatgggaccggctagcaagccaagcgaggacacaggtctggccacccctgcaagatacagggaacacaggagcaactcacagcaggggaagtcacccgatctgcacctgttagtggatgtggcctgcaagcaggaaaggtttccaaaggaagaggagctgaaggaatag

SEQ ID NO: 36480 - DNA, 1491 bp, Artificial Sequence
  derived and/or modified sequence
ggcggcatcgaaaatggcgtgggtgagctcggctcgggcggtgaggcaccagcccggcgcggcgatggaggcgcggctttacatccacatcagccacaacagctaccccgtcaggcagtggctccaggcgaacagccggctcttcctctccaccccctcggcagaccacggagaggggctgcatacagatccgccgcccttagaggtcgagctgctcagccccccgccggtccacggcccgagccacacgggcctgtggcagttggccagttccacaggagcttccgccgggactctcttagcccttattcctgcgtcagtactcctagccacgatcactccacctatcccctgaaaggcttagatcggacccccgtaccacacaggatttggcaaaattctcttggaatgcaccccggccaggtcgagacctctcccactttttcagataaaggtgtgccgtttcccgtccttcaaagatttccaacagaagtaacatacacactacagcccagcaccactagcgttcacgtacaacagggacctcagacaatggtttcaagctcccagaagtattccaattataccccatcggcacagtactcacaggcctattatcccacagccgtgctgcaatgttgtagccccacacatatggatgctttgagcagctgcgtgacacccaacgcatcatcatatgcccactgtaattactttcaaaatccctctatgcagagcagttaccccgtcgagttccttccgtcaaactggccatgttccaccactgacgaaaatacaaaaaccgaggtgaacctagaggcggtgttccagattgtggacgagttgcactcttcccccaaattggagatggttaaggttgagccagtagaaaaccagtgtccaacctcaccaagctatcggggacagcacattttggccaattcgaataattcaaacccctgttccgctagccaggcgagccagttggagcccctgactccggtggggtcggatattatgagttttgttgtgggcactgaacaagccgttgcctgtagcctcccacagagtccagagtatatttataccatccacacagcccagccagtggagaactcaacaattcaagagtcagccgctatccagcaggcgcacgtgaagctgaaagaacatttgaatcataaccctagcccctctagcgtcgtgtttgttcaggagggtccacctttctctactcaccaagtggatgcaaatatcaaatgccaaacctcaagtcgggaaaacatacttcctagcgagcagatggggtttctgatctccgagatgggccccgccagcaagccctcagaggatacagggttggcaacgccagcacggtatagggagcatcggagcaacagtcaacaaggtaaatctcctgacctacacttgctagttgatgtggcctgtaagcaagagaggttcccgaaggaggaggagctcaaggaatag

SEQ ID NO: 36481 - DNA, 1791 bp, Artificial Sequence
  derived and/or modified sequence
atggaggccctgctgagcacccccatcaaccccaacaacttccctgccaagctgtggaggctggtgaacagcccccgctaccgcagcatccgctgggatggccgcggggagggcctgctgattgaccagcccctgtttgaggccgagctgctgagccccccaggccctgggggcggcggcggcacagctggagctggagctgagcctgagctgttcaagaccaccagcttcaccagcttcatccggcagctgaacctgtatggcttcaggaaggtggtgctgggcggccctgggggcggcaagccagctggaaatggccccctgcaccacttccacaacccccacttcagaagagaccagccccagctgctggtgcacctgaagaggctgaccagcgccaacaaggccaagctggccgccggcctggaggtgccctgccggccccccaaccgcttccagaggctgctgatcaccagcgccagcgctgccacagcccccctgcagcaccagcagcccccacctcctgctggccccaggcctgagccccacggccctgtggccgtgggccagttccacaggagcttccggcgggacagcctgagcccctacagctgtgtgtccacccccagccatgaccacagcacctaccccctgaagggcctggacaggacccctgtgccccaccgcatctggcagaacagcctgggcatgcaccctggccaggtggagaccagccccaccttcagtgacaagggcgtgcccttccctgtgctgcagcgcttccccacagaggtgacctacaccctgcagcccagcaccacctctgtgcacgtgcagcagggcccccagaccatggtgagcagcagccagaagtacagcaactacacccccagcgcccagtacagccaggcctactaccccacagctgtgctgcagtgctgcagccccacccacatggatgccctgagcagctgtgtgaccccaaatgccagcagctatgcccactgcaactacttccagaaccccagcatgcagagcagctaccctgtggagttcctgcccagcaactggccctgcagcaccacagatgagaacaccaagacagaggtgaacctggaggccgtgttccagatcgtggatgagctgcacagcagccccaagctggagatggtgaaggtggagcctgtggagaaccagtgccccaccagccccagctaccggggccagcacatcctggccaacagcaacaacagcaacccctgcagcgccagccaggccagccagctggagcccctgacccctgtgggcagtgacatcatgagctttgtggtgggcacagagcaggccgtggcctgcagcctgccccagagccctgagtacatctacaccatccacacagcccagcctgtggagaacagcaccatccaggagagcgctgccatccagcaggcccacgtgaagctgaaggagcacctgaaccacaaccccagccccagctctgtggtgtttgtgcaggagggcccccccttcagcacccaccaggtggatgccaacatcaagtgccagaccagcagccgggagaacatcctgcccagcgagcagatgggcttcctgatcagcgagatgggccctgccagcaagcccagcgaggacaccggcctggccaccccagcccgctaccgggagcacaggagcaacagccagcagggcaagagcccagacctgcacctgctggtggatgtggcctgcaagcaggagcgcttccccaaggaggaggagctgaaggagtag

SEQ ID NO: 36482 - DNA, 1491 bp, Artificial Sequence
  derived and/or modified sequence
gggggcattgaaaatggagtgggggagctgggcagcggcggggaggccccagccaggagaggagatggaggagctgccctgcacccccaccagccccagcagctgccccggcaggccgtggcccctggagagcagcctgccctgcccctgcaccccctgggccggcccaggagaggagctgcctacagatctgctgccctgcggggccgggccgcccagcccccagctggccccaggcctgagccccacggccctgtggccgtgggccagttccacaggagcttccggcgggacagcctgagcccctacagctgtgtgtccacccccagccatgaccacagcacctaccccctgaagggcctggacaggacccctgtgccccaccgcatctggcagaacagcctgggcatgcaccctggccaggtggagaccagccccaccttcagtgacaagggcgtgcccttccctgtgctgcagcgcttccccacagaggtgacctacaccctgcagcccagcaccacctctgtgcacgtgcagcagggcccccagaccatggtgagcagcagccagaagtacagcaactacacccccagcgcccagtacagccaggcctactaccccacagctgtgctgcagtgctgcagccccacccacatggatgccctgagcagctgtgtgaccccaaatgccagcagctatgcccactgcaactacttccagaaccccagcatgcagagcagctaccctgtggagttcctgcccagcaactggccctgcagcaccacagatgagaacaccaagacagaggtgaacctggaggccgtgttccagatcgtggatgagctgcacagcagccccaagctggagatggtgaaggtggagcctgtggagaaccagtgccccaccagccccagctaccggggccagcacatcctggccaacagcaacaacagcaacccctgcagcgccagccaggccagccagctggagcccctgacccctgtgggcagtgacatcatgagctttgtggtgggcacagagcaggccgtggcctgcagcctgccccagagccctgagtacatctacaccatccacacagcccagcctgtggagaacagcaccatccaggagagcgctgccatccagcaggcccacgtgaagctgaaggagcacctgaaccacaaccccagccccagctctgtggtgtttgtgcaggagggcccccccttcagcacccaccaggtggatgccaacatcaagtgccagaccagcagccgggagaacatcctgcccagcgagcagatgggcttcctgatcagcgagatgggccctgccagcaagcccagcgaggacaccggcctggccaccccagcccgctaccgggagcacaggagcaacagccagcagggcaagagcccagacctgcacctgctggtggatgtggcctgcaagcaggagcgcttccccaaggaggaggagctgaaggagtag

SEQ ID NO: 36483 - DNA, 1791 bp, Artificial Sequence
  derived and/or modified sequence
atggaggccctgctgagcacccccatcaaccccaacaacttccccgccaagctctggaggctggttaactcacccagataccggtccataagatgggacggccgaggagagggcctgttgatcgatcaacccctgttcgaagcagagctgctgagcccacccgggccgggagggggaggcgggaccgctggcgccggcgccgaaccggagctcttcaagaccacaagcttcacaagctttatcaggcagttgaacctatatggatttcgaaaagtcgtgcttggcggaccaggggggggtaaacctgccggcaacggtcctctgcaccactttcacaacccccacttcaggagagaccagcctcagctactagtccacctcaaacgtctgacttccgctaacaaagccaagttggccgcagggctcgaggttccctgtcgtccgccgaaccgattccaaagactgctcattacaagcgcttctgccgcaactgccccactccagcaccaacaacctcctcccccggctgggcccagaccagaaccgcatggtccagtcgccgtgggccaatttcaccgatctttcaggcgcgattctctgagcccatattcttgcgtgagcactccaagccatgatcattcaacctaccctctcaaaggtctcgaccggacccctgtgcctcaccggatttggcagaacagtctgggcatgcacccaggccaggtggaaacctcccctacctttagcgataagggtgtccctttcccagtgctgcagagattccctacggaggtgacttatacacttcagccctcgaccacgagtgtgcatgtacaacagggtccgcagacaatggtgagcagctcacaaaaatattcaaattacacaccttcagcacagtatagtcaggcctactatcctactgctgtactgcagtgttgtagcccaacccacatggacgcactcagttcttgtgtcacacctaacgccagctcctacgcccactgcaattactttcaaaatccctccatgcagtcttcgtacccggtggagtttctacccagcaactggccgtgctccaccactgatgagaataccaaaactgaggtgaacttagaggccgtgttccagatcgtggatgaactacactcttcccccaagttagagatggtgaaagtagagcccgtcgagaatcagtgcccaacatcaccgtcataccgtggtcagcacatactagctaattcaaataattcaaacccatgttctgcttcccaggcatcacaactggagcctctcacccctgtgggcagtgacattatgtcctttgttgtagggactgagcaggccgttgcatgcagcctgccacagtcgcctgaatatatctatactatccacacggctcagcccgtggagaacagcacaatccaggagtccgccgccattcaacaggctcacgtgaaattgaaggagcacctgaatcacaacccctcacctagttccgtcgtttttgtccaggaagggccgcccttcagtacacatcaggttgatgctaatatcaagtgtcagacatcttcacgcgagaacatcctcccctccgagcagatgggcttccttatttctgagatgggtcccgcctctaaaccatctgaagacacaggcctggccacccctgctcgttaccgagagcataggagtaactcacagcagggaaaaagccctgacctgcatttgctggtcgatgtcgcctgcaagcaggaacgcttccctaaagaggaggaactgaaggagtag

SEQ ID NO: 36484 - DNA, 1491 bp, Artificial Sequence
  derived and/or modified sequence
ggcggcatcgagaacggcgtgggcgagctgggcagcggcggcgaggctccggcccgccgcggtgacggcggcgctgccctgcatcctcatcagccgcagcagctcccacgccaggccgtggcacctggggaacagcccgcactcccactgcacccactgggaaggcctagacgaggcgcggcataccggagtgccgctctgaggggcagggcagcccagcccccagccggccctcgaccagaaccccacggtcccgtagctgttggacagtttcataggtcattccggcgcgattcactttctccatactcctgtgtgtcgacgcccagccacgaccacagcacgtatccactgaagggactagacagaacacctgtgcctcacagaatctggcagaactcactgggcatgcatccgggacaagtcgagactagtccaacattttccgataagggggtgccgtttcctgtgctgcaacgatttcctacggaggtaacatataccctccagcccagcactacctcagtccacgttcaacaggggccgcaaaccatggtatctagctcacagaaatactctaattacactcccagtgcccagtactcacaggcctattatcctaccgctgttctccagtgttgctctccgactcacatggacgcgctttctagctgcgttacacccaacgcttcctcctacgcccattgcaattatttccagaatccttctatgcagagttcttaccccgtcgagttcctgcccagcaactggccatgctccactactgacgagaacaccaaaacagaagtaaacctggaagccgtgttccagattgtagatgagcttcatagctctccgaagctcgaaatggtgaaagtcgagcctgttgagaaccaatgcccaacaagcccgagctaccgcgggcagcacattctagctaactccaataactccaacccatgctctgcgagccaggctagtcagctggaaccactgacccctgtggggagcgacatcatgagctttgtggtcggtacggagcaggccgttgcatgtagcctcccacagtcccccgagtacatctacactattcataccgctcagccagtagagaattcaacaattcaagagagcgccgcgattcagcaggctcacgtcaagttgaaagagcatcttaaccacaacccatctccaagctctgttgttttcgtccaggaaggcccgcccttttcaactcatcaggtcgatgccaatatcaagtgccagacgtcatctcgcgaaaacattttaccctccgagcagatggggtttctaatttcagaaatgggcccagcatcaaaaccatccgaagacacaggcttggctacacccgccaggtacagggaacataggtcaaacagccaacaggggaaatcaccggatttgcacctgttagtggacgtggcctgtaagcaagaaagatttcctaaggaagaagaattgaaagaatag

SEQ ID NO: 36485 - DNA, 1791 bp, Artificial Sequence
  derived and/or modified sequence
atggaagctttgctcagcactccaattaatcccaataacttccccgctaaactgtggcgcttagtgaattcacctcgatacagatcaatccgctgggacgggagaggcgagggtttacttatagaccagccactattcgaagcggagctgctgtcaccccctggcccagggggaggaggtggcaccgccggagcgggagcagagccagaactgtttaagaccacttcttttacttcatttatccggcagctaaatctgtatggcttccgtaaggtcgtcctcggaggccctggaggtgggaagccagccggaaatggacctcttcatcattttcacaacccgcacttcagacgagaccagccccagctgctggttcacttgaagcggctcaccagcgccaataaggctaagctcgctgctggattagaggtcccatgtcgacctcccaacagattccaacgtctcctgatcacttccgcatccgccgctacagcaccactccaacatcagcagccgcctccacccgcagggccacgtcccgagccccacggtccagtggccgtgggtcagtttcaccgctccttcagaagagacagcctgtcaccatatagctgcgtgagcactcccagtcatgatcattctacgtaccccttaaagggcttagaccgcacccctgttccccatcgcatctggcagaactctctaggcatgcatcccggtcaggttgaaaccagccctacattttcggacaagggagtacccttccctgttttgcaaagatttcccacggaggttacttacaccctgcagccgagtaccacatcagtgcatgtgcagcaaggtcctcagacgatggtgtcatccagccaaaagtatagtaattacacacctagcgcacaatactcccaggcttactacccgacagcggtgttgcagtgctgttccccgacgcacatggacgccctctcctcatgtgtgacccccaatgcttctagctacgcgcattgcaactactttcagaaccccagcatgcaaagttcataccctgttgaattcctgccctcaaactggccctgttccacaactgacgagaacacaaaaaccgaggtgaatctggaggcagtgttccagatcgtcgacgagctccactcctctccgaagctggaaatggtgaaggttgagccagtcgagaaccagtgcccaacctcccccagctacaggggtcagcacatcctggcaaactccaataacagcaacccgtgcagcgcttcacaggcctcgcaactcgaaccactgacccccgtcggcagcgacattatgtcattcgtggttggtactgagcaggccgtagcatgcagcctgcctcaaagtcccgaatacatatacaccattcacaccgctcagccggtggagaattccaccatccaggagtccgccgcaattcaacaggcccatgtgaagttgaaagaacacctcaaccataatccatcacccagttctgtggtatttgtgcaggagggtcctcccttttcaacccaccaggtggacgccaacatcaaatgtcagacaagtagtcgggagaacattttgcctagtgagcaaatgggctttctgattagcgagatgggcccagccagtaagccaagcgaggacacgggactggctacacctgctcggtatagagagcaccggtcaaactcccagcaggggaaatctccggatctgcatttattagtggacgtggcctgcaagcaggaaagattccccaaagaggaggagctgaaggaatag

SEQ ID NO: 36486 - DNA, 1491 bp, Artificial Sequence
  derived and/or modified sequence
gggggaatagaaaacggggtgggcgaactcgggtccggcggagaggctcctgcgcgacgaggagacgggggtgctgcgctgcacccccatcagcctcaacagctgccccgacaggcagtcgccccaggtgagcagcctgcattgcccctgcaccccctggggcgaccccgaagaggtgccgcttacagatctgccgcactcagaggaagggcggcacagcctcctgcaggacccagaccggaaccacatggtccagttgcagtcggccaattccaccgaagttttcggagagatagcctgtcaccctattcgtgcgtatctaccccttctcacgaccacagcacctaccccttaaaaggactagaccggacaccggtcccccataggatctggcagaattcactgggcatgcacccagggcaggtggagacctcccctacattttctgacaagggtgtgcctttccctgtgctgcagaggtttcctaccgaagtaacctataccctgcagccatccacaacatcagtacacgtgcagcagggtcctcagacaatggtgtcaagttctcagaagtacagtaattatactccatccgcccagtacagccaggcttattatcctactgccgtgctccagtgttgttcaccaactcacatggacgccttatcctcgtgcgtgacccccaacgcgtcatcatatgcacactgcaattactttcagaacccgagcatgcagtcttcctatccagtggaattccttcccagcaattggccatgcagtacaacagacgaaaatacgaagacagaagtgaatctggaggccgttttccagatagtggatgagctacacagctcacccaaactggaaatggtgaaagtagagcccgttgagaaccagtgccccacatccccttcataccgaggccagcatattctggccaactctaacaattccaatccttgcagcgcgagtcaagcttctcagctcgaaccccttacaccggtaggctcagatattatgtccttcgtggtcggcactgagcaggctgtggcttgtagtcttccccagtcacctgagtatatttatactattcatacagcccagcctgtcgaaaatagtacgatccaggagtctgccgcaatacagcaggcccatgtgaagctcaaagagcacttgaaccacaatccttctccatcttcagtggtttttgttcaggaaggcccaccctttagcacacatcaggtggatgcgaacatcaagtgtcagacaagctcccgagagaatattctcccaagtgagcaaatggggttcctgatctcagaaatgggtccggcaagcaagcccagcgaggatactgggcttgcaacccctgccagataccgggagcaccgcagcaatagtcagcaggggaaatcgcccgatctgcatctcttggtagatgtggcctgcaagcaggaaaggtttcctaaggaggaggagcttaaagaatag

SEQ ID NO: 36487 - DNA, 1791 bp, Artificial Sequence
  derived and/or modified sequence
atggaggccctgctgagcacccccatcaaccccaacaacttccccgccaagctgtggagactggtgaacagccccagatacagaagcatcagatgggacggcagaggcgagggcctgctgatcgaccagcccctgttcgaggccgagctgctgagcccccccggccccggcggcggcggcggcaccgccggcgccggcgccgagcccgagctgttcaagaccaccagcttcaccagcttcatcagacagctgaacctgtacggcttcagaaaggtggtgctgggcggccccggcggcggcaagcccgccggcaacggccccctgcaccacttccacaacccccacttcagaagagaccagccccagctgctggtgcacctgaagagactgaccagcgccaacaaggccaagctggccgccggcctggaggtgccctgcagaccccccaacagattccagagactgctgatcaccagcgccagcgccgccaccgcccccctgcagcaccagcagccccccccccccgccggccccagacccgagccccacggccccgtggccgtgggccagttccacagaagcttcagaagagacagcctgagcccctacagctgcgtgagcacccccagccacgaccacagcacctaccccctgaagggcctggacagaacccccgtgccccacagaatctggcagaacagcctgggcatgcaccccggccaggtggagaccagccccaccttcagcgacaagggcgtgcccttccccgtgctgcagagattccccaccgaggtgacctacaccctgcagcccagcaccaccagcgtgcacgtgcagcagggcccccagaccatggtgagcagcagccagaagtacagcaactacacccccagcgcccagtacagccaggcctactaccccaccgccgtgctgcagtgctgcagccccacccacatggacgccctgagcagctgcgtgacccccaacgccagcagctacgcccactgcaactacttccagaaccccagcatgcagagcagctaccccgtggagttcctgcccagcaactggccctgcagcaccaccgacgagaacaccaagaccgaggtgaacctggaggccgtgttccagatcgtggacgagctgcacagcagccccaagctggagatggtgaaggtggagcccgtggagaaccagtgccccaccagccccagctacagaggccagcacatcctggccaacagcaacaacagcaacccctgcagcgccagccaggccagccagctggagcccctgacccccgtgggcagcgacatcatgagcttcgtggtgggcaccgagcaggccgtggcctgcagcctgccccagagccccgagtacatctacaccatccacaccgcccagcccgtggagaacagcaccatccaggagagcgccgccatccagcaggcccacgtgaagctgaaggagcacctgaaccacaaccccagccccagcagcgtggtgttcgtgcaggagggcccccccttcagcacccaccaggtggacgccaacatcaagtgccagaccagcagcagagagaacatcctgcccagcgagcagatgggcttcctgatcagcgagatgggccccgccagcaagcccagcgaggacaccggcctggccacccccgccagatacagagagcacagaagcaacagccagcagggcaagagccccgacctgcacctgctggtggacgtggcctgcaagcaggagagattccccaaggaggaggagctgaaggagtag

SEQ ID NO: 36488 - DNA, 1491 bp, Artificial Sequence
  derived and/or modified sequence
ggcggcatcgagaacggcgtgggcgagctgggcagcggcggcgaggcccccgccagaagaggcgacggcggcgccgccctgcacccccaccagccccagcagctgcccagacaggccgtggcccccggcgagcagcccgccctgcccctgcaccccctgggcagacccagaagaggcgccgcctacagaagcgccgccctgagaggcagagccgcccagccccccgccggccccagacccgagccccacggccccgtggccgtgggccagttccacagaagcttcagaagagacagcctgagcccctacagctgcgtgagcacccccagccacgaccacagcacctaccccctgaagggcctggacagaacccccgtgccccacagaatctggcagaacagcctgggcatgcaccccggccaggtggagaccagccccaccttcagcgacaagggcgtgcccttccccgtgctgcagagattccccaccgaggtgacctacaccctgcagcccagcaccaccagcgtgcacgtgcagcagggcccccagaccatggtgagcagcagccagaagtacagcaactacacccccagcgcccagtacagccaggcctactaccccaccgccgtgctgcagtgctgcagccccacccacatggacgccctgagcagctgcgtgacccccaacgccagcagctacgcccactgcaactacttccagaaccccagcatgcagagcagctaccccgtggagttcctgcccagcaactggccctgcagcaccaccgacgagaacaccaagaccgaggtgaacctggaggccgtgttccagatcgtggacgagctgcacagcagccccaagctggagatggtgaaggtggagcccgtggagaaccagtgccccaccagccccagctacagaggccagcacatcctggccaacagcaacaacagcaacccctgcagcgccagccaggccagccagctggagcccctgacccccgtgggcagcgacatcatgagcttcgtggtgggcaccgagcaggccgtggcctgcagcctgccccagagccccgagtacatctacaccatccacaccgcccagcccgtggagaacagcaccatccaggagagcgccgccatccagcaggcccacgtgaagctgaaggagcacctgaaccacaaccccagccccagcagcgtggtgttcgtgcaggagggcccccccttcagcacccaccaggtggacgccaacatcaagtgccagaccagcagcagagagaacatcctgcccagcgagcagatgggcttcctgatcagcgagatgggccccgccagcaagcccagcgaggacaccggcctggccacccccgccagatacagagagcacagaagcaacagccagcagggcaagagccccgacctgcacctgctggtggacgtggcctgcaagcaggagagattccccaaggaggaggagctgaaggagtag

SEQ ID NO: 36489 - DNA, 4107 bp, Artificial Sequence
  derived and/or modified sequence
ggtccctggtacgcggcggatgggcgccggcaggagcgggcagggcgaggcgaaggccggggagggatcgagaacggtgtgggagagctaggctcggggggcgaggccccggcccggcggggcgatggaggcgctgctctccacccccatcaaccccaacaacttccccgccaagctgtggcgcctggtgaacagcccgcgctaccgctccatccgctgggacggccgcggcgaggggctgcttatcgatcagccgctcttcgaggccgagctgctcagcccgcccgggccggggggcggtggcgggactgcgggggccggggccgagcccgagctcttcaaaaccaccagcttcaccagcttcatccgccagctcaacctctacggcttccgcaaggtggtgctgggcgggccggggggcggcaaaccggcaggcaatgggccgctccatcacttccacaacccgcacttccgccgcgaccagccacagctgctcgtgcacctcaagcgcctcaccagcgccaacaaggccaagctggcggccggcctggaggtgccctgccgcccgcccaaccgcttccagcggctgctcatcacctcggcctccgccgccaccgcgccactgcagcaccagcagccgccgccgcccgcggggccccggcccgagccgcacggaccagtggctgtaggacaatttcaccggtcatttcgtcgagatagtttgtctccttactcctgtgtatcaactccatcccacgaccacagtacttaccctctgaaaggtttagatcggaccccagttcctcatagaatatggcagaactcccttggaatgcatcctggacaagtggagacatctcccacattttcagataaaggggttccgtttcctgtactccagaggtttccaactgaggttacctatacactgcagcccagcaccacatctgtacatgttcaacaaggtcctcaaacaatggtcagctcctcccaaaaatacagtaactacacaccctcagcacagtactcgcaagcctactatccaacagctgtgctacagtgctgttctcctacccacatggatgctctaagtagttgtgtcactcccaatgcctcttcctatgcacactgcaactacttccagaatccttcaatgcagtcctcctatccagttgaatttttgccttccaattggccctgcagtactactgatgaaaatacaaagacagaagtaaacctagaggctgtctttcagatagttgatgagttgcattcctcccctaaattggagatggtaaaggtggagcctgttgagaatcagtgcccaacatctccgtcttacagaggccaacacattttagctaattctaacaacagcaatccatgttctgcaagtcaggctagccagctggagccacttactcctgtaggctcagatattatgtcttttgtggttggaacagaacaagcagttgcctgctctctaccacagtcacctgagtacatctataccatccacacagctcagcctgttgaaaatagcacaatacaggaatctgcagccatccagcaagctcatgtcaaactgaaggagcacctaaatcataatccatctccatcttcagtagtatttgtgcaggaagggccaccattcagcacacaccaggtggatgccaacataaaatgccagaccagttcacgtgagaatatcttgccgtcagaacagatgggattcctcatttcagaaatggggcctgctagcaagcctagtgaagacacaggtttagccactccagccagatacagagagcacagaagcaactcacaacaaggaaagtcccctgatcttcatctgctggtggacgtggcctgcaagcaggagcgctttccaaaggaggaagaattaaaagagtgaggaatggatgacaaatgtgacattgtgcactagctgtagctggaggcagactagccttgcacatgacaaactgttgggattttttcagttctgttaaggaaaaaaaagtattttttgtttcgttaattgagaattttgttaattgagaattgggaatttgtatgtactacagtggttcagttcagattatctgccttgacaaactactgaacatctagcagccacgttttttggctgcccagatcccttttaaatgaaaagttctgaccttctgttatagtcaaggagcatctaaaaactgctccatctatggtactaagaataatctgtgtgtgtgctgatttgttgtcttgccactcaaactgtagtcagcacaactttagtggggaattcagtctctctgattcaagtcacagtgtgatccttttagaggagattgtgtgagaaacaaaggcatgtgaggtcaccagcatcacaggtctaaatgcatcaggaattccagggaagaaactctggagaagagctaattttctaagtgattaaccaggaaattctcttacttcctaacccagcattctgttttaagagcaaggcatccggacttggaccatctatcacacttaacagcccctgattcttttatattaatggaagcattcttctattttcatatctttctttaattttaatgatacattatcataaatggtaaaaagattttattaatatatcacttatttaaatgtctttaaagaaagtatttaacttgtttaatataattgtatttataaatgctgatagatttaaaggttttaaagttttatatttttattattgcaggatagaaggataaaggatgcatgtgtagtatttttattttgaaaggaaaatgtacaatgtgtgaacaaaaacattaagagatttaatatactattttcttattttagatttttacattcaataagtataaattctcatctatataaggtattgtgtgcaaatttgggaaaaaactgattagcagccatttagtagaagctatgcctctgatttttaaagaatggtttcaatctggtttaagcttctgagagaattttggataatgggatagatggtaacatttttttcttatccctgttacaggattctagatttgtgcagtaggattgtgggactgtgttttaggagagaaggatgtcttggatgtccagtttctgtggttaatcccttacttgcttatccagtgacagcaagaaactttctgatttaaagtctttcaattgaccaaaactttcttattggattctgtttcagttctcctattaagcactgcagaaacgaaaggaaagcctaggaatatgaaactaattaaaaaggcacttggtgatatgacatagtactatgctagccgttgtggatgtaacagttcatttcttatactgcattgtgccttcccaatgatgtcaaaccctagaaatattacagagatctacttttctggaaaagggtgagctctgtattgatctgcagtgactctgtttagatattaaagtaggttctgaaaagcgacctgtgtggtccctctgattagactagttaatgtctatgtgatgggcatttatttatctttattagcaaggtttaaaagagcaaattatcaagacacctatatcttttggccagactatataatattttgtcagagtatgtgaagaggagacccaatttccaaatgaaggaactttgctttttctctgtcatgttgaagagctaatatactgtgtagattttcccctaaatatggctttcttagctttatagatgttgagataatatcttttgaggaacacatgtcaagcaggaaccttggcatagatttggtttcagttgttttaaggcttaattaatgaaatgccttaatcagctttccaaacatttttatatatgaatacagcagaccaaggagctggatctcctgctatccttacacgccttgtatctatcaactaaagctgtcattaatgacttgggcaaaatggcaagaggtataataaagtcttcctgtgaattagccagtagggtctgacacaactagtcaactaacaaggttcctgactagtacctcagtatttcagcaccttaagcactgataaatttcaatcagtcaacaataaagtgagtgttccaactag

SEQ ID NO: 36490 - DNA, 3683 bp, Artificial Sequence
  derived and/or modified sequence
ggagggatcgagaacggtgtgggagagctaggctcggggggcgaggccccggcccggcggggcgatggaggcgctgctctccacccccatcaaccccaacaacttccccgccaagctgtggcgcctggtgaacagcccgcgctaccgctccatccgctgggacggccgcggcgaggggctgcttatcgatcagccgctcttcgaggccgagctgctcagccccccgcggggccccggcccgagccgcacggaccagtggctgtaggacaatttcaccggtcatttcgtcgagatagtttgtctccttactcctgtgtatcaactccatcccacgaccacagtacttaccctctgaaaggtttagatcggaccccagttcctcatagaatatggcagaactcccttggaatgcatcctggacaagtggagacatctcccacattttcagataaaggggttccgtttcctgtactccagaggtttccaactgaggttacctatacactgcagcccagcaccacatctgtacatgttcaacaaggtcctcaaacaatggtcagctcctcccaaaaatacagtaactacacaccctcagcacagtactcgcaagcctactatccaacagctgtgctacagtgctgttctcctacccacatggatgctctaagtagttgtgtcactcccaatgcctcttcctatgcacactgcaactacttccagaatccttcaatgcagtcctcctatccagttgaatttttgccttccaattggccctgcagtactactgatgaaaatacaaagacagaagtaaacctagaggctgtctttcagatagttgatgagttgcattcctcccctaaattggagatggtaaaggtggagcctgttgagaatcagtgcccaacatctccgtcttacagaggccaacacattttagctaattctaacaacagcaatccatgttctgcaagtcaggctagccagctggagccacttactcctgtaggctcagatattatgtcttttgtggttggaacagaacaagcagttgcctgctctctaccacagtcacctgagtacatctataccatccacacagctcagcctgttgaaaatagcacaatacaggaatctgcagccatccagcaagctcatgtcaaactgaaggagcacctaaatcataatccatctccatcttcagtagtatttgtgcaggaagggccaccattcagcacacaccaggtggatgccaacataaaatgccagaccagttcacgtgagaatatcttgccgtcagaacagatgggattcctcatttcagaaatggggcctgctagcaagcctagtgaagacacaggtttagccactccagccagatacagagagcacagaagcaactcacaacaaggaaagtcccctgatcttcatctgctggtggacgtggcctgcaagcaggagcgctttccaaaggaggaagaattaaaagagtgaggaatggatgacaaatgtgacattgtgcactagctgtagctggaggcagactagccttgcacatgacaaactgttgggattttttcagttctgttaaggaaaaaaaagtattttttgtttcgttaattgagaattttgttaattgagaattgggaatttgtatgtactacagtggttcagttcagattatctgccttgacaaactactgaacatctagcagccacgttttttggctgcccagatcccttttaaatgaaaagttctgaccttctgttatagtcaaggagcatctaaaaactgctccatctatggtactaagaataatctgtgtgtgtgctgatttgttgtcttgccactcaaactgtagtcagcacaactttagtggggaattcagtctctctgattcaagtcacagtgtgatccttttagaggagattgtgtgagaaacaaaggcatgtgaggtcaccagcatcacaggtctaaatgcatcaggaattccagggaagaaactctggagaagagctaattttctaagtgattaaccaggaaattctcttacttcctaacccagcattctgttttaagagcaaggcatccggacttggaccatctatcacacttaacagcccctgattcttttatattaatggaagcattcttctattttcatatctttctttaattttaatgatacattatcataaatggtaaaaagattttattaatatatcacttatttaaatgtctttaaagaaagtatttaacttgtttaatataattgtatttataaatgctgatagatttaaaggttttaaagttttatatttttattattgcaggatagaaggataaaggatgcatgtgtagtatttttattttgaaaggaaaatgtacaatgtgtgaacaaaaacattaagagatttaatatactattttcttattttagatttttacattcaataagtataaattctcatctatataaggtattgtgtgcaaatttgggaaaaaactgattagcagccatttagtagaagctatgcctctgatttttaaagaatggtttcaatctggtttaagcttctgagagaattttggataatgggatagatggtaacatttttttcttatccctgttacaggattctagatttgtgcagtaggattgtgggactgtgttttaggagagaaggatgtcttggatgtccagtttctgtggttaatcccttacttgcttatccagtgacagcaagaaactttctgatttaaagtctttcaattgaccaaaactttcttattggattctgtttcagttctcctattaagcactgcagaaacgaaaggaaagcctaggaatatgaaactaattaaaaaggcacttggtgatatgacatagtactatgctagccgttgtggatgtaacagttcatttcttatactgcattgtgccttcccaatgatgtcaaaccctagaaatattacagagatctacttttctggaaaagggtgagctctgtattgatctgcagtgactctgtttagatattaaagtaggttctgaaaagcgacctgtgtggtccctctgattagactagttaatgtctatgtgatgggcatttatttatctttattagcaaggtttaaaagagcaaattatcaagacacctatatcttttggccagactatataatattttgtcagagtatgtgaagaggagacccaatttccaaatgaaggaactttgctttttctctgtcatgttgaagagctaatatactgtgtagattttcccctaaatatggctttcttagctttatagatgttgagataatatcttttgaggaacacatgtcaagcaggaaccttggcatagatttggtttcagttgttttaaggcttaattaatgaaatgccttaatcagctttccaaacatttttatatatgaatacagcagaccaaggagctggatctcctgctatccttacacgccttgtatctatcaactaaagctgtcattaatgacttgggcaaaatggcaagaggtataataaagtcttcctgtgaattagccagtagggtctgacacaactagtcaactaacaaggttcctgactagtacctcagtatttcagcaccttaagcactgataaatttcaatcagtcaacaataaagtgagtgttccaactag

SEQ ID NO: 36491 - protein, 477 aa, Artificial Sequence
  derived and/or modified sequence
MWMFSWLCAILIILAIAGMNTIAKTTPHTKFTKKSEEREMPKGLKPSSGPPPEEEETLFTEMAEMAEPITKPSALDSVFGTATLSPFENFTLDPADFFLNCCDCCSPVPGQKGEPGETGQPGPKGEAGNLGIPGPPGVVGPQGPRGYKGEKGLKGERGDQGVPGYPGKPGAQGEPGPKGDKGNIGLGGVKGQKGSKGDTCGNCTKGEKGDQGAMGSPGLHGGPGAKGEKGEMGEKGEMGDKGCCGDSGERGGKGQKGEGGMKGEKGSKGDSGMEGKSGRNGLPGAKGDPGIKGEKGELGPPGLLGPTGPKGDIGNKGVRGPTGKKGSRGFKGSKGELARVPRSAFSAGLSKPFPPPNIPIKFEKILYNDQGNYSPVTGKFNCSIPGTYVFSYHITVRGRPARISLVAQNKKQFKSRETLYGQEIDQASLLVILKLSAGDQVWLEVSKDWNGVYVSAEDDSIFTGFLLYPEETSGISP

SEQ ID NO: 36492 - DNA, 1434 bp, Artificial Sequence
  derived and/or modified sequence
atgtggatgttcagctggctgtgcgccatcctgatcatcctggccatcgccggcatgaacaccatcgccaagaccaccccccacaccaagttcaccaagaagagcgaggagagagagatgcccaagggcctgaagcccagcagcggccccccccccgaggaggaggagaccctgttcaccgagatggccgagatggccgagcccatcaccaagcccagcgccctggacagcgtgttcggcaccgccaccctgagccccttcgagaacttcaccctggaccccgccgacttcttcctgaactgctgcgactgctgcagccccgtgcccggccagaagggcgagcccggcgagaccggccagcccggccccaagggcgaggccggcaacctgggcatccccggcccccccggcgtggtgggcccccagggccccagaggctacaagggcgagaagggcctgaagggcgagagaggcgaccagggcgtgcccggctaccccggcaagcccggcgcccagggcgagcccggccccaagggcgacaagggcaacatcggcctgggcggcgtgaagggccagaagggcagcaagggcgacacctgcggcaactgcaccaagggcgagaagggcgaccagggcgccatgggcagccccggcctgcacggcggccccggcgccaagggcgagaagggcgagatgggcgagaagggcgagatgggcgacaagggctgctgcggcgacagcggcgagagaggcggcaagggccagaagggcgagggcggcatgaagggcgagaagggcagcaagggcgacagcggcatggagggcaagagcggcagaaacggcctgcccggcgccaagggcgaccccggcatcaagggcgagaagggcgagctgggcccccccggcctgctgggccccaccggccccaagggcgacatcggcaacaagggcgtgagaggccccaccggcaagaagggcagcagaggcttcaagggcagcaagggcgagctggccagagtgcccagaagcgccttcagcgccggcctgagcaagcccttccccccccccaacatccccatcaagttcgagaagatcctgtacaacgaccagggcaactacagccccgtgaccggcaagttcaactgcagcatccccggcacctacgtgttcagctaccacatcaccgtgagaggcagacccgccagaatcagcctggtggcccagaacaagaagcagttcaagagcagagagaccctgtacggccaggagatcgaccaggccagcctgctggtgatcctgaagctgagcgccggcgaccaggtgtggctggaggtgagcaaggactggaacggcgtgtacgtgagcgccgaggacgacagcatcttcaccggcttcctgctgtaccccgaggagaccagcggcatcagcccctag

SEQ ID NO: 36493 - DNA, 1434 bp, Artificial Sequence
  derived and/or modified sequence
atgtggatgttttcgtggctctgcgccatattgatcatccttgcgatcgctgggatgaatacaattgccaagaccactccccacactaagtttacaaaaaaatcagaggaaagagagatgcccaaaggcctgaaacctagttccggtccacctcctgaggaggaagagacattgttcactgaaatggccgagatggctgagccaattacaaagccctctgccctggacagtgtgtttggcaccgctaccctttcccctttcgaaaacttcactctggaccccgctgatttttttctcaactgttgcgattgttgcagtcctgtgcccggacagaagggggagcccggagagactggtcagcctgggcccaaaggcgaagctgggaacctcggaatcccaggccccccaggcgtcgtgggtcctcagggtccccggggctataagggtgagaagggcctcaagggcgaacgtggagaccaaggcgtgcctggataccccggtaagccaggagcccaaggtgagcctggccctaagggcgacaaaggcaacatcggactgggtggcgtcaaggggcaaaagggatccaaaggagacacgtgtggaaactgtacaaaaggtgaaaaaggagaccaaggtgcaatgggtagccccgggttgcatggcggccctggcgctaaaggagagaaaggtgagatgggcgagaagggagagatgggtgacaaaggctgctgcggtgatagcggcgagcgaggcggtaagggccagaaaggggagggcgggatgaaaggggagaaaggaagcaagggggattcaggtatggaggggaagtccggacgcaatgggctcccaggcgccaaaggagatccaggcattaagggcgagaaaggggaactggggccgcctggtctgttgggaccgacaggcccgaagggagatatcggaaataagggagtcagaggaccaactggaaagaagggatctagggggttcaaagggtctaaaggcgaactggcaagagtccctcgttctgccttcagcgccggactttccaaaccgtttccgccgccaaatatccccataaaattcgagaaaatcctgtacaacgaccagggcaactacagcccagtgaccggcaaattcaactgcagcatacctggcacttatgtcttttcctaccacattacggtgcggggacggccggctcggatctccttggttgcacagaacaagaagcagtttaagagcagagagacactgtacggacaagaaattgaccaggcctccctgttggtcattctgaaactctccgctggagatcaggtgtggctggaggtatccaaggattggaacggcgtctacgtctcagctgaggatgactccattttcaccggctttctgttatatccagaagaaacctccggaatctcaccctag

SEQ ID NO: 36494 - DNA, 1434 bp, Artificial Sequence
  derived and/or modified sequence
atgtggatgttctcctggctgtgtgccatcctgatcatcctggccatcgccggcatgaacaccatcgccaagaccaccccccacaccaagttcaccaagaagtctgaggagcgggagatgcccaagggcctgaagcccagcagcggccccccacctgaggaggaggagaccctcttcacagagatggccgagatggccgagcccatcaccaagcccagcgccctggacagcgtgtttggaacagccaccctgagcccctttgagaacttcaccctggaccctgctgacttcttcctgaactgctgtgactgctgcagccctgtgcccggccagaagggggagcctggagagaccggccagcccggccccaagggggaggccggcaacctgggcatccctggccccccaggagtggtgggcccccagggcccccggggctacaagggggagaagggcctgaagggggagcggggggaccagggcgtgcccggctacccaggcaagccaggggcccagggcgagcccggccccaagggggacaagggcaacatcggcctgggcggcgtgaagggccagaagggcagcaagggggacacctgtggcaactgcaccaagggggagaagggggaccagggcgccatgggcagccctggcctgcacggcggccctggggccaagggggagaagggggagatgggagagaagggggagatgggagacaagggctgctgcggggacagcggggagcggggcggcaagggccagaagggggagggcggcatgaagggggagaagggcagcaagggggacagcggcatggagggcaagtctggaagaaatggcctgcccggggccaagggggaccccggcatcaagggggagaagggggagctgggccccccaggcctgctgggccccaccggccccaagggggacatcggcaacaagggcgtgcggggccccaccgggaagaagggcagccggggcttcaagggcagcaagggggagctggcccgggtgcccaggtctgccttctctgctggcctgagcaagcccttccccccacccaacatccccatcaagtttgagaagatcctgtacaatgaccagggcaactacagccctgtgacaggcaagttcaactgcagcatccctggcacctacgtgttctcctaccacatcaccgtgcggggccggcctgcccgcatcagcctggtggcccagaacaagaagcagttcaagagccgggagaccctgtatggccaggagattgaccaggccagcctgctggtgatcctgaagctgtctgctggggaccaggtgtggctggaggtgtccaaggactggaatggagtgtatgtgtctgcagaagatgacagcatcttcaccggcttcctgctgtacccagaggagaccagcggcatcagcccctag

SEQ ID NO: 36495 - DNA, 1434 bp, Artificial Sequence
  derived and/or modified sequence
atgtggatgttcagctggctgtgcgccatcctgatcatcctggccattgcaggaatgaacaccatcgccaaaaccacacctcatacaaagttcactaagaagtcagaggaacgggagatgccaaagggccttaagccttcctcgggccccccccctgaagaagaggagaccctgttcaccgaaatggccgaaatggccgaacccatcaccaaacccagtgctctggatagcgtgttcggtactgcaacactgtctccctttgagaattttaccctcgaccctgcggactttttcttgaactgctgtgactgctgttcccccgtgcctggtcagaagggtgaaccgggcgagactgggcagccagggcccaagggcgaagccggcaacctggggatcccaggaccgcccggtgtggttggcccccagggtcctaggggctacaagggagaaaaaggtctgaagggagaaaggggagatcagggcgtccctggctaccccgggaagcccggtgcgcagggagagccgggccccaagggggataagggaaatatcggcctgggaggagttaagggtcagaagggctccaaaggcgacacctgtggaaattgtactaagggggagaaaggggaccagggagcaatgggaagcccaggcttgcatggtggtcctggtgctaaaggagaaaagggagagatgggggagaagggagaaatgggagataaggggtgctgcggtgacagtggcgaaaggggtggcaagggacagaaaggtgagggcggaatgaaaggagagaagggcagcaagggagactcagggatggaagggaaatccggcagaaatgggttgcccggcgcaaaaggagaccctggtattaagggagagaaaggagagctaggtcctcctggactgctggggccaaccggacccaaaggagacatcggaaataaaggagttaggggtcctactggaaaaaagggtagccgtggattcaaggggtcgaaaggcgagcttgccagggtgcccaggtcggcattctctgctggattatccaagccttttccccctcccaacattccaatcaagtttgaaaagatcctttacaacgaccagggtaattattccccggtgactggtaaattcaattgctctattccagggacatacgtcttttcctatcatattaccgtgcgcggtcggcccgctcgcataagcttggtggctcaaaacaagaagcagttcaagagcagagagaccctatacggacaggaaattgatcaagctagtcttctagtgatcctcaagctctctgccggagaccaggtatggttggaggtttccaaggactggaatggtgtgtacgtgtcagcagaggatgactccatattcactggattcttgctttaccccgaggagaccagtgggatctctccatag

SEQ ID NO: 36496 - DNA, 1434 bp, Artificial Sequence
  derived and/or modified sequence
atgtggatgttttcttggctttgtgctattttaattattttggctattgctggtatgaacacaatagcaaagaccacaccacataccaaatttacgaagaaatctgaggaaagagagatgccaaagggtctaaagccatccagtggcccacctccagaagaagaagaaaccctcttcacagaaatggctgaaatggcagaaccaattaccaaaccctcggccttggattctgtctttggcactgccactctctctccctttgaaaacttcactcttgacccagctgatttctttttgaattgttgtgattgttgttcacctgtacccgggcagaaaggagaacctggagagactggacagccaggtcctaaaggagaggctggaaatttggggatcccagggccaccaggagttgttgggccccaaggccctagaggctacaaaggagagaaaggactcaaaggagaacgtggggaccaaggagttccaggatacccaggaaaaccgggagcacaaggtgaacctggccctaagggagataaaggaaacattggtttgggaggagtgaaaggacaaaaaggctccaagggagacacatgtgggaattgtaccaaaggagaaaaaggagaccaaggggctatgggctcacctggcctgcacggagggcctggcgccaagggagagaagggggagatgggggagaagggggagatgggggataagggctgctgtggagattctggggagaggggaggaaaaggacagaaaggtgaggggggtatgaaaggggaaaaaggtagcaaaggagacagtggaatggaaggcaaaagcggccgtaatggtctgcctggggccaaaggtgatccagggattaaaggagaaaaaggagagttaggtcctcctggtctcctgggacctactgggccgaagggtgacattggcaacaaaggggtccgaggccccactgggaagaagggctctcggggctttaaaggctccaagggtgagttggctagagtgccccggtcggctttcagcgctggtttgtcaaagccatttcctcctcctaacatccccatcaaatttgaaaagattctctataatgaccaagggaattacagtcctgtcactgggaagtttaactgctctattcctgggacatatgttttttcctaccatattacggtgagggggcgacctgctcgaatcagtctggtggcccagaataagaagcagttcaagtccagagaaactctctatggtcaggaaatagaccaggcctctctcctcgtcatcttgaaattaagtgcaggagaccaagtctggcttgaggtgtcaaaagattggaatggggtgtatgtcagtgctgaggatgacagcatttttactgggttccttttgtacccagaggaaacttctggaatttcaccataa

SEQ ID NO: 36497 - DNA, 1434 bp, Artificial Sequence
  derived and/or modified sequence
atgtggatgttcagctggctttgcgcaatcctgatcattttagcaatcgccggaatgaacacaattgctaagacgaccccccatacaaagtttacaaaaaagagcgaggagcgggaaatgcctaagggactcaaaccatcaagcggaccaccacctgaggaagaagaaactctctttaccgaaatggccgagatggcggagcctataacaaagccctcagctctggactctgttttcggcacagccaccctgtctcccttcgaaaacttcaccctcgatccggctgacttctttttaaactgttgtgattgctgttctcctgtgcctggccagaaaggcgagccaggagagaccggccaacccggaccaaagggggaagccggaaacctcggtatacccggtccccctggggtcgtggggcctcaaggccctcgaggatacaagggggagaaaggcctgaagggagaaaggggcgaccaaggggtaccgggatacccaggaaagcccggtgcgcagggcgagcccggtccaaaaggtgacaaggggaacattggactggggggagtgaaaggccaaaaggggtccaagggcgatacctgtggcaactgcacaaagggtgaaaaaggtgaccagggtgcaatgggatctcccggactacacggtgggcctggagccaaaggagagaaaggcgagatgggggaaaagggcgaaatgggtgacaaagggtgctgtggtgattcaggcgagagaggcggaaaaggccagaaaggagagggcggaatgaagggagagaaggggtccaaaggtgactctggcatggaaggcaaatctggaaggaacggcttacctggggcaaagggtgacccaggtattaaaggggaaaaaggcgaactgggtcctcccggacttctgggacccaccggccctaaaggggatataggaaataagggagtccgtggaccgactggaaagaagggcagtcgaggtttcaaggggtcgaagggagagctggcaagggttcctcgctccgctttcagtgcaggtctcagtaagccattcccccctcctaatatccctattaagtttgagaagattctgtacaacgatcagggtaactacagccctgtcaccggtaagttcaattgttccatccctgggacttatgtatttagctaccatatcaccgtcaggggtcgtcctgcaagaatctccctggtagcccaaaacaagaaacagttcaaatcgagggagaccctatacggccaagagattgaccaggcgtcacttctagtgatcctcaagctcagcgctggggaccaggtgtggttagaggtctcaaaagattggaacggcgtgtatgtttctgccgaagacgactccatctttactggcttcctgctctaccctgaagagactagtggcatctccccctag

SEQ ID NO: 36498 - protein, 435 aa, Artificial Sequence
  derived and/or modified sequence
MEGQTPGSRGLPEKPHPATAAATLSSMGAVFILMKSALGAGLLNFPWAFSKAGGVVPAFLVELVSLVFLISGLVILGYAAAVSGQATYQGVVRGLCGPAIGKLCEACFLLNLLMISVAFLRVIGDQLEKLCDSLLSGTPPAPQPWYADQRFTLPLLSVLVILPLSAPREIAFQKYTSILGTLAACYLALVITVQYYLWPQGLVRESHPSLSPASWTSVFSVFPTICFGFQCHEAAVSIYCSMRKRSLSHWALVSVLSLLACCLIYSLTGVYGFLTFGTEVSADVLMSYPGNDMVIIVARVLFAVSIVTVYPIVLFLGRSVMQDFWRRSCLGGWGPSALADPSGLWVRMPLTILWVTVTLAMALFMPDLSEIVSIIGGISSFFIFIFPGLCLICAMGVEPIGPRVKCCLEVWGVVSVLVGTFIFGQSTAAAVWEMF

SEQ ID NO: 36499 - DNA, 1308 bp, Artificial Sequence
  derived and/or modified sequence
atggagggccagacccccggcagcagaggcctgcccgagaagccccaccccgccaccgccgccgccaccctgagcagcatgggcgccgtgttcatcctgatgaagagcgccctgggcgccggcctgctgaacttcccctgggccttcagcaaggccggcggcgtggtgcccgccttcctggtggagctggtgagcctggtgttcctgatcagcggcctggtgatcctgggctacgccgccgccgtgagcggccaggccacctaccagggcgtggtgagaggcctgtgcggccccgccatcggcaagctgtgcgaggcctgcttcctgctgaacctgctgatgatcagcgtggccttcctgagagtgatcggcgaccagctggagaagctgtgcgacagcctgctgagcggcaccccccccgccccccagccctggtacgccgaccagagattcaccctgcccctgctgagcgtgctggtgatcctgcccctgagcgcccccagagagatcgccttccagaagtacaccagcatcctgggcaccctggccgcctgctacctggccctggtgatcaccgtgcagtactacctgtggccccagggcctggtgagagagagccaccccagcctgagccccgccagctggaccagcgtgttcagcgtgttccccaccatctgcttcggcttccagtgccacgaggccgccgtgagcatctactgcagcatgagaaagagaagcctgagccactgggccctggtgagcgtgctgagcctgctggcctgctgcctgatctacagcctgaccggcgtgtacggcttcctgaccttcggcaccgaggtgagcgccgacgtgctgatgagctaccccggcaacgacatggtgatcatcgtggccagagtgctgttcgccgtgagcatcgtgaccgtgtaccccatcgtgctgttcctgggcagaagcgtgatgcaggacttctggagaagaagctgcctgggcggctggggccccagcgccctggccgaccccagcggcctgtgggtgagaatgcccctgaccatcctgtgggtgaccgtgaccctggccatggccctgttcatgcccgacctgagcgagatcgtgagcatcatcggcggcatcagcagcttcttcatcttcatcttccccggcctgtgcctgatctgcgccatgggcgtggagcccatcggccccagagtgaagtgctgcctggaggtgtggggcgtggtgagcgtgctggtgggcaccttcatcttcggccagagcaccgccgccgccgtgtgggagatgttctag

SEQ ID NO: 36500 - DNA, 1308 bp, Artificial Sequence
  derived and/or modified sequence
atggagggccagacaccagggagccgcggcctgccagagaagcctcatcccgccaccgctgccgcaaccctgagtagcatgggcgctgtgttcattctgatgaagtccgcccttggcgccggactgctgaatttcccttgggctttttctaaagcggggggtgtggtgcccgcctttctcgtggaactggtctctttagtctttttgatttccgggctagtgatcttaggatatgccgccgccgtatctgggcaggccacatatcagggggtggtgcgcggactgtgtggcccagccataggcaagctctgcgaggcatgctttttgctcaatcttctcatgatttctgtcgcttttcttcgggtgattggtgaccagctggaaaaactgtgtgacagcctgctgagcggaaccccgcccgccccacagccttggtacgcagaccagagattcaccctgcctttgctgagcgtcctggtaatcttacctctgagtgccccgcgcgagatcgcattccaaaaatacactagcattctcgggaccctcgccgcttgttacctggcgctggtgattaccgtgcaatattacctatggccacaaggcttggttcgagaaagccatccctccttaagccccgctagctggacctcagtatttagcgtgttccctacaatctgtttcggcttccaatgtcacgaggctgcagtctcgatctattgttctatgcggaaaagatccctgtctcattgggctctggtctcagttttgagcctgttagcgtgctgcttgatctactccctgaccggcgtctacggttttctcacgtttgggacggaggtgagtgcagacgtactcatgagctacccgggcaacgatatggtgatcatcgtagccagggttctatttgcagtaagtatcgtgactgtctaccccatcgtattgtttctcggacgttcagttatgcaggacttctggcggcggtcatgtctggggggctggggtccgtctgccctggcagaccctagtggattgtgggtgcggatgcctctcactattttatgggtgacagtcaccttggccatggccctctttatgcccgacttatcggagatagttagcattatcggcggcatcagcagtttcttcatttttatcttcccaggactatgcctgatttgcgccatgggcgttgaacctattggccctcgagtgaagtgctgcctggaggtgtggggagtggtgtcggtgctagtcggcacattcatcttcgggcagtcgacggccgcagccgtttgggagatgttctag

SEQ ID NO: 36501 - DNA, 1308 bp, Artificial Sequence
  derived and/or modified sequence
atggagggccagaccccaggcagccggggcctgcctgagaagccccacccagccacagctgctgccaccctgagctccatgggcgctgtgttcatcctgatgaagagcgccctgggcgccggcctgctgaacttcccctgggccttcagcaaggccggcggcgtggtgcctgccttcctggtggagctggtgtccctggtgttcctgatcagcggcctggtgatcctgggctatgctgctgctgtgtctggccaggccacctaccagggcgtggtgcggggcctgtgtggccctgccatcggcaagctgtgtgaggcctgcttcctgctgaacctgctgatgatctctgtggccttcctgcgggtgattggagaccagctggagaagctgtgtgacagcctgctgagcggcaccccaccagccccccagccctggtatgctgaccagcgcttcaccctgcccctgctgtctgtgctggtgatcctgcccctgagcgccccccgggagatcgccttccagaagtacaccagcatcctgggcaccctggccgcctgctacctggccctggtgatcaccgtgcagtactacctgtggccccagggcctggtgcgggagagccaccccagcctgagccctgcctcctggacctctgtgttcagcgtcttccccaccatctgcttcggcttccagtgccacgaggccgctgtgtccatctactgcagcatgaggaagaggagcctgagccactgggccctggtgtctgtgctgagcctgctggcctgctgcctgatctacagcctgactggagtgtatggcttcctgaccttcggcacagaggtgtctgcagatgtgctgatgagctacccaggaaatgacatggtgatcatcgtggcccgggtgctgtttgctgtgtccatcgtgacagtgtaccccatcgtgctcttcctgggccgctctgtgatgcaggacttctggaggaggagctgcctgggcggctggggccccagcgccctggccgaccccagcggcctgtgggtgaggatgcccctgaccatcctgtgggtgacagtgaccctggccatggccctcttcatgccagacctgtctgaaattgtgtccatcattggaggcatcagcagcttcttcatcttcatcttccctggcctgtgcctgatctgtgccatgggcgtggagcccatcggcccccgggtgaagtgctgcctggaggtgtggggcgtggtgtctgtgctggtgggcaccttcatcttcggccagagcacagctgctgctgtgtgggagatgttttag

SEQ ID NO: 36502 - DNA, 1308 bp, Artificial Sequence
  derived and/or modified sequence
atggagggccagacccccggcagccggggcctgcccgagaagccccatcccgccacggcggcagcaacactcagctctatgggagccgtttttatcttaatgaagagtgcccttggggccggcctgctgaattttccctgggcgtttagtaaagcgggaggcgtggtgccagcatttcttgtcgaactggtatcccttgtgttcttaattagcggcctggtgattcttggttacgctgctgccgtctcaggacaggctacgtaccaaggcgttgtgagggggctgtgcggccccgctattggcaagctttgcgaggcttgctttctcttaaacctgttgatgatttcggtggcgtttctcagggtaattggggatcagctcgagaagctttgtgattccctactctccggcacgccacccgccccccagccctggtatgccgatcaaaggtttaccctgcctcttctctcagtactagtgattttgccacttagtgccccacgcgaaattgctttccaaaagtacacatccatcctcgggacccttgctgcatgctatttggccctggtcatcactgtccaatactatctgtggcctcagggattggtgcgcgaatcgcatccgagtctctcaccagcttcttggacaagcgtttttagcgtgttcccaaccatatgcttcggtttccagtgccacgaagcagctgtgagcatatactgcagtatgcgaaagcggtcattatcacattgggctctcgttagcgttctgagtctgcttgcctgttgtttaatttattctttaacgggcgtttatgggtttctgaccttcggcacagaagtctctgctgacgtcctgatgtcatatcccggaaatgatatggtaattattgttgcacgggtcctattcgcagtatctatcgttacggtgtatccgattgtgctgtttctgggccgaagcgttatgcaggatttttggaggcggagttgcctcggtggttgggggccatccgcacttgccgatccatccggactgtgggttcgcatgccgttaacaatcctatgggtgacagtaacgctggccatggcactgttcatgccagatctgtccgagattgtgtctatcataggcggcatcagctcattctttattttcatttttccgggtctgtgcctgatttgcgccatgggtgttgagcctataggacctagggtgaaatgctgtctggaagtatggggagttgtaagtgtgctcgttgggacatttatcttcggccaatctaccgccgccgctgtttgggagatgttctag

SEQ ID NO: 36503 - DNA, 267 bp, Artificial Sequence
  derived and/or modified sequence
atggcttcatgcactaatcgtggagggttgcctgagaagcattccagctctaaggttagcagccatgcccaaatgatccagaaagcggtggacttcttagacctcttaatagggcatctctccaagtttagccccgtcttaattgtttttcaattctcccccctgggttttcttgtaagacaaagcagtgccgacaacgtacagttcctgtcctttgcaccctccctgatccttccctccgggactggaaattggttggtgtggtag

SEQ ID NO: 36504 - DNA, 1308 bp, Artificial Sequence
  derived and/or modified sequence
atggaggggcagacaccaggctcacgcggtctccctgagaagccccatccagccactgccgcagccaccctctcctccatgggcgctgtgttcatactgatgaagagtgccctgggagccggacttctcaatttcccgtgggctttttccaaagccggaggcgtggtgcctgcattcttggtggagctggtctcactggtattcctgatttccggactcgtgatcttgggttacgccgctgccgtttccggccaggccacctaccagggggttgtccggggactttgtgggcctgcaataggtaaattgtgcgaagcttgtttcttgctcaacttgttaatgatttccgtagcattcctgagggtcatcggcgatcagctggagaaactctgtgacagtctcctgtccggcactcctccagctccacagccatggtacgcagatcaacgcttcacactaccacttctcagcgttttggtgatactcccgctgtcagcccctcgggaaattgcctttcagaagtacaccagcatcctggggaccctggccgcatgttacctggctctggtcatcacggtacaatactatttgtggccacagggccttgtgcgggagtcacatccgtctctctcccctgcttcttggacctccgtgttcagtgtgtttcctactatttgtttcggcttccagtgccacgaggcagctgtctctatctattgctctatgcgcaagcggtcccttagtcactgggcacttgtgagtgtattgtctctactcgcttgctgcctgatttacagcctgaccggagtgtacggttttctgaccttcggaaccgaggtgagtgcggatgtgctgatgtcctatcctggtaatgacatggtgatcatcgttgcgagagttttatttgcagtgagtatcgtcaccgtctaccccatcgtgttatttctgggcaggagcgtgatgcaggacttctggagaagatcgtgtttgggcggttggggtccttcagcacttgccgaccctagcggcctctgggtccgaatgccactgaccatcctctgggtgacagtgaccttggcaatggcgctattcatgcccgatctctctgagatagtgtcaatcatcggtggaattagttcctttttcatcttcatcttccctggactgtgtctgatctgtgctatgggtgtcgagcctattggccctagggttaaatgttgtctcgaagtgtggggagtagtctctgtgcttgtcgggacgttcatattcggccagagtaccgcagcagctgtctgggagatgttttag

SEQ ID NO: 36505 - DNA, 1308 bp, Artificial Sequence
  derived and/or modified sequence
atggagggacagaccccaggaagcaggggccttccagaaaagcctcaccctgccacggctgctgccactctgtcctcgatgggcgctgtcttcatcctcatgaagtccgcgctgggagctggcctgctcaacttcccctgggccttctccaaagcgggcggagtggtccctgccttcctggtggagctggtctcgttggtcttcctgatcagcgggctggtcatcctgggctatgctgctgctgtcagtggccaggccacctaccagggtgtggtcagggggctgtgtggccctgccattgggaagctgtgtgaggcctgcttcctcctcaacctgctcatgatctccgtggccttcctcagggtgatcggggaccagctggagaagctgtgtgactccctcctgtctggcaccccgcccgccccgcagccgtggtacgcagaccagcgcttcaccctgcccctgctctccgtgctggtcatcctgcccctgtctgccccgcgggagatcgccttccagaaatacacaagcatcctaggcactctggctgcctgttacctggccctggtcatcaccgtgcagtactacctctggccccagggcctcgtgcgtgagtcccatccttcactgagccctgcctcctggacctctgtgttcagtgtcttccccaccatctgcttcgggtttcagtgtcacgaagctgccgtctccatctactgcagcatgcgcaaacggagcctctcccactgggccctggtgtctgtgctgtccttgctggcctgctgcctcatctattcactgacgggggtttatggcttcctgacttttgggacagaagtttctgctgacgtcttgatgtcctacccaggcaatgatatggtcatcattgtggcccgggtcctttttgctgtctccatcgtaactgtctaccccatcgtgctcttcctggggaggtcagtgatgcaggacttctggaggaggagctgcttggggggatgggggcccagcgccctggccgacccctcagggctgtgggtccggatgccgctgaccatcctgtgggtcaccgtgacgctcgccatggcgctgtttatgcctgacctcagcgagatcgtcagcatcatcggaggcatcagttccttcttcatcttcatcttcccaggtttgtgcctcatctgtgcaatgggtgtcgagcctataggaccaagagtcaagtgctgcctggaggtctggggagtggtctctgtgctggtcggcaccttcatctttgggcagagcacggcggcagcggtctgggagatgttctga

SEQ ID NO: 36506 - protein, 407 aa, Artificial Sequence
  derived and/or modified sequence
MGQKERSTADTLPDLEEWKSAAGLRWWQTAVVDGSGSGNEVIEGPQNARVLKGSQARFNCTVSQGWKLIMWALSDMVVLSVRPMEPIITNDRFTSQRYDQGGNFTSEMIIHNVEPSDSGNIRCSLQNSRLHGSAYLTVQVMGELFIPSVNLVVAENEPCEVTCLPSHWTRLPDISWELGLLVSHSSYYFVPEPSDLQSAVSILALTPQSNGTLTCVATWKSLKARKSATVNLTVIRCPQDTGGGINIPGVLSSLPSLGFSLPTWGKVGLGLAGTMLLTPTCTLTIRCCCCRRRCCGCNCCCRCCFCCRRKRGFRIQFQKKSEKEKTNKETETESGNENSGYNSDEQKTTDTASLPPKSCESSDPEQRNSSCGPPHQRADQRPPRPASHPQASFNLASPEKVSNTTVV

SEQ ID NO: 36507 - DNA, 1224 bp, Artificial Sequence
  derived and/or modified sequence
atgggccagaaggagagaagcaccgccgacaccctgcccgacctggaggagtggaagagcgccgccggcctgagatggtggcagaccgccgtggtggacggcagcggcagcggcaacgaggtgatcgagggcccccagaacgccagagtgctgaagggcagccaggccagattcaactgcaccgtgagccagggctggaagctgatcatgtgggccctgagcgacatggtggtgctgagcgtgagacccatggagcccatcatcaccaacgacagattcaccagccagagatacgaccagggcggcaacttcaccagcgagatgatcatccacaacgtggagcccagcgacagcggcaacatcagatgcagcctgcagaacagcagactgcacggcagcgcctacctgaccgtgcaggtgatgggcgagctgttcatccccagcgtgaacctggtggtggccgagaacgagccctgcgaggtgacctgcctgcccagccactggaccagactgcccgacatcagctgggagctgggcctgctggtgagccacagcagctactacttcgtgcccgagcccagcgacctgcagagcgccgtgagcatcctggccctgaccccccagagcaacggcaccctgacctgcgtggccacctggaagagcctgaaggccagaaagagcgccaccgtgaacctgaccgtgatcagatgcccccaggacaccggcggcggcatcaacatccccggcgtgctgagcagcctgcccagcctgggcttcagcctgcccacctggggcaaggtgggcctgggcctggccggcaccatgctgctgacccccacctgcaccctgaccatcagatgctgctgctgcagaagaagatgctgcggctgcaactgctgctgcagatgctgcttctgctgcagaagaaagagaggcttcagaatccagttccagaagaagagcgagaaggagaagaccaacaaggagaccgagaccgagagcggcaacgagaacagcggctacaacagcgacgagcagaagaccaccgacaccgccagcctgccccccaagagctgcgagagcagcgaccccgagcagagaaacagcagctgcggccccccccaccagagagccgaccagagaccccccagacccgccagccacccccaggccagcttcaacctggccagccccgagaaggtgagcaacaccaccgtggtgtag

SEQ ID NO: 36508 - DNA, 1224 bp, Artificial Sequence
  derived and/or modified sequence
atgggccaaaaagaaaggtctacagccgatacattgccagatctagaggaatggaaatctgccgcagggctccggtggtggcagactgcagtggtggacggatctggcagcggaaatgaagtgattgagggccctcaaaacgcccgggtgctcaagggctcgcaagctcgctttaactgcaccgtgagccagggatggaaactgatcatgtgggctctgtcagacatggtcgtcctgagcgtgagacctatggagccaattatcaccaacgacaggtttacaagtcagcggtatgaccaaggtgggaattttacttcagaaatgattatccacaatgttgagccttctgatagcggaaacattaggtgtagtctgcagaatagcaggcttcatggcagcgcttaccttactgtgcaggttatgggagagctgtttatcccctctgtaaacttagtcgtggcggagaatgaaccttgtgaagtgacttgcctgccctcccattggaccagacttcctgatattagttgggagctgggcctgctagtctcccactctagttattatttcgtcccagagccctcagatttgcaatctgccgtttccatcttagccttgaccccccagagtaatggcaccctcacctgtgtggctacatggaagtcactgaaggccagaaagagcgctacagttaatctcaccgtgatccggtgcccacaggacaccggtggcgggataaacattccgggggtgttgtcctctctcccatccttagggttctccctccccacctggggcaaggtgggtttaggtcttgctggtaccatgctgttgacgcccacgtgcactctcacgatcagatgctgctgttgtcggcgcagatgctgcgggtgcaactgttgttgcagatgctgcttttgttgtaggcggaaacggggatttcgcatccagttccagaaaaagagcgagaaggagaagactaacaaggagactgagactgagagcgggaatgagaacagcgggtataactctgacgagcagaaaactacagacacagcgtctcttcctcctaaatcatgtgagtcgtccgaccctgagcagcggaactcttcctgtggtcccccccatcagagggcagaccagagaccccctcgaccagcttcacatccccaggcttctttcaatctggcatccccagaaaaagttagcaataccacggtggtctag

SEQ ID NO: 36509 - DNA, 2066 bp, Artificial Sequence
  derived and/or modified sequence
accattagtacctaggaggcagggatcagaggaagtagattcagaggtaaggagaattttggggctatactttcaagaaagtcgtgttcgggacccaggaggtatgggtcagaaggaaaggagcacagcagatactctgccggatctggaggaatggaagtcagcggcgggtctgcgatggtggcaaacagcagtggtggacggttctgggtctggtaatgaagtcatagaaggcccccaaaatgcaagagtcctgaagggctcccaggctcgcttcaactgcaccgtctcccagggctggaagctcatcatgtgggctctcagtgacatggtggtgctaagcgtcaggcccatggagcccatcatcaccaatgaccgcttcacctctcagaggtacgaccagggcgggaacttcacctcggagatgatcatccacaatgtggagcccagtgattcggggaacatcagatgcagcctccagaacagtcgcctgcatggatctgcttaccttaccgtccaagttatgggagagctgttcattcccagtgttaatcttgtagtcgctgagaatgaaccttgtgaagttacttgtctaccctcacactggacccggctcccggatatttcctgggagctcggtctcctggtcagccattcaagctattattttgttccggagcccagcgaccttcaaagtgcagtgagcatcctggctctgaccccacagagcaatgggactttgacttgcgtggctacctggaagagcctgaaggcccgcaagtctgcaactgtaaatctcactgtgattcggtgtccccaagacactggaggtggtattaatattccaggtgtattatcaagtttaccgagtttaggtttttcattgcctacttggggcaaagttggacttggactagcaggcaccatgcttctgacgccgacgtgtactcttacaatacgctgctgctgctgccgccgtcgttgttgtggctgcaactgctgctgccgttgttgtttctgctgtagaagaaaaagaggatttcgtattcaatttcaaaagaaatctgaaaaagagaagacaaacaaagaaactgagacagaaagtggaaatgaaaactccggctacaattcagatgaacaaaagaccacagacaccgcttctctccctcccaaatcctgtgaatccagtgatcctgaacaaagaaacagtagctgtggccctcctcaccagcgggctgatcaacgtccacccaggccagcaagtcatccacaggcttcttttaatctggccagtcctgagaaggtcagtaatacaactgtagtatagcaaagccttccccaagctccactgagcacttggctgacaattcaaaacacggcgatggcatccttcctttccatcctaagactggcctgcagctttgccaacattacctgaagaggagatgtcggagtcatcagaactgatacttgacagtgagagaaggaatcgattttcccagagttcaaagtagaatgtgacttttaagaggtttcatggtttttgtgaattccatgaagttactaagtaaaagctgcaaattcatcataatttttctcaacattcaacactcctacttgttaatccaacaaatggtagataaaagtctgtattctaccatgcctttcaaaagtttttattatctgaaagcatatgaagatgatatttatgtatatttaatatgtaggggtattattacatattatcagtgaaatacgagtataaaaattagggtcaaccagaaatctgcaattgactgtcaaaactgagctcagttaaagtaagattcaattctaacatggatgtgcacgttcctaaatatcttatgattgaatatttacatgaaggcattcatttttatctgcccctttatcagacctatttgcatctcctcaaatgaattagatgtggcctatgctttgcagaggatggacctcacctactccgcacaccgtgaaaaaactggaaatgggcattgtagtctttaattaataaaaacaccaaaaatgtgtattgcctttcttaa

SEQ ID NO: 36510 - DNA, 1224 bp, Artificial Sequence
  derived and/or modified sequence
atgggccagaaggagaggagcacagctgacaccctgcctgacctggaggagtggaagtctgctgctggcctgcgctggtggcagacagctgtggtggatggcagcggcagcggaaatgaagtcatcgagggcccccagaatgcccgggtgctgaagggcagccaggcccgcttcaactgcaccgtgtcccagggctggaagctgatcatgtgggccctgagtgacatggtggtgctgtctgtgcggcccatggagcccatcatcaccaatgaccgcttcaccagccagagatatgaccagggcggcaacttcaccagcgagatgatcatccacaacgtggagcccagcgacagcggcaacatccgctgcagcctgcagaacagccggctgcacggcagcgcctacctgactgtgcaggtgatgggagagctgttcatccccagcgtgaacctggtggtggctgaaaatgagccctgtgaggtgacctgcctgcccagccactggacccggctgcctgacatctcctgggagctgggcctgctggtgagccacagcagctactactttgtgcctgagcccagcgacctgcagagcgctgtgtccatcctggccctgaccccccagagcaatggcaccctgacctgtgtggccacctggaagagcctgaaggccaggaagagcgccaccgtgaacctgaccgtcatccgctgcccccaggacacaggaggcggcatcaacatccctggggtgctgagcagcctgcccagcctgggcttcagcctgcccacctggggcaaggtgggcctgggcctggccggcaccatgctgctgacccccacctgcaccctgaccatccgctgctgctgctgcagaagacgctgctgcggctgcaactgctgctgccgctgctgcttctgctgcaggaggaagaggggcttccgcatccagttccagaagaagtctgagaaggagaagaccaacaaggagacagaaacagagagcggaaatgaaaattctggctacaacagtgatgagcagaagaccacagacacagccagcctgccccccaagagctgtgagagcagtgaccctgagcagaggaacagcagctgtggccccccccaccagagagctgaccagaggcctcccaggcctgccagccacccccaggccagcttcaacctggccagccctgagaaggtgagcaacaccaccgtggtgtag

SEQ ID NO: 36511 - DNA, 1224 bp, Artificial Sequence
  derived and/or modified sequence
atgggccagaaggagcggagcaccgccgacaccctgcccgacctggaagagtggaagagcgccgctggtttgaggtggtggcagacagccgtggtggacggaagtggaagtggaaacgaggtcatcgagggcccccagaacgctagggtgctgaaaggcagtcaggcaaggttcaactgtacagtgtcccaggggtggaagctgattatgtgggctctgtcagatatggtggtcctgagtgtcaggccgatggaacccatcattaccaatgaccgctttacctcacagcgctacgatcaggggggcaactttacaagtgaaatgatcattcataatgtggaaccgagcgacagcgggaatattaggtgctccttacaaaactcccggttgcatggttctgcttatctgactgtccaggtgatgggcgagctgttcatcccctctgttaacctggtggttgcggagaacgagccgtgtgaggtcacatgcctaccatcccactggacaaggttgccagatattagttgggagctcggtctgctggtgagccattcctcatattattttgttcccgagcccagtgatcttcagtccgctgttagcatcttggctctgaccccgcagtccaacggcactctaacctgcgtggcaacatggaagtccttgaaagcaaggaagagtgctacagtgaacttaaccgtgattcgatgcccacaggatacagggggcggaataaatatccccggagtcctctcctccctgcctagcctgggcttctcattgcccacttgggggaaagtaggcctggggctcgcaggtaccatgctactgacccccacgtgtacattaaccatacggtgctgctgttgtagacgccgctgttgcgggtgtaactgctgttgtcgatgctgtttttgctgtcggagaaagagaggatttcggatacagttccagaaaaaatcagaaaaagagaagaccaataaagaaactgaaacagagtcagggaatgaaaattctgggtacaactccgatgaacagaaaacaaccgacacggccagcctgccgcccaagagttgcgaatcaagtgatccagagcagaggaatagctcttgtggccccccacaccagagggcggaccagagaccaccgcgacctgcttctcacccccaggccagcttcaacctcgctagccccgaaaaagtctccaacacaaccgtggtctag

SEQ ID NO: 36512 - DNA, 1224 bp, Artificial Sequence
  derived and/or modified sequence
atggggcagaaggagcgatccaccgccgacacgcttcctgatcttgaggagtggaaatcagccgcagggcttcgatggtggcaaacggccgtggttgatgggagcgggtccggcaacgaggtaatcgaaggtcctcagaatgcccgtgtcctgaagggaagtcaggctcgcttcaattgcactgtgtcccagggatggaagctgatcatgtgggccctctccgacatggtggtgctgagcgtgcgtcccatggaacccatcattacgaatgatagatttaccagtcagcgatacgatcaggggggaaattttacgtcggaaatgatcatccataatgtagagccgtcagattctggcaacatacggtgtagcctgcaaaactcaagacttcatggcagcgcgtacttgactgtccaggtgatgggcgaattgtttattccttcggtcaatctcgtggtcgcagagaatgagccctgcgaggtgacgtgtttaccttctcattggacgcgcttgcccgatattagctgggagttgggcctactcgtatctcactcatcctattatttcgttcccgagccctctgacttgcagtccgccgttagtatccttgcactgactcctcaatcaaacggcactctcacctgtgttgcgacctggaagagcctgaaggccagaaaaagcgcaactgttaacttgacggttatacgctgtccacaggacaccggaggcggaattaacatccctggcgtcctgtctagcctgcccagcctggggtttagcctgcctacttggggtaaggtcgggctgggcctcgcaggcaccatgctgctcaccccaacgtgtaccttgacaatcaggtgctgctgctgtcggaggcgctgttgcgggtgcaattgttgctgtcggtgctgtttttgttgtcgcaggaaaagaggcttccgcattcaatttcagaagaaatcggagaaagagaaaaccaacaaggagacagagacagagtctggtaacgaaaactctggctacaatagtgatgaacaaaagacaacagacaccgcatccctgccccctaagagctgcgagtcatcagatcctgaacagcgcaattcaagttgcggcccacctcaccaacgcgctgatcagaggcccccacgtcccgcttcccacccccaagcatcctttaacctagcttcccccgaaaaggtgagcaacacaactgtcgtctag

SEQ ID NO: 36513 - protein, 1130 aa, Artificial Sequence
  derived and/or modified sequence
MQFPSPPAARSSPAPQAASSSEAAAPATGQPGPSCPVPGTSRRGRPGTPPAGRVEEEEEEEEEDVDKDPHPTQNTCLRCRHFSLRERKREPRRTMGGCEVREFLLQFGFFLPLLTAWPGDCSHVSNNQVVLLDTTTVLGELGWKTYPLNGWDAITEMDEHNRPIHTYQVCNVMEPNQNNWLRTNWISRDAAQKIYVEMKFTLRDCNSIPWVLGTCKETFNLFYMESDESHGIKFKPNQYTKIDTIAADESFTQMDLGDRILKLNTEIREVGPIERKGFYLAFQDIGACIALVSVRVFYKKCPFTVRNLAMFPDTIPRVDSSSLVEVRGSCVKSAEERDTPKLYCGADGDWLVPLGRCICSTGYEEIEGSCHACRPGFYKAFAGNTKCSKCPPHSLTYMEATSVCQCEKGYFRAEKDPPSMACTRPPSAPRNVVFNINETALILEWSPPSDTGGRKDLTYSVICKKCGLDTSQCEDCGGGLRFIPRHTGLINNSVIVLDFVSHVNYTFEIEAMNGVSELSFSPKPFTAITVTTDQDAPSLIGVVRKDWASQNSIALSWQAPAFSNGAILDYEIKYYEKEHEQLTYSSTRSKAPSVIITGLKPATKYVFHIRVRTATGYSGYSQKFEFETGDETSDMAAEQGQILVIATAAVGGFTLLVILTLFFLITGRCQWYIKAKMKSEEKRRNHLQNGHLRFPGIKTYIDPDTYEDPSLAVHEFAKEIDPSRIRIERVIGAGEFGEVCSGRLKTPGKREIPVAIKTLKGGHMDRQRRDFLREASIMGQFDHPNIIRLEGVVTKRSFPAIGVEAFCPSFLRAGFLNSIQAPHPVPGGGSLPPRIPAGRPVMIVVEYMENGSLDSFLRKHDGHFTVIQLVGMLRGIASGMKYLSDMGYVHRDLAARNILVNSNLVCKVSDFGLSRVLEDDPEAAYTTTGGKIPIRWTAPEAIAYRKFSSASDAWSYGIVMWEVMSYGERPYWEMSNQDVILSIEEGYRLPAPMGCPASLHQLMLHCWQKERNHRPKFTDIVSFLDKLIRNPSALHTLVEDILVMPESPGEVPEYPLFVTVGDWLDSIKMGQYKNNFVAAGFTTFDLISRMSIDDIRRIGVILIGHQRRIVSSIQTLRLHMMHIQEKGFHV

SEQ ID NO: 36514 - DNA, 3393 bp, Artificial Sequence
  derived and/or modified sequence
atgcagttccccagcccccccgccgccagaagcagccccgccccccaggccgccagcagcagcgaggccgccgcccccgccaccggccagcccggccccagctgccccgtgcccggcaccagcagaagaggcagacccggcaccccccccgccggcagagtggaggaggaggaggaggaggaggaggaggacgtggacaaggacccccaccccacccagaacacctgcctgagatgcagacacttcagcctgagagagagaaagagagagcccagaagaaccatgggcggctgcgaggtgagagagttcctgctgcagttcggcttcttcctgcccctgctgaccgcctggcccggcgactgcagccacgtgagcaacaaccaggtggtgctgctggacaccaccaccgtgctgggcgagctgggctggaagacctaccccctgaacggctgggacgccatcaccgagatggacgagcacaacagacccatccacacctaccaggtgtgcaacgtgatggagcccaaccagaacaactggctgagaaccaactggatcagcagagacgccgcccagaagatctacgtggagatgaagttcaccctgagagactgcaacagcatcccctgggtgctgggcacctgcaaggagaccttcaacctgttctacatggagagcgacgagagccacggcatcaagttcaagcccaaccagtacaccaagatcgacaccatcgccgccgacgagagcttcacccagatggacctgggcgacagaatcctgaagctgaacaccgagatcagagaggtgggccccatcgagagaaagggcttctacctggccttccaggacatcggcgcctgcatcgccctggtgagcgtgagagtgttctacaagaagtgccccttcaccgtgagaaacctggccatgttccccgacaccatccccagagtggacagcagcagcctggtggaggtgagaggcagctgcgtgaagagcgccgaggagagagacacccccaagctgtactgcggcgccgacggcgactggctggtgcccctgggcagatgcatctgcagcaccggctacgaggagatcgagggcagctgccacgcctgcagacccggcttctacaaggccttcgccggcaacaccaagtgcagcaagtgccccccccacagcctgacctacatggaggccaccagcgtgtgccagtgcgagaagggctacttcagagccgagaaggacccccccagcatggcctgcaccagaccccccagcgcccccagaaacgtggtgttcaacatcaacgagaccgccctgatcctggagtggagcccccccagcgacaccggcggcagaaaggacctgacctacagcgtgatctgcaagaagtgcggcctggacaccagccagtgcgaggactgcggcggcggcctgagattcatccccagacacaccggcctgatcaacaacagcgtgatcgtgctggacttcgtgagccacgtgaactacaccttcgagatcgaggccatgaacggcgtgagcgagctgagcttcagccccaagcccttcaccgccatcaccgtgaccaccgaccaggacgcccccagcctgatcggcgtggtgagaaaggactgggccagccagaacagcatcgccctgagctggcaggcccccgccttcagcaacggcgccatcctggactacgagatcaagtactacgagaaggagcacgagcagctgacctacagcagcaccagaagcaaggcccccagcgtgatcatcaccggcctgaagcccgccaccaagtacgtgttccacatcagagtgagaaccgccaccggctacagcggctacagccagaagttcgagttcgagaccggcgacgagaccagcgacatggccgccgagcagggccagatcctggtgatcgccaccgccgccgtgggcggcttcaccctgctggtgatcctgaccctgttcttcctgatcaccggcagatgccagtggtacatcaaggccaagatgaagagcgaggagaagagaagaaaccacctgcagaacggccacctgagattccccggcatcaagacctacatcgaccccgacacctacgaggaccccagcctggccgtgcacgagttcgccaaggagatcgaccccagcagaatcagaatcgagagagtgatcggcgccggcgagttcggcgaggtgtgcagcggcagactgaagacccccggcaagagagagatccccgtggccatcaagaccctgaagggcggccacatggacagacagagaagagacttcctgagagaggccagcatcatgggccagttcgaccaccccaacatcatcagactggagggcgtggtgaccaagagaagcttccccgccatcggcgtggaggccttctgccccagcttcctgagagccggcttcctgaacagcatccaggccccccaccccgtgcccggcggcggcagcctgccccccagaatccccgccggcagacccgtgatgatcgtggtggagtacatggagaacggcagcctggacagcttcctgagaaagcacgacggccacttcaccgtgatccagctggtgggcatgctgagaggcatcgccagcggcatgaagtacctgagcgacatgggctacgtgcacagagacctggccgccagaaacatcctggtgaacagcaacctggtgtgcaaggtgagcgacttcggcctgagcagagtgctggaggacgaccccgaggccgcctacaccaccaccggcggcaagatccccatcagatggaccgcccccgaggccatcgcctacagaaagttcagcagcgccagcgacgcctggagctacggcatcgtgatgtgggaggtgatgagctacggcgagagaccctactgggagatgagcaaccaggacgtgatcctgagcatcgaggagggctacagactgcccgcccccatgggctgccccgccagcctgcaccagctgatgctgcactgctggcagaaggagagaaaccacagacccaagttcaccgacatcgtgagcttcctggacaagctgatcagaaaccccagcgccctgcacaccctggtggaggacatcctggtgatgcccgagagccccggcgaggtgcccgagtaccccctgttcgtgaccgtgggcgactggctggacagcatcaagatgggccagtacaagaacaacttcgtggccgccggcttcaccaccttcgacctgatcagcagaatgagcatcgacgacatcagaagaatcggcgtgatcctgatcggccaccagagaagaatcgtgagcagcatccagaccctgagactgcacatgatgcacatccaggagaagggcttccacgtgtag

SEQ ID NO: 36515 - DNA, 3393 bp, Artificial Sequence
  derived and/or modified sequence
atgcaattcccttcccccccagccgcgagaagtagtcccgcgccacaggctgcttccagttcggaagccgcagcccccgccacaggccagccaggacctagctgtcctgtcccaggcacatcacgtaggggccgccccggcactccacccgccggccgagtcgaggaagaggaggaggaagaagaggaagatgtagataaggacccacatcctacccagaatacgtgcctgcggtgccgacactttagcttgcgagaacgcaaacgcgaacctcggagaacaatgggcgggtgcgaggtacgggagtttctgcttcagtttggtttcttcctgcctctgctgacagcatggcccggcgattgcagccacgtgtccaataatcaggttgttttattagacacaaccacggtgctgggtgaattaggctggaagacataccctcttaacggctgggatgcaattactgaaatggacgaacacaatcgccctatccatacctaccaggtttgcaacgtgatggaacctaaccagaacaactggttacgtactaactggatttccagagatgctgcccaaaaaatctacgtggagatgaaatttaccctacgggactgtaacagcatcccatgggtcttaggaacttgtaaagaaaccttcaatcttttttatatggaatccgacgagagccatggtataaaattcaagcctaatcagtatacaaagatcgacaccattgctgccgatgaaagtttcacccagatggacctgggggacagaatcctgaaactcaacactgagattcgtgaggtcgggcccattgagaggaaagggttttacctcgcattccaagacattggcgcctgcatcgcgctggtgtctgtcagggtgttttataagaaatgtccctttacagtgcgaaatctggcaatgttccccgataccattcctagagtggatagtagctccctggtggaagtccggggttcttgtgttaagagcgctgaagaacgcgatacccctaagctgtattgtggggccgatggggattggctggtaccattgggaaggtgcatctgctccacaggttacgaagagatcgaggggtcttgtcacgcctgcaggccagggttttacaaagccttcgccggtaacacaaagtgctctaaatgccccccacattcactgacctacatggaagcaacctctgtatgccagtgcgagaaaggatacttcagagccgagaaggatcctccttccatggcctgtacgcgccctccttccgcgccgagaaatgtcgtctttaacattaatgaaacggccctgatcttggagtggtcccccccatccgacaccggggggaggaaagatttgacgtactccgtcatttgcaagaaatgtggcctcgatacctcacaatgtgaggactgcggtggagggctccgattcataccgcggcataccggcctgatcaataattcagtcattgtgctggattttgtgagccatgttaactatacgtttgaaattgaggcgatgaatggcgtctcggagttgagctttagccccaagccttttaccgccatcaccgtgaccacagatcaggacgcccccagcttgattggggtcgtgcgaaaggattgggcatcgcagaactctattgccctatcgtggcaggctccggctttttccaacggcgccatcctggactacgagatcaagtattatgaaaaagaacatgagcagctgacttacagctccactcgcagcaaagctccttccgttatcatcacagggctgaaaccagcgacaaaatacgtgtttcacatccgagtcagaaccgccaccgggtactcaggttactcccagaaattcgagttcgagaccggagacgagaccagtgatatggcagccgagcagggacagattctggtgatcgcaaccgccgcggtcgggggattcacacttttagtaattctgactttatttttcctaataaccggccgctgccagtggtacatcaaagcaaagatgaagtccgaggagaaaaggcgaaaccacctccagaacggtcatctccggttccctggtataaagacatacatcgacccagacacgtatgaggacccatcgctagccgttcatgaattcgccaaggagatcgatccctcccgaattagaattgaaagagtgattggagcaggggagtttggggaggtctgctctgggcgcctgaagacaccaggtaaacgcgagataccggtggccattaagacacttaagggtggtcacatggaccggcagagacgagatttcctacgggaggctagcatcatggggcagttcgaccatcctaacataatcaggctggaaggtgtggtgacaaaaaggtcttttccggccatcggcgttgaagccttctgtccaagtttcctgcgggccgggtttctgaattcaattcaggcaccacacccagttccaggcgggggctccctgccgcccaggattcccgcagggcggcctgtgatgatcgtagtcgagtatatggagaacgggagcttggatagcttcctgagaaagcacgacggtcattttacagtcatccagctcgttggaatgctgagagggattgctagcgggatgaaatacttaagtgacatgggttacgtgcacagggatctggctgcaaggaacatcctggttaatagtaacctggtttgtaaggtttccgatttcgggctttcgagagtgctcgaagatgatcccgaggccgcctacactaccacaggaggcaagataccaattcggtggaccgcccctgaggccattgcttatcgcaagttttcctccgcctccgatgcttggagttatggaatcgtgatgtgggaggtaatgagttacggtgagcggccctattgggagatgagcaaccaggatgtcatcttgtccatcgaagaagggtaccgactgcctgcgcccatgggatgtcctgcctcactacaccaactcatgctccactgctggcagaaagaacgcaaccaccggccgaaatttaccgacatcgtgtcttttctggacaagctcatccgaaacccttccgctctgcacaccttggttgaggacatcttggtgatgccagaaagtccaggagaggtgccagaataccctttgtttgtgactgtgggagattggctggacagcattaaaatgggccaatacaagaacaatttcgttgcggccggatttacgactttcgatctcatctcacgcatgtccattgatgatatcagaaggattggcgtgatcctaataggccaccagcgtagaattgttagcagtattcaaacattacggcttcacatgatgcacatccaagaaaagggatttcatgtctag

SEQ ID NO: 36516 - DNA, 3971 bp, Artificial Sequence
  derived and/or modified sequence
aagtgaatagtcctcgcgcaagcgggacactgtggtggatgcaattcccctcgcctccagccgcgaggagctccccggcgccgcaggcagcgtcctcctccgaagcagctgcacctgcaactgggcagcctggaccctcgtgccctgttcccgggacctcgcgcagggggcgccccgggacaccccctgcgggccgggtggaggaggaagaggaggaggaggaagaagacgtggacaaggacccccatcctacccagaacacctgcctgcgctgccgccacttctctttaagggagaggaaaagagagcctaggagaaccatggggggctgcgaagtccgggaatttcttttgcaatttggtttcttcttgcctctgctgacagcgtggccaggcgactgcagtcacgtctccaacaaccaagttgtgttgcttgatacaacaactgtactgggagagctaggatggaaaacatatccattaaatgggtgggatgccatcactgaaatggatgaacataataggcccattcacacataccaggtatgtaatgtaatggaaccaaaccaaaacaactggcttcgtacaaactggatctcccgtgatgcagctcagaaaatttatgtggaaatgaaattcacactaagggattgtaacagcatcccatgggtcttggggacttgcaaagaaacatttaatctgttttatatggaatcagatgagtcccacggaattaaattcaagccaaaccagtatacaaagatcgacacaattgctgctgatgagagttttacccagatggatttgggtgatcgcatcctcaaactcaacactgaaattcgtgaggtggggcctatagaaaggaaaggattttatctggcttttcaagacattggggcgtgcattgccctggtttcagtccgtgttttctacaagaaatgccccttcactgttcgtaacttggccatgtttcctgataccattccaagggttgattcctcctctttggttgaagtacggggttcttgtgtgaagagtgctgaagagcgtgacactcctaaactgtattgtggagctgatggagattggctggttcctcttggaaggtgcatctgcagtacaggatatgaagaaattgagggttcttgccatgcttgcagaccaggattctataaagcttttgctgggaacacaaaatgttctaaatgtcctccacacagtttaacatacatggaagcaacttctgtctgtcagtgtgaaaagggttatttccgagctgaaaaagacccaccttctatggcatgtaccaggccaccttcagctcctaggaatgtggtttttaacatcaatgaaacagcccttattttggaatggagcccaccaagtgacacaggagggagaaaagatctcacatacagtgtaatctgtaagaaatgtggcttagacaccagccagtgtgaggactgtggtggaggactccgcttcatcccaagacatacaggcctgatcaacaattccgtgatagtacttgactttgtgtctcacgtgaattacacctttgaaatagaagcaatgaatggagtttctgagttgagtttttctcccaagccattcacagctattacagtgaccacggatcaagatgcaccttccctgataggtgtggtaaggaaggactgggcatcccaaaatagcattgccctatcatggcaagcacctgctttttccaatggagccattctggactacgagatcaagtactatgagaaagaacatgagcagctgacctactcttccacaaggtccaaagcccccagtgtcatcatcacaggtcttaagccagccaccaaatatgtatttcacatccgagtgagaactgcgacaggatacagtggctacagtcagaaatttgaatttgaaacaggagatgaaacttctgacatggcagcagaacaaggacagattctcgtgatagccaccgccgctgttggcggattcactctcctcgtcatcctcactttattcttcttgatcactgggagatgtcagtggtacataaaagccaagatgaagtcagaagagaagagaagaaaccacttacagaatgggcatttgcgcttcccgggaattaaaacttacattgatccagatacatatgaagacccatccctagcagtccatgaatttgcaaaggagattgatccctcaagaattcgtattgagagagtcattggggcaggtgaatttggagaagtctgtagtgggcgtttgaagacaccagggaaaagagagatcccagttgccattaaaactttgaaaggtggccacatggatcggcaaagaagagattttctaagagaagctagtatcatgggccagtttgaccatccaaacatcattcgcctagaaggggttgtcaccaaaagatccttcccggccattggggtggaggcgttttgccccagcttcctgagggcagggtttttaaatagcatccaggccccgcatccagtgccagggggaggatctttgccccccaggattcctgctggcagaccagtaatgattgtggtggaatatatggagaatggatccctagactcctttttgcggaagcatgatggccacttcacagtcatccagttggtcggaatgctccgaggcattgcatcaggcatgaagtatctttctgatatgggttatgttcatcgagacctagcggctcggaatatactggtcaatagcaacttagtatgcaaagtttctgattttggtctctccagagtgctggaagatgatccagaagctgcttatacaacaactggtggaaaaatccccataaggtggacagccccagaagccatcgcctacagaaaattctcctcagcaagcgatgcatggagctatggcattgtcatgtgggaggtcatgtcctatggagagagaccttattgggaaatgtctaaccaagatgtcattctgtccattgaagaagggtacagacttccagctcccatgggctgtccagcatctctacaccagctgatgctccactgctggcagaaggagagaaatcacagaccaaaatttactgacattgtcagcttccttgacaaactgatccgaaatcccagtgcccttcacaccctggtggaggacatccttgtaatgccagagtcccctggtgaagttccggaatatcctttgtttgtcacagttggtgactggctagattctataaagatggggcaatacaagaataacttcgtggcagcagggtttacaacatttgacctgatttcaagaatgagcattgatgacattagaagaattggagtcatacttattggacaccagagacgaatagtcagcagcatacagactttacgtttacacatgatgcacatacaggagaagggatttcatgtatgaaagtaccacaagcacctgtgttttgtgcctcagcatttctaaaatgaacgatatcctctctactactctctcttctgattctccaaacatcacttcacaaactgcagtcttctgttcagactataggcacacaccttatgtttatgcttccaaccaggattttaaaatcatgctacataaatccgttctgaataacctgcaactaaaaccctggcccactgcagattattgctacgcaatggtaaataactcagcatggatgtgtaattttgtataagccgtatatgggaagtgttcacggacttaacctaaaaaaatttatccaggtggggcttccttagtgatgtatgtagagtgtgatggtagatgagaaagaactagttgacctttctttcatgttttgtgatcaagtagcttccaaactgacagaaatgtttcatttttagataattatattcagctctattggttgtattattactttattttttaatactttaactgttggtgcctgatattgttagaattatttgcagaaat

SEQ ID NO: 36517 - DNA, 3393 bp, Artificial Sequence
  derived and/or modified sequence
atgcagttccccagccccccagctgcccggagcagccctgccccccaggccgccagcagcagcgaggccgccgccccagccaccggccagcccggccccagctgccctgtgcccggcaccagccggcggggccggcccggcaccccacctgctggccgggtggaggaggaggaggaggaggaggaggaggatgtggacaaggacccccaccccacccagaacacctgcctgcgctgccgccacttcagcctgcgggagaggaagcgggagcccaggaggaccatgggcggctgtgaggtgcgggagttcctgctgcagtttggcttcttcctgcccctgctgacagcctggccaggggactgcagccacgtgagcaacaaccaggtggtgctgctggacaccaccaccgtgctgggggagctgggctggaagacctaccccctgaatggctgggatgccatcacagagatggatgagcacaaccggcccatccacacctaccaggtgtgcaatgtgatggagcccaaccagaacaactggctgcggaccaactggatcagcagagatgctgcccagaagatctacgtggagatgaagttcaccctgcgggactgcaacagcatcccctgggtgctgggcacctgcaaggagaccttcaacctcttctacatggagagtgatgagagccacggcatcaagttcaagcccaaccagtacaccaagattgacaccatcgctgctgatgagagcttcacccagatggacctgggggaccgcatcctgaagctgaacacagagatccgggaggtgggccccattgaaaggaagggcttctacctggccttccaggacattggagcctgcatcgccctggtgtctgtgcgggtcttctacaagaagtgccccttcaccgtgaggaacctggccatgtttcctgacaccatcccccgggtggacagcagcagcctggtggaggtgcggggcagctgtgtgaagtctgctgaggagcgggacacccccaagctgtactgtggggctgatggagactggctggtgcccctgggccgctgcatctgcagcacaggctatgaggagattgagggcagctgccacgcctgcaggcctggcttctacaaggcctttgctggcaacaccaagtgcagcaaatgtcctccccacagcctgacctacatggaggccacctctgtgtgccagtgtgagaagggctacttccgggcagagaaggaccccccatccatggcctgcaccaggcctccttctgcccccagaaatgtggtgttcaacatcaatgaaacagccctgatcctggagtggagccccccaagtgacacaggaggcaggaaggacctgacctacagcgtcatctgcaagaagtgtggcctggacaccagccagtgtgaggactgtggcggcggcctgcgcttcatccccaggcacacaggcctcatcaacaacagcgtgattgtgctggactttgtgagccacgtgaactacacctttgaaattgaggccatgaatggagtgtctgagctgtccttcagccccaagcccttcaccgccatcaccgtgaccacagaccaggatgcccccagcctcatcggcgtggtgaggaaggactgggccagccagaacagcatcgccctgtcctggcaggccccagccttcagcaatggagccatcctggactatgagatcaagtactatgagaaggagcacgagcagctgacctacagcagcaccaggagcaaggcccccagcgtcatcatcaccggcctgaagccagccaccaagtatgtgttccacatccgggtgaggacagccaccggctacagcggctacagccagaagtttgaatttgaaacaggagatgagaccagtgacatggctgctgagcagggccagatcctggtgattgccacagctgctgtgggcggcttcaccctgctggtgatcctgaccctcttcttcctgatcaccggccgctgccagtggtacatcaaggccaagatgaagtctgaggagaagagaagaaaccacctgcagaatggccacctgcgcttccctggcatcaagacctacattgatcctgacacctatgaggaccccagcctggccgtgcatgaatttgccaaggagattgaccccagccgcatcagaattgagcgggtgattggagctggggagtttggagaggtgtgcagcggccgcctgaagaccccaggcaagcgggagatccctgtggccatcaagaccctgaagggcggccacatggaccggcagaggcgggacttcctgcgggaggccagcatcatgggccagtttgaccaccccaacatcatccggctggagggcgtggtgaccaagaggagcttccctgccatcggcgtggaggccttctgccccagcttcctgcgggccggcttcctgaacagcatccaggccccccaccctgtgcctgggggcggcagcctgcccccacgcatcccagctggccggcctgtgatgattgtggtggagtacatggagaatggcagcctggacagcttcctgaggaagcatgatggccacttcaccgtcatccagctggtgggcatgctgcggggcatcgccagcggcatgaagtacctgagtgacatgggctacgtgcaccgggacctggccgccaggaacatcctggtgaacagcaacctggtgtgcaaggtgtctgactttggcctgagccgggtgctggaggatgatcctgaggccgcctacaccaccaccggcggcaagatccccatccgctggacagcccctgaggccatcgcctacaggaagttcagcagcgccagtgatgcctggagctatggcatcgtgatgtgggaggtgatgtcctatggagagcggccctactgggagatgagcaaccaggacgtcatcctgagcattgaggagggctaccgcctgcctgcccccatgggctgcccagccagcctgcaccagctgatgctgcactgctggcagaaggagaggaaccaccggcccaagttcacagacatcgtgtccttcctggacaagctgatccggaaccccagcgccctgcacaccctggtggaggacatcctggtgatgcctgagagccctggagaggtgcctgagtaccccctgtttgtgacagtgggggactggctggacagcatcaagatgggccagtacaagaacaactttgtggccgccggcttcaccacctttgacctgatcagcaggatgagcattgatgacatccgccgcatcggggtcatcctgattggccaccagaggagaattgtgagcagcatccagaccctgcggctgcacatgatgcacatccaggagaagggcttccacgtgtag

SEQ ID NO: 36518 - DNA, 3393 bp, Artificial Sequence
  derived and/or modified sequence
atgcagttccccagcccccccgccgcccggagcagccccgccccccaggcggctagcagttcagaggcagccgctcctgcgacaggacagccagggccaagttgcccagtgcctggaacctcccgaaggggccggcccggaaccccaccggcaggcagggtggaagaagaggaagaggaggaagaagaagatgttgataaggaccctcatcctacacaaaacacctgtctcagatgtcgacacttttccctaagggaacgcaagagagaaccgcgacggacaatgggcggctgcgaggttagagaatttcttttgcagtttgggttttttttacccctactgactgcatggccgggggattgtagccacgtctctaataaccaagtggttttgctggacaccacaacagtcctcggcgaactcggttggaagacatatccacttaatggttgggacgcaattaccgagatggacgagcataatagacccatccacacttatcaggtctgtaacgtaatggagcccaatcagaacaattggctccggacgaactggatttctagagacgcggcccaaaaaatctacgtggagatgaagttcactctcagagactgtaattccatcccttgggttttggggacttgcaaggaaacattcaatctcttctatatggagtcggatgagagccatggtattaaattcaagcccaaccagtacaccaagattgacaccatcgccgctgacgagtctttcacccaaatggatctcggtgaccggatactcaaactgaacaccgaaatccgggaggtgggtccaatagagaggaaaggcttctatctcgcttttcaagacatcggcgcctgtattgcgcttgtgagcgtgagggtcttttacaaaaagtgcccattcacagtcagaaatctcgccatgtttcctgatactatcccacgagtcgatagctccagcctcgtggaagtgcgcggatcttgcgtaaagtcagccgaagaaagagatacccctaaactctactgtggagcagacggcgactggctggtcccactagggcggtgcatttgttctaccggttacgaggaaatcgaggggagttgtcatgcctgccgtccagggttttacaaagcctttgccgggaataccaagtgctctaagtgccctcctcactcgcttacctatatggaggctaccagtgtgtgccagtgcgagaagggatattttcgggcagagaaggatccaccaagtatggcctgcacaagacctccgtcagctcctcggaacgttgtctttaacataaatgaaaccgccctgatactggagtggtccccaccctccgacacaggagggcgcaaggacctcacttattctgtcatctgcaaaaaatgtggactggacacgagtcagtgcgaggattgcgggggtggactgaggtttatcccacggcacactggactcatcaacaatagtgtcatcgtgctggacttcgtgtcccacgtgaactacacatttgagatagaggccatgaatggcgtgtccgaactaagtttctctccaaaaccattcactgctatcactgtcacaaccgatcaagacgcaccatctctaattggagttgtgcgcaaggattgggccagtcagaattccatagccctgtcctggcaagcaccagccttttccaatggagctatcctggactatgagatcaagtattacgagaaagaacatgaacagcttacctacagcagtacacgatctaaagcccccagcgtcatcatcacaggcttgaagcccgctacgaagtacgtgtttcatatccgagttaggacagctaccggctactccgggtacagccaaaaatttgagttcgaaaccggcgacgaaacgagcgatatggccgctgaacagggccagatactggtcattgcaactgctgcggtgggtgggtttacactcctggtcatcttaaccctcttctttctgataaccggacgctgccagtggtatatcaaagctaaaatgaaatcagaagagaaaaggagaaaccatctccagaatggtcatctgcgctttcccggcataaagacatacattgaccccgatacgtacgaagatccttccctggccgttcacgaattcgcgaaggagattgatcctagtcgaataaggattgaaagagtgatcggggccggggagttcggtgaggtctgcagtggacggctcaaaacaccagggaagcgcgagatccccgtggctatcaagacgctgaaaggagggcatatggaccgacagcggcgagattttctacgggaggcctctatcatgggacagtttgatcatccaaacataatccgactggaaggagtggtgaccaaacgatcattccctgctattggcgtcgaggccttttgtccctcttttctaagggccgggttcctaaattccatacaggcccctcatcctgtaccgggcggaggcagcctgccacctagaatcccggcaggcaggcccgtgatgattgtggttgagtacatggaaaatgggagcctcgatagtttcttaagaaaacacgatggtcactttacagtcattcagctggtggggatgctaagagggattgcctccgggatgaaatatctgtcagacatgggttacgtgcaccgagatctcgccgcccggaatatcctggtgaatagcaacctggtgtgcaaagtcagcgacttcgggctgtctcgcgtcctcgaggacgaccccgaggctgcatacactacgaccgggggtaaaatacccattcgttggacagcgccagaggcgattgcttatcgtaagttttcttccgcctctgatgcatggtcctatggtattgtgatgtgggaggtgatgtcatacggggaacgcccatactgggagatgagtaatcaggatgtcatcctgagtatcgaagaaggttacaggctgcctgcccctatgggttgcccggccagcctccaccagctaatgctccattgttggcaaaaagaaagaaaccatcggcccaagtttacggatatcgtgtctttcctggacaaactcattaggaacccttctgccttgcacacgctggttgaagacattttggttatgcccgaaagccctggagaagtccccgaatatccgttgttcgtaactgtgggtgactggctagacagcatcaagatggggcagtataagaataacttcgtcgccgcagggtttacaacattcgatctcatcagtcggatgtcaatcgacgatattcggaggataggcgttattttgatcggacatcagagaagaattgtgtcaagtatacaaacactccgcctgcatatgatgcacattcaggagaaagggttccacgtttag

SEQ ID NO: 36519 - DNA, 3393 bp, Artificial Sequence
  derived and/or modified sequence
atgcagtttcctagtccccctgcagccagatctagccccgcacctcaggccgcttcttctagtgaagccgctgctccagccactgggcagcctggtccctcctgccccgtcccgggaacgtcaaggaggggacgtcctgggacgcctcctgccggaagggtggaggaggaggaggaagaggaggaggaggacgttgacaaagatccacaccctacacagaacacttgcttacggtgcaggcacttctctcttcgagaaagaaagcgcgagcctcgcagaacaatgggcggttgcgaagtgagggagtttttgttgcagtttggattcttcctgccccttttgacggcctggcccggagactgtagtcatgtgtccaataatcaggttgtgttacttgatacaacaaccgtgctgggagagctggggtggaagacatatccgctcaacgggtgggatgcaattacagagatggatgagcacaacaggcccatccatacataccaagtctgtaacgttatggagcccaaccagaacaattggctgagaaccaactggatttccagagatgctgcccagaagatttatgtggagatgaagttcacactacgggattgcaacagtatcccttgggtactgggaacttgtaaggaaactttcaacttgttttacatggaaagtgatgagagtcatggcataaaattcaaacctaaccagtacacgaagattgacaccatcgctgcggacgaatcattcacgcagatggaccttggagaccgcatcctcaaactgaataccgaaatacgggaggtgggtccaatagagcgaaaggggttctaccttgcattccaggacattggcgcttgtatcgctctcgtgtcagtacgtgttttctacaagaagtgcccttttactgtacgtaacctagccatgtttcctgatactatccctcgggtggactcctccagcctcgtggaggtgcggggaagttgtgtaaagagcgctgaagagcgcgatacaccaaagttatactgtggcgcagatggcgactggttagtcccgctggggagatgcatctgcagcactggctacgaggaaattgaggggtcatgccacgcctgccggcctggtttttataaggccttcgctggtaacaccaagtgctccaagtgtccccctcattctctgacgtatatggaagcgacatctgtctgtcaatgtgaaaaaggctacttcagggcggaaaaggaccccccatcaatggcctgcacaaggcccccaagtgcaccgaggaacgtggtgtttaacatcaacgagactgcactgatcctggaatggtcccccccttccgacaccggaggccgaaaagatctgacctacagcgtaatatgcaaaaaatgcggactagatacatcacaatgtgaggactgtggaggtggcctgcggttcattccacgccatacagggctcattaataactccgtgatagtcttagatttcgtctcacacgtcaactacacgtttgaaatagaagctatgaacggggtgtcggaattgtcattcagccccaaaccattcactgccatcacggtaaccacagaccaggatgccccatcactcattggggttgttagaaaagactgggcaagccaaaacagtatcgctctgagttggcaagcccctgcatttagtaatggtgctattcttgactatgagattaaatactatgaaaaagaacacgaacagctcacctactcttctacccggtcaaaagccccttcagtcattatcactgggttaaaacctgcaacgaaatatgtgttccatataagggttcggactgccactgggtactcgggatatagccagaaattcgagtttgagacaggggacgagacctctgacatggccgcagaacagggacagatcttggtgatagctaccgccgcagttgggggtttcacactactggtcattttgacactgttcttcctgatcacaggacggtgccagtggtatattaaagccaagatgaaaagtgaggagaagcggagaaaccatctgcagaacggtcatctgcgattcccagggattaagacttacatcgatccagacacctacgaggatcctagcctggccgtccacgagtttgccaaggagatcgacccatctcgcattcggattgagagggtcataggcgcaggggagttcggcgaggtatgctctggcaggttgaagactccaggaaagagggagatccctgtcgccattaaaactctcaagggcggtcacatggaccgccagaggcgcgactttttaagagaggccagtattatgggccagttcgatcaccctaatatcattagactcgaaggagtggttactaaacgtagtttccccgctattggcgttgaggcgttttgtccttccttcttgagagccggattcctgaacagtattcaagccccacaccctgtgccaggcggtgggagcctaccccctcgtatccctgccggaaggcctgtgatgattgtggtagagtatatggagaatggaagtcttgatagttttttgcggaagcacgatggacattttactgtcatccaactggtgggtatgctccgtggtatcgccagtggaatgaaatacctgagcgatatgggttatgtgcacagagacttggcagcccgtaacattcttgtcaatagcaacctggtgtgtaaggtttccgactttggcttgagtcgtgtgctggaggatgatccagaggctgcgtatacaaccactgggggtaaaattcctattcgctggaccgcaccagaggcaatcgcctacagaaagttctcctccgcctccgacgcgtggagctatggtatagtcatgtgggaggttatgtcatacggcgagaggccttactgggaaatgtccaaccaggacgtgatcctgtctatcgaggaaggatatagactccctgcaccaatgggctgcccggcttctctgcaccaactgatgctgcactgctggcagaaggagaggaatcataggcccaagttcaccgatattgtgagtttcttagataaattaatccgcaacccaagcgccttgcatacactcgttgaagacattctcgtaatgccggagtcgcccggagaagtacccgagtacccgctattcgtcacagtaggcgactggctcgatagtatcaagatgggacagtacaaaaacaacttcgtcgccgctggcttcacaacatttgacctaatcagtcgtatgtctattgacgatattcgcaggataggggtgatcctgatcggccaccagcggagaattgtgagctccatccagacactgcgcctccacatgatgcacattcaggagaaagggttccacgtgtag

SEQ ID NO: 36520 - protein, 822 aa, Artificial Sequence
  derived and/or modified sequence
MEQLNELELLMEKSFWEEAELPAELFQKKVVASFPRTVLSTGMDNRYLVLAVNTVQNKEGNCEKRLVITASQSLENKELCILRNDWCSVPVEPGDIIHLEGDCTSDTWIIDKDFGYLILYPDMLISGTSIASSIRCMRRAVLSETFRSSDPATRQMLIGTVLHEVFQKAINNSFAPEKLQELAFQTIQEIRHLKEMYRLNLSQDEIKQEVEDYLPSFCKWAGDFMHKNTSTDFPQMQLSLPSDNSKDNSTCNIEVVKPMDIEESIWSPRFGLKGKIDVTVGVKIHRGYKTKYKIMPLELKTGKESNSIEHRSQVVLYTLLSQERRADPEAGLLLYLKTGQMYPVPANHLDKRELLKLRNQMAFSLFHRISKSATRQKTQLASLPQIIEEEKTCKYCSQIGNCALYSRAVEQQMDCSSVPIVMLPKIEEETQHLKQTHLEYFSLWCLMLTLESQSKDNKKNHQNIWLMPASEMEKSGSCIGNLIRMEHVKIVCDGQYLHNFQCKHGAIPVTNLMAGDRVIVSGEERSLFALSRGYVKEINMTTVTCLLDRNLSVLPESTLFRLDQEEKNCDIDTPLGNLSKLMENTFVSKKLRDLIIDFREPQFISYLSSVLPHDAKDTVACILKGLNKPQRQAMKKVLLSKDYTLIVGMPGTGKTTTICTLVPAPEQVEKGGVSNVTEAKLIVFLTSIFVKAGCSPSDIGIIAPYRQQLKIINDLLARSIGMVEVNTVDKYQGRDKSIVLVSFVRSNKDGTVGELLKDWRRLNVAITRAKHKLILLGCVPSLNCYPPLEKLLNHLNSEKLIIDLPSREHESLCHILGDFQRE

SEQ ID NO: 36521 - DNA, 3183 bp, Artificial Sequence
  derived and/or modified sequence
atggaacagttgaacgagctcgagctgcttatggagaagtccttctgggaggaggctgaacttccagcagagctatttcaaaaaaaggtcgtggcctcttttccacgaactgtcctgtcaacaggtatggacaataggtatctcgtgttagcagtgaataccgtgcagaataaggagggaaattgtgaaaaaagactggtcattacagcttcccagagcctcgagaacaaggagctgtgcattcttaggaacgactggtgcagtgttccagtggaacctggcgacattatacatcttgagggtgattgcacatcagacacatggatcatcgataaggatttcgggtacctcattctctatccagacatgctaatatcaggcaccagtattgcctcgtcaatcaggtgcatgagacgagcagtcttaagcgagacattcaggtcgagcgaccctgcgacccggcaaatgctgatcggtaccgtcctccacgaagtctttcagaaagccataaataactccttcgcgccagagaaattgcaggagctggcatttcaaacaatacaagaaattaggcatctgaaggaaatgtatcgcctgaacctgagccaggacgagatcaaacaggaggtggaagactacctgccatctttctgtaagtgggcgggggactttatgcataagaatacttctaccgactttccacagatgcagctgagtctgccatccgacaactcaaaggacaattcgacatgtaacatcgaggtggttaaacctatggatattgaggaatctatttggtccccccgctttgggctgaaggggaagattgatgtcaccgtgggagtgaaaatccatcggggttacaagactaagtataagatcatgccccttgaattgaaaacagggaaggaaagcaacagtattgaacatcggtctcaggtggtgttgtacacactgttgtctcaagagaggagagccgatccggaggccggtcttcttctctacttgaagacaggacagatgtatcctgtgcccgccaatcacctagataaacgggaattgctaaaactaaggaatcagatggcgtttagcctttttcaccggatatctaagtccgccacacgccaaaagacccagctcgcctccttaccccagataatagaagaggagaagacctgtaaatattgttcacagatcggcaattgtgccctgtacagtagagccgtggagcaacagatggactgcagctcagtgccaattgttatgcttccgaaaatcgaggaggagactcagcatctcaaacagacccatctggagtatttctccctgtggtgcctcatgcttactctggaatcacagagcaaggataacaagaagaaccatcagaacatttggcttatgcccgcctctgagatggagaaaagtggatcctgtatcggcaatctgatcaggatggagcacgtaaagattgtttgtgatggacaatatcttcacaatttccagtgcaagcacggcgccattcccgttactaacctgatggctggcgatcgcgtcatcgtctccggcgaggaacgtagtctattcgccctctcacgcgggtacgttaaggagattaacatgacaaccgtaacttgtttgctggaccgcaacttatctgttcttcctgaatcaacccttttccgcctggaccaggaggagaaaaattgcgacattgacactccgctgggcaacctgagtaaactaatggagaacaccttcgtgagcaagaagctgagagacctcatcattgattttagagagccgcagtttatctcatacttatctagcgtactgccccatgacgcgaaagatacagtcgcttgcattctcaaagggctgaacaagccgcaaagacaggctatgaaaaaggtgctcctatctaaagattacactctaatcgtcggaatgcccggcacaggaaaaacgactactatctgcaccttggtccgcatcttgtacgcttgcggcttttcagtgctcctcactagttacacccactccgctgtggacaatatactcctcaaacttgcaaaatttaaaatcgggtttcttagattagggcagatccagaaggtccaccctgctatccagcaattcacagaacaggaaatttgtcgcagtaagtctatcaaatccttagcgctcttggaagagctgtataactcccaattaattgtggccaccacctgcatgggtatcaatcatcctatttttagtcgcaagatctttgatttctgcatcgtggatgaggcgtcccagatctcccagcctatttgcttgggaccactatttttcagtagacgctttgtgctcgtgggggatcaccagcagctgccacctttagtacttaatagggaagccagggccctcggaatgtccgaatccttattcaagaggctagagcaaaacaagtcagccgtagttcagttaacagtgcagtaccggatgaattcaaaaattatgtccttaagcaataaactcacttacgagggcaaactagagtgcggtagtgacaaggtggctaatgcagtcattaacctccgccatttcaaggacgtaaaacttgaactagaattttacgctgattacagtgacaacccttggctaatgggagtgttcgaacctaataatccagtgtgcttcctcaatacggacaaggtccctgcccctgagcaggtggagaaaggtggagtgagcaatgtgacagaggctaaactcattgtgtttctaacctccatcttcgtaaaagccgggtgctccccttcagatatcgggataattgcaccctaccggcagcaactcaaaattattaatgatctgctggccaggtccattggaatggtggaggtgaacactgtggataagtaccagggccgcgacaaatcaattgtgctggtgagctttgtgagaagtaacaaagatggtaccgtgggggagctgctgaaagattggagacgattaaacgtcgctatcactcgcgcaaaacacaaactgattctcctcggatgtgtcccatcgctcaactgctacccacccctcgagaagctgctgaaccacctgaattcagagaaactgatcatagacctcccatctcgggagcacgaatcactctgtcacatcctcggcgacttccagcgtgagtag

SEQ ID NO: 36522 - DNA, 2469 bp, Artificial Sequence
  derived and/or modified sequence
atggaacagctgaacgaactcgagctcctgatggagaagagtttctgggaggaagccgaactccccgcagagctattccagaaaaaggtggtggcctcattcccgcggaccgttctgagcactggtatggataacaggtacctcgttctggcagtcaacactgtgcagaacaaagaaggaaattgtgaaaagagactcgtcattaccgcatcacaaagtctcgagaacaaagagctttgcattctaaggaacgactggtgttcagtgccagtagagcctggagatataatccacctggaaggggattgcaccagcgatacctggatcattgataaggactttgggtacctaatcctgtaccccgacatgctcatttcggggacatcaatagccagtagcataaggtgcatgcgtcgtgctgttctgagcgagaccttccgatcatctgatccggccacaaggcagatgctgatcgggaccgtactgcacgaagtttttcagaaggcgatcaacaacagcttcgcccctgagaaactacaggagcttgcctttcagacaatccaagagattagacacctaaaggaaatgtatcgactgaacctgagtcaggacgaaattaaacaagaggtcgaggattatctccccagtttctgcaaatgggctggagattttatgcacaagaacacatctactgatttcccccagatgcagttgtctctcccttcggataattcgaaggataatagtacttgtaatatcgaagttgtcaaacccatggacattgaagagagcatttggtcgcctcgatttggccttaagggcaagatcgacgtcacagtgggagttaaaatccaccgcgggtataaaactaagtataaaattatgccactggaattaaaaaccggaaaagagtctaactcgatagagcatcgatcccaggtagtgctctacacgctgctgtcacaagagcgccgtgccgacccagaggcggggctgcttttgtacctaaagaccgggcaaatgtaccccgtccccgcaaaccatttagacaaacgggaactacttaaacttaggaaccaaatggcattcagcctgttccaccggatatctaagtcagctaccaggcaaaaaactcaactggcatccctccctcaaatcatcgaagaggaaaaaacatgtaagtattgcagtcagattggcaattgtgccctctattcacgtgcagtcgagcaacagatggactgtagctccgtcccaatagtgatgctgccaaagattgaggaggagacacagcacttaaagcagacgcacctcgagtatttcagcctgtggtgccttatgctcacactggagtctcagagcaaagacaacaaaaagaaccaccaaaacatctggttgatgccagcatccgagatggaaaagtcaggctcctgcattgggaatctgatccgtatggaacacgtgaaaatagtgtgtgatggccaatatttgcataactttcaatgcaagcacggagcgatccctgtcaccaacttgatggcaggcgatagagtgatcgtgagcggggaggagcgtagtttgttcgcactaagcaggggctacgttaaagaaattaacatgacgaccgtgacctgcctcctggaccggaatctgtccgtgcttccggagagcacactgtttagacttgaccaggaggagaagaactgcgatatcgatacacccctaggaaacctctcaaaacttatggaaaacactttcgtgtcaaaaaaacttagagacctgatcatcgatttccgcgaaccacagttcattagctacctcagctccgtgctaccccatgatgctaaagatactgtcgcctgtatcttgaaagggcttaataaaccccagcggcaggccatgaaaaaagttctgttaagtaaggactatacattaatcgttggcatgcccggaaccggaaagaccacgactatatgtacacttgtgcctgcccccgaacaggtggagaaaggaggagtaagtaatgtgactgaggccaaacttatcgttttccttacttctatcttcgtcaaggccgggtgctcgccctcagacatagggattattgcgccctacaggcagcagctaaaaatcatcaatgacttacttgcgcgcagcatcggtatggtggaggtgaacacagtcgacaaataccaggggagagataagagcatcgtgctcgtttccttcgtgcggtccaataaagacggcactgttggggagcttctaaaagactggcggagactcaatgtagctataacgagagctaagcacaaactgatccttctgggctgcgtcccatctctcaactgctatcctccattggagaaactgctgaaccatctcaactcagaaaagctgatcatcgatctgcccagtcgggaacacgagtctctctgccacatcttaggcgattttcagcgggagtag

SEQ ID NO: 36523 - DNA, 3183 bp, Artificial Sequence
  derived and/or modified sequence
atggagcagctgaatgagctggagctgctgatggagaagagcttctgggaggaggccgagctgcctgctgagctgttccagaagaaggtggtggccagcttccccaggacagtgctgagcacaggcatggacaaccgctacctggtgctggccgtgaacacagtgcagaacaaggagggcaactgtgagaagaggctggtgatcacagccagccagagcctggagaacaaggagctgtgcatcctgagaaatgactggtgcagcgtgcctgtggagcccggggacatcatccacctggagggggactgcaccagtgacacctggatcatcgacaaggactttggctacctgatcctgtacccagacatgctgatcagcggcaccagcatcgccagcagcatccgctgcatgagaagagctgtgctgtctgagaccttccgcagcagtgaccctgccacccggcagatgctgattggcaccgtgctgcacgaggtgttccagaaggccatcaacaacagctttgcccctgagaagctgcaggagctggccttccagaccatccaggagatccgccacctgaaggagatgtaccgcctgaacctgagccaggatgagatcaagcaggaggtggaggactacctgcccagcttctgcaagtgggccggggacttcatgcacaagaacaccagcacagacttcccccagatgcagctgagcctgcccagcgacaacagcaaggacaacagcacctgcaacatcgaggtggtgaagcccatggacatcgaggagagcatctggagcccccgcttcggcctgaagggcaagattgatgtgacagtgggcgtgaagatccaccggggctacaagaccaagtacaagatcatgcccctggagctgaagacaggcaaggagagcaacagcattgagcacaggagccaggtggtgctgtacaccctgctgagccaggagcggcgggctgaccctgaggccggcctgctgctgtacctgaagacaggccagatgtaccctgtgcctgccaaccacctggacaagcgggagctgctgaagctgaggaaccagatggccttcagcctcttccaccgcatcagcaagagcgccacccggcagaagacccagctggccagcctgccccagatcatcgaggaggagaagacctgcaagtactgcagccagatcggcaactgtgccctgtacagcagagctgtggagcagcagatggactgcagctctgtgcccatcgtgatgctgcccaagattgaggaggagacccagcacctgaagcagacccacctggagtacttcagcctgtggtgcctgatgctgaccctggagagccagagcaaggacaacaagaagaaccaccagaacatctggctgatgcctgccagcgagatggagaagagcggcagctgcatcggcaacctgatccgcatggagcacgtgaagatcgtgtgtgatggccagtacctgcacaacttccagtgcaagcacggggccatccctgtgaccaacctgatggccggggacagagtgattgtgtctggagaggagaggagcctgtttgccctgagccggggctacgtgaaggagatcaacatgaccaccgtgacctgcctgctggacaggaacctgtctgtgctgcctgagagcaccctcttccggctggaccaggaggagaagaactgtgacatcgacacccccctgggcaacctgagcaagctgatggagaacacctttgtgtccaagaagctgcgggacctgatcatcgacttccgggagccccagttcatctcctacctgagctctgtgctgccccatgatgccaaggacacagtggcctgcatcctgaagggcctgaacaagccccagaggcaggccatgaagaaggtgctgctgagcaaggactacaccctcatcgtgggcatgcctggcaccgggaagaccaccaccatctgcaccctggtgcgcatcctgtatgcctgtggcttctctgtgctgctgaccagctacacccacagcgctgtggacaacatcctgctgaagctggccaagttcaagattggcttcctgcggctgggccagatccagaaggtgcacccagccatccagcagttcacagagcaggagatctgccgcagcaagagcatcaagagcctggccctgctggaggagctgtacaacagccagctgattgtggccaccacctgcatgggcatcaaccaccccatcttcagcaggaagatctttgacttctgcatcgtggatgaggccagccagatcagccagcccatctgcctgggccccctcttcttcagccgccgctttgtgctggtgggggaccaccagcagctgccccccctggtgctgaaccgggaggcccgggccctgggcatgtctgagagcctcttcaagaggctggagcagaacaagtctgctgtggtgcagctgactgtgcagtacaggatgaacagcaagatcatgagcctgagcaacaagctgacctatgagggcaagctggagtgtggcagtgacaaggtggccaatgctgtgatcaacctgcggcacttcaaggatgtgaagctggagctggagttctacgccgactacagcgacaacccctggctgatgggcgtgtttgagcccaacaaccctgtgtgcttcctgaacacagacaaggtgcctgcccctgagcaggtggagaagggcggcgtgtccaatgtgacagaggccaagctgattgtgttcctgaccagcatctttgtgaaggccggctgcagccccagcgacatcggcatcatcgccccctaccggcagcagctgaagatcatcaatgacctgctggcccggagcatcggcatggtggaggtgaacacagtggacaagtaccagggccgggacaagagcatcgtgctggtgtcctttgtgcgcagcaacaaggatggcaccgtgggggagctgctgaaggactggaggcggctgaatgtggccatcacccgggccaagcacaagctgatcctgctgggctgtgtgcccagcctgaactgctacccacccctggagaagctgctgaaccacctgaacagcgagaagctgatcatcgacctgcccagccgggagcacgagagcctgtgccacatcctgggggacttccagcgggagtag

SEQ ID NO: 36524 - DNA, 2469 bp, Artificial Sequence
  derived and/or modified sequence
atggagcagctgaatgagctggagctgctgatggagaagagcttctgggaggaggccgagctgcctgctgagctgttccagaagaaggtggtggccagcttccccaggacagtgctgagcacaggcatggacaaccgctacctggtgctggccgtgaacacagtgcagaacaaggagggcaactgtgagaagaggctggtgatcacagccagccagagcctggagaacaaggagctgtgcatcctgagaaatgactggtgcagcgtgcctgtggagcccggggacatcatccacctggagggggactgcaccagtgacacctggatcatcgacaaggactttggctacctgatcctgtacccagacatgctgatcagcggcaccagcatcgccagcagcatccgctgcatgagaagagctgtgctgtctgagaccttccgcagcagtgaccctgccacccggcagatgctgattggcaccgtgctgcacgaggtgttccagaaggccatcaacaacagctttgcccctgagaagctgcaggagctggccttccagaccatccaggagatccgccacctgaaggagatgtaccgcctgaacctgagccaggatgagatcaagcaggaggtggaggactacctgcccagcttctgcaagtgggccggggacttcatgcacaagaacaccagcacagacttcccccagatgcagctgagcctgcccagcgacaacagcaaggacaacagcacctgcaacatcgaggtggtgaagcccatggacatcgaggagagcatctggagcccccgcttcggcctgaagggcaagattgatgtgacagtgggcgtgaagatccaccggggctacaagaccaagtacaagatcatgcccctggagctgaagacaggcaaggagagcaacagcattgagcacaggagccaggtggtgctgtacaccctgctgagccaggagcggcgggctgaccctgaggccggcctgctgctgtacctgaagacaggccagatgtaccctgtgcctgccaaccacctggacaagcgggagctgctgaagctgaggaaccagatggccttcagcctcttccaccgcatcagcaagagcgccacccggcagaagacccagctggccagcctgccccagatcatcgaggaggagaagacctgcaagtactgcagccagatcggcaactgtgccctgtacagcagagctgtggagcagcagatggactgcagctctgtgcccatcgtgatgctgcccaagattgaggaggagacccagcacctgaagcagacccacctggagtacttcagcctgtggtgcctgatgctgaccctggagagccagagcaaggacaacaagaagaaccaccagaacatctggctgatgcctgccagcgagatggagaagagcggcagctgcatcggcaacctgatccgcatggagcacgtgaagatcgtgtgtgatggccagtacctgcacaacttccagtgcaagcacggggccatccctgtgaccaacctgatggccggggacagagtgattgtgtctggagaggagaggagcctgtttgccctgagccggggctacgtgaaggagatcaacatgaccaccgtgacctgcctgctggacaggaacctgtctgtgctgcctgagagcaccctcttccggctggaccaggaggagaagaactgtgacatcgacacccccctgggcaacctgagcaagctgatggagaacacctttgtgtccaagaagctgcgggacctgatcatcgacttccgggagccccagttcatctcctacctgagctctgtgctgccccatgatgccaaggacacagtggcctgcatcctgaagggcctgaacaagccccagaggcaggccatgaagaaggtgctgctgagcaaggactacaccctcatcgtgggcatgcctggcaccgggaagaccaccaccatctgcaccctggtgcctgcccctgagcaggtggagaagggcggcgtgtccaatgtgacagaggccaagctgattgtgttcctgaccagcatctttgtgaaggccggctgcagccccagcgacatcggcatcatcgccccctaccggcagcagctgaagatcatcaatgacctgctggcccggagcatcggcatggtggaggtgaacacagtggacaagtaccagggccgggacaagagcatcgtgctggtgtcctttgtgcgcagcaacaaggatggcaccgtgggggagctgctgaaggactggaggcggctgaatgtggccatcacccgggccaagcacaagctgatcctgctgggctgtgtgcccagcctgaactgctacccacccctggagaagctgctgaaccacctgaacagcgagaagctgatcatcgacctgcccagccgggagcacgagagcctgtgccacatcctgggggacttccagcgggagtag

SEQ ID NO: 36525 - DNA, 3183 bp, Artificial Sequence
  derived and/or modified sequence
atggagcagctgaacgagctggagctgctgatggagaagagcttctgggaagaggccgagctgccggctgagctattccaaaaaaaggtggttgcttcattccctagaaccgtactttccaccggtatggacaaccgctatttggtgcttgcagtcaatacagtccagaataaagagggcaattgcgagaagaggctggtcatcaccgcgtcccagagcttggagaataaggaactgtgtattctgaggaatgattggtgcagcgtccctgtcgagcctggcgacatcatacatctggaaggggactgcaccagcgacacttggattatcgacaaagattttgggtatctgattctgtatccagacatgctgattagtggcacatcaatcgcctcaagtattcggtgcatgaggcgggcagtgctgagtgagacctttcgatcttctgatcctgctaccagacagatgttaattggtactgtccttcatgaagtttttcagaaagccatcaacaactcatttgcccccgagaaacttcaggagctcgcattccagacaatacaggaaattcgacacctgaaggagatgtaccggctgaacctgtcacaggatgagattaagcaggaggtggaagattacctgccatcattctgcaaatgggctggcgatttcatgcacaagaataccagcactgattttccgcaaatgcagttaagtctgcccagtgacaattcaaaggacaactctacctgtaacattgaggttgtcaaaccaatggatatcgaggagagcatctggagccctcggttcgggctcaaaggcaaaatcgatgtcactgtcggagtcaaaatccatagaggttacaaaaccaagtacaaaataatgccactggagttgaaaacgggcaaagagtcgaatagcatagagcatcgcagtcaggtggttttgtacactctgctcagccaggagcggagagccgatcctgaagcaggtctcctcctctatctgaaaaccgggcagatgtacccggtgccagctaaccatctggacaaaagggaactgctgaagctgcggaaccagatggcattttccctattccaccggatcagtaaaagcgccacacgccagaaaacacagctggcaagcctgccacaaataatcgaggaagaaaaaacctgcaagtactgctcccagattgggaattgcgctctctattcacgggccgtggagcagcagatggattgtagttccgttccaatcgtgatgttaccgaagatcgaggaggaaacgcagcacctcaaacaaacccatttggaatatttttctttgtggtgtctaatgctgacactggaaagtcagagcaaggacaacaagaagaatcaccagaatatctggctgatgccggcttctgaaatggaaaagagtggcagctgtatcgggaacctgattaggatggagcacgttaaaatcgtatgcgacggtcagtatctgcataattttcagtgcaagcacggtgcaatccccgtgaccaacctcatggcaggggatagggtgattgtgagtggagaagagaggtctctgttcgcactgtctagaggctacgtgaaagaaatcaacatgacaactgtgacctgccttctggataggaaccttagcgtcctaccagaatccactcttttccgactggatcaagaagaaaaaaactgcgacatcgacacccccttaggaaacttgagtaagctgatggaaaacactttcgtgagcaaaaagctgagagacctcatcattgatttccgggagcctcaatttatcagctacctgagttctgtcctccctcatgacgctaaggacaccgttgcctgtattctgaagggcttgaataaaccccagcgccaggctatgaagaaggtgctgctgagcaaggactataccctgattgtcggaatgccgggtaccgggaaaacgactaccatttgcacactggtcagaatcctctacgcctgcggcttttctgtgctgctcacgagttatacccattctgcagttgataacatccttctcaaactcgcgaagtttaagatagggttcctgcgactgggacagattcagaaagtgcatcctgccatccagcaatttacagaacaggagatctgtcgcagtaaatctatcaaatccctagcactgctggaggaattatacaacagtcagctcatcgtcgcaaccacttgtatggggataaaccatcccattttttctaggaaaatctttgacttttgcattgtagacgaagcgtcccagatctctcagccgatctgcctaggacccctctttttcagccgaaggttcgtgctggtgggggaccatcagcagttacctccgctggtgttaaacagagaagccagggcgttggggatgtcagaatccctatttaaaagactggagcagaataagtccgcagtggtacagctgaccgtgcaatacagaatgaactccaaaatcatgtccctcagcaacaaactgacttacgaaggcaaattagagtgtgggagtgacaaagttgcgaatgcagtaattaacctgcggcattttaaagatgttaaacttgagctggagttctatgcagactattccgataatccgtggctaatgggagtttttgaacctaataatcccgtctgcttcttgaatactgacaaggtcccagcacccgagcaagtggagaaggggggcgtgtcgaatgtgacggaggccaaacttattgtgtttctcacaagtatttttgtgaaagccggctgcagcccaagcgacattggcatcattgccccctaccggcagcaactcaagatcatcaacgacctcctcgctaggagcatcggcatggtggaggtgaacaccgtggacaagtatcaaggtcgggataagtccatagttctggtgtccttcgtccgctctaataaggatggcacggtaggggagttgctcaaagattggaggcgccttaatgtcgctatcaccagggctaagcataagctcattctgttgggatgtgtccctagtttaaattgctatcccccactggagaaattactcaaccatctgaacagcgagaaacttatcatagacctgcccagcagagaacacgaaagtctgtgccatatcctgggtgacttccagcgggagtag

SEQ ID NO: 36526 - DNA, 2469 bp, Artificial Sequence
  derived and/or modified sequence
atggagcagctgaacgagctggagctgctgatggagaagagcttctgggaggaagccgagctgcctgccgagctcttccagaaaaaggtcgtcgctagttttccacgcacagttttgagtacaggtatggataaccgctatttggtgctcgctgttaatacagtccagaacaaggaagggaattgtgagaaacggttggtcatcaccgcgtcccaaagtttggagaacaaagaactgtgcatccttaggaacgactggtgctccgttcccgttgaaccgggagacattattcacctggaaggcgactgtacgtccgacacttggataatagacaaggattttggctatctgatcctctacccagacatgttgatttctggaacctctatcgccagctctatccgttgcatgcggcgcgctgtcctgtcagagacatttagaagtagtgatccggctaccagacagatgctgattggtaccgttctgcacgaggtgtttcagaaagccatcaacaactcctttgccccagagaagctgcaggaactcgcatttcaaacaatccaggagatcagacacctcaaagagatgtatcggctcaatctcagccaggacgagatcaaacaggaagtggaggattatctaccttctttctgtaagtgggccggggacttcatgcataagaacacctcaaccgacttcccccagatgcagctttcactcccctcagacaatagtaaagacaactcgacctgtaacatagaagtggtgaagccgatggatatagaggagagtatctggtcgcccagatttgggctgaagggaaagatagacgtgactgttggcgtgaagattcatcgcgggtataaaacgaaatacaaaataatgcccctggaactcaagaccgggaaagagtctaacagcattgaacatcgctcgcaagtggtcctgtacaccctgctttcgcaggaaagaagggccgacccagaagcagggctgctgctgtatctcaagaccggccagatgtaccctgtacccgccaatcacttagacaagcgcgaattgcttaaacttcggaaccagatggcgttctcactgtttcatcggataagtaagagtgccacaaggcagaagacccaactcgcgtccttgccacaaatcattgaagaggagaagacttgcaaatactgttctcagatcggtaactgcgctctctatagccgagccgtggaacagcagatggactgcagttccgtgcctattgtaatgctgcctaagattgaagaggagacacagcatctgaagcagacccatctcgagtactttagcctgtggtgtctaatgttaacacttgaatcccagtctaaggacaacaagaagaatcaccagaacatctggctgatgccagctagcgaaatggaaaaaagtggcagctgcatcggaaacctcattagaatggagcatgtgaaaatcgtgtgcgacggccaatatttacataatttccagtgcaagcacggcgcgattcccgttactaatctgatggcaggggatagggtcattgtctcaggtgaggaaagatcattatttgccctctcacgcggctacgtgaaagaaataaacatgaccaccgtcacttgtcttctagaccgtaatctaagcgtgctgcccgaatctacactttttcggctagaccaggaggagaaaaattgcgacatcgacacgccattgggcaacctctctaagctgatggaaaacacttttgtttcaaagaagttacgggacttaataattgactttagggagccacagtttatctcatatctcagttcagttttaccccacgatgcgaaggacactgttgcatgtatcctgaagggtctgaataagcctcagcgacaggcaatgaagaaagtgctcctgagtaaagattatacgttgatagtggggatgccaggcacaggcaagactacaaccatttgtacactcgtgccagcacctgagcaggtagagaagggaggggtctccaacgtgacggaagctaagctcattgtgttcctgacgagcatcttcgttaaggccgggtgttctccaagtgatattggaatcatcgctccatacaggcaacaattaaagatcataaacgatcttctggctagaagtattggtatggttgaggtaaacacagtcgacaaataccaggggcgtgacaagtctattgttctggtgtctttcgtgcggtctaacaaagacggcaccgtgggcgagcttctgaaagactggagacggcttaatgtggccatcacacgagccaaacataagctgattctcctcggctgtgtgccttctttgaattgctacccacctttagaaaaactcctgaaccacctcaatagcgaaaagcttattatcgatctgccaagcagggagcatgaatctctgtgccacatcctcggcgactttcagcgagaatag

SEQ ID NO: 36527 - DNA, 3183 bp, Artificial Sequence
  derived and/or modified sequence
atggagcagctgaacgaactcgagctgttaatggagaagtctttctgggaggaggccgagctcccagcagaactgttccaaaaaaaggtagtggcatcctttccccgtactgtgttgagtacgggaatggataaccgctacttggtcttggctgttaatacggttcagaataaagaagggaactgcgagaaacgcctagtgattacagctagccagagtctagaaaataaagaactgtgtatcctgcgtaacgattggtgtagcgtgcccgttgaaccgggtgacattatccacctggagggtgattgcacatccgatacctggataatcgacaaagattttggctacctcatactgtacccagatatgctgatcagtgggacgtccatcgccagctctatccgatgtatgaggagagcggtactgagcgagaccttcagaagtagtgatcctgctacccgccagatgttaattgggactgtcttgcacgaagttttccagaaagcaatcaacaactcctttgccccagaaaagctccaagagctggcttttcagactatacaggagatccgtcacctcaaagagatgtacaggttgaacctgtcccaggacgagataaaacaggaagtggaggattacctgccaagcttttgtaagtgggctggcgattttatgcacaagaacacaagcaccgacttccctcaaatgcagctgtcacttcccagcgacaattccaaggataatagcacttgtaatatcgaggtcgtgaagccaatggacatcgaggaaagtatctggtcccccaggtttgggctgaaggggaaaatcgacgtaactgtcggggtcaagattcacagggggtacaagactaagtacaagatcatgccattggaactcaaaacaggtaaagagagcaacagtatcgaacatcgatcacaggttgtactatacaccctcctctcgcaagagcggagagcagatccagaggccggattgttactgtatctcaaaacaggacaaatgtatcctgttccggcaaatcacttagataagcgcgaactcctgaagctgcgcaaccagatggcctttagcctgttccatcgtatttcaaaatccgctacaaggcagaagactcagctggcttccctgcctcagatcattgaggaagaaaaaacttgcaaatactgctctcagattgggaactgcgccctgtactcccgtgcagtagagcagcaaatggattgctccagcgtgccgatcgtaatgctaccgaaaatagaagaggaaactcaacacctgaaacaaacccacctcgagtatttcagcctctggtgcctaatgttaacgctggaaagccaatccaaagataataagaaaaaccatcagaatatatggctgatgccggcatctgaaatggaaaagagcggcagttgtataggcaacttgatccggatggagcatgtgaagattgtatgtgacggccaatacctgcacaatttccaatgtaaacacggcgctatcccagtaacaaacctcatggccggagaccgggtaattgtgagcggagaagagcggtctctgtttgcactctcacgcggttacgttaaagagatcaatatgactacagtaacatgcctgttggatcgcaacctgagcgtgctgccagaatcaacactctttagacttgaccaggaagaaaaaaattgcgacattgacacacctttgggcaatttgagtaagctgatggagaatacattcgtgtctaaaaagctccgggaccttatcatcgattttcgggaacctcagtttatctcctatctgtcctctgttcttccgcatgacgctaaggacaccgtggcatgcatattgaaaggcctgaataagcctcaaaggcaggctatgaaaaaggtactcctgagcaaggattacacactcattgttggcatgccgggaactggtaaaacaactaccatctgtaccctggtgcgcattctctatgcctgtggcttctccgtgctgttaaccagctacacccatagcgcagtagataatatactccttaagctagctaaattcaagataggcttcctccgtctggggcagatccaaaaggtgcacccagctattcaacagttcacagagcaagaaatctgtagatctaaatctattaagtccttggctcttttggaggaactgtacaacagccagttgatcgttgcaactacgtgtatggggattaatcaccctatctttagtcgaaagatcttcgacttctgtattgtggacgaggctagccaaatctctcagccaatctgcttgggacccctgttcttcagccggcgattcgttctggtgggagaccatcagcagttaccgccactggtactcaacagggaggctcgggctctgggtatgtcagagagcctctttaaacggcttgaacagaacaagtctgccgtggtacaacttacagtccagtacagaatgaacagcaaaatcatgagcctgtccaacaagctcacttatgagggcaagttagagtgcgggtctgacaaggtggctaatgcggtgatcaaccttcgccacttcaaagacgtgaagttggagctggagttctacgccgactatagcgacaatccttggctcatgggagtgttcgaacctaataaccccgtttgtttccttaacaccgataaggtgcctgcccctgagcaggtggaaaaaggcggtgtgtctaatgtcaccgaggccaaactgatcgtctttctgacatccatctttgtcaaagccggatgtagcccgtccgatattggaatcatagcaccgtacagacagcagctcaagataataaacgacctgctggcccgaagtattgggatggtagaagtcaatacagtcgataagtatcagggcagagacaagagtattgtccttgtgtctttcgtccgctctaataaggacggcactgttggagaacttctgaaggattggagaagattaaacgtggccataacacgagctaagcacaagttaattctgttaggatgtgtaccttctctcaactgctaccctccgctagagaagttgctgaatcatttgaacagtgaaaaactgattattgacctcccttcaagagagcacgaatcactgtgtcacatcctgggagattttcagagggagtag

SEQ ID NO: 36528 - DNA, 2469 bp, Artificial Sequence
  derived and/or modified sequence
atggaacagttgaacgagctggagttgctgatggagaagtcattctgggaggaagctgagctccccgcagagttgttccagaaaaaagtcgtcgctagctttcccaggactgtcctgagtacagggatggacaatcgctatctggtcttagcagtaaatacagtccagaacaaagaaggcaactgcgaaaaaagattggtgattaccgcttctcagagcctggagaacaaggaactgtgtatcctacggaacgactggtgttccgtgccggtggagcccggagacatcattcaccttgagggagattgtacctctgatacctggataattgataaggattttggctatttgatcctgtatcccgatatgctgattagcggcacttcaatcgccagctccatccgctgtatgagacgggcagtccttagtgagactttcaggtcctcggaccccgctacacgtcaaatgcttattggcaccgttttgcatgaagtctttcagaaagccataaataacagctttgcccctgagaagctgcaggaattagcatttcagacaattcaagaaattcgccatctgaaggaaatgtatcgcctaaatttatcccaggacgaaattaaacaggaggtcgaggactacctgccttctttctgcaaatgggcgggagactttatgcataaaaacacaagtacagattttccacaaatgcagctctccctgccttctgacaacagtaaagataattccacctgtaacatcgaggtggtgaagcctatggacatagaagagtccatatggtccccacgctttgggctgaagggaaagattgacgttacagtgggggtgaaaatccacaggggttacaagactaagtacaagattatgccactggaactcaagactggaaaagaatcgaacagcattgagcataggagccaggttgtcctgtacacactcctttcccaagaacgcagggccgatcctgaagctgggttactgctgtacctgaagacaggtcagatgtatccagtaccagcgaatcacctggacaaacgggagcttctaaaactacggaaccagatggcgttctcactttttcatcggatctctaagtctgccacacggcagaaaacacagcttgcatctctgccgcaaattattgaagaggaaaagacctgcaaatattgctctcagattggaaattgcgctctgtactctcgcgcagtggagcagcagatggattgcagctctgtgcccattgttatgctacccaagatcgaggaggaaactcagcacttgaaacagacccatctggagtacttctccttgtggtgtctaatgctgaccttagagtcgcagagtaaggataataagaaaaaccaccagaatatctggctgatgcccgcttctgagatggagaagagcggtagttgcattgggaatctgatccgaatggaacacgtaaaaatcgtctgtgacggccagtacctgcacaattttcaatgtaagcatggtgccatcccggtaacgaacctgatggctggtgatcgagtgatcgtgtctggcgaagaaagatctctgtttgctttatctagaggctacgtaaaagagattaacatgacaactgtgacctgtctgctagatcggaatctctccgtgctgcctgaatctactttgtttaggctcgaccaggaagaaaagaactgcgacatagatacacctctggggaatctttccaaattgatggaaaatacgttcgtgagcaagaagctccgcgatctgatcatcgacttccgggaaccacagttcatcagctacttgtccagcgtcctcccacatgacgctaaggatacagttgcctgtatcctcaagggactcaataagccccaacgacaagctatgaaaaaagtccttctgagcaaggactatacccttatcgtggggatgccaggcacgggcaagaccacaacgatctgtactttggtgcccgctcccgaacaagtggagaaaggaggagtgagtaacgtcaccgaggctaagctgatcgtctttttgaccagcatcttcgtgaaggctggctgctctccgtctgatatagggatcattgcaccttacagacagcagctgaaaattataaacgatttactcgcccgttccatcggcatggtagaagtgaatacggttgataagtatcaaggacgggacaagtctatcgtactggtgtcatttgtgagatccaataaagatggaacagtaggagaactcctgaaggattggaggaggctgaatgtggcgatcactcgggctaagcacaaattgattttgttaggctgtgtgccttcactcaactgttatcccccactcgagaaactcctgaaccacttaaactccgagaagttaattattgacctcccaagtagagagcacgaatccctttgtcacatcttgggtgatttccagagagaatag

SEQ ID NO: 36529 - DNA, 3183 bp, Artificial Sequence
  derived and/or modified sequence
atggagcagctgaacgagctggagctgctgatggagaagagcttctgggaggaggccgagctgcccgccgagctgttccagaagaaggtggtggccagcttccccagaaccgtgctgagcaccggcatggacaacagatacctggtgctggccgtgaacaccgtgcagaacaaggagggcaactgcgagaagagactggtgatcaccgccagccagagcctggagaacaaggagctgtgcatcctgagaaacgactggtgcagcgtgcccgtggagcccggcgacatcatccacctggagggcgactgcaccagcgacacctggatcatcgacaaggacttcggctacctgatcctgtaccccgacatgctgatcagcggcaccagcatcgccagcagcatcagatgcatgagaagagccgtgctgagcgagaccttcagaagcagcgaccccgccaccagacagatgctgatcggcaccgtgctgcacgaggtgttccagaaggccatcaacaacagcttcgcccccgagaagctgcaggagctggccttccagaccatccaggagatcagacacctgaaggagatgtacagactgaacctgagccaggacgagatcaagcaggaggtggaggactacctgcccagcttctgcaagtgggccggcgacttcatgcacaagaacaccagcaccgacttcccccagatgcagctgagcctgcccagcgacaacagcaaggacaacagcacctgcaacatcgaggtggtgaagcccatggacatcgaggagagcatctggagccccagattcggcctgaagggcaagatcgacgtgaccgtgggcgtgaagatccacagaggctacaagaccaagtacaagatcatgcccctggagctgaagaccggcaaggagagcaacagcatcgagcacagaagccaggtggtgctgtacaccctgctgagccaggagagaagagccgaccccgaggccggcctgctgctgtacctgaagaccggccagatgtaccccgtgcccgccaaccacctggacaagagagagctgctgaagctgagaaaccagatggccttcagcctgttccacagaatcagcaagagcgccaccagacagaagacccagctggccagcctgccccagatcatcgaggaggagaagacctgcaagtactgcagccagatcggcaactgcgccctgtacagcagagccgtggagcagcagatggactgcagcagcgtgcccatcgtgatgctgcccaagatcgaggaggagacccagcacctgaagcagacccacctggagtacttcagcctgtggtgcctgatgctgaccctggagagccagagcaaggacaacaagaagaaccaccagaacatctggctgatgcccgccagcgagatggagaagagcggcagctgcatcggcaacctgatcagaatggagcacgtgaagatcgtgtgcgacggccagtacctgcacaacttccagtgcaagcacggcgccatccccgtgaccaacctgatggccggcgacagagtgatcgtgagcggcgaggagagaagcctgttcgccctgagcagaggctacgtgaaggagatcaacatgaccaccgtgacctgcctgctggacagaaacctgagcgtgctgcccgagagcaccctgttcagactggaccaggaggagaagaactgcgacatcgacacccccctgggcaacctgagcaagctgatggagaacaccttcgtgagcaagaagctgagagacctgatcatcgacttcagagagccccagttcatcagctacctgagcagcgtgctgccccacgacgccaaggacaccgtggcctgcatcctgaagggcctgaacaagccccagagacaggccatgaagaaggtgctgctgagcaaggactacaccctgatcgtgggcatgcccggcaccggcaagaccaccaccatctgcaccctggtgagaatcctgtacgcctgcggcttcagcgtgctgctgaccagctacacccacagcgccgtggacaacatcctgctgaagctggccaagttcaagatcggcttcctgagactgggccagatccagaaggtgcaccccgccatccagcagttcaccgagcaggagatctgcagaagcaagagcatcaagagcctggccctgctggaggagctgtacaacagccagctgatcgtggccaccacctgcatgggcatcaaccaccccatcttcagcagaaagatcttcgacttctgcatcgtggacgaggccagccagatcagccagcccatctgcctgggccccctgttcttcagcagaagattcgtgctggtgggcgaccaccagcagctgccccccctggtgctgaacagagaggccagagccctgggcatgagcgagagcctgttcaagagactggagcagaacaagagcgccgtggtgcagctgaccgtgcagtacagaatgaacagcaagatcatgagcctgagcaacaagctgacctacgagggcaagctggagtgcggcagcgacaaggtggccaacgccgtgatcaacctgagacacttcaaggacgtgaagctggagctggagttctacgccgactacagcgacaacccctggctgatgggcgtgttcgagcccaacaaccccgtgtgcttcctgaacaccgacaaggtgcccgcccccgagcaggtggagaagggcggcgtgagcaacgtgaccgaggccaagctgatcgtgttcctgaccagcatcttcgtgaaggccggctgcagccccagcgacatcggcatcatcgccccctacagacagcagctgaagatcatcaacgacctgctggccagaagcatcggcatggtggaggtgaacaccgtggacaagtaccagggcagagacaagagcatcgtgctggtgagcttcgtgagaagcaacaaggacggcaccgtgggcgagctgctgaaggactggagaagactgaacgtggccatcaccagagccaagcacaagctgatcctgctgggctgcgtgcccagcctgaactgctacccccccctggagaagctgctgaaccacctgaacagcgagaagctgatcatcgacctgcccagcagagagcacgagagcctgtgccacatcctgggcgacttccagagagagtag

SEQ ID NO: 36530 - DNA, 2469 bp, Artificial Sequence
  derived and/or modified sequence
atggagcagctgaacgagctggagctgctgatggagaagagcttctgggaggaggccgagctgcccgccgagctgttccagaagaaggtggtggccagcttccccagaaccgtgctgagcaccggcatggacaacagatacctggtgctggccgtgaacaccgtgcagaacaaggagggcaactgcgagaagagactggtgatcaccgccagccagagcctggagaacaaggagctgtgcatcctgagaaacgactggtgcagcgtgcccgtggagcccggcgacatcatccacctggagggcgactgcaccagcgacacctggatcatcgacaaggacttcggctacctgatcctgtaccccgacatgctgatcagcggcaccagcatcgccagcagcatcagatgcatgagaagagccgtgctgagcgagaccttcagaagcagcgaccccgccaccagacagatgctgatcggcaccgtgctgcacgaggtgttccagaaggccatcaacaacagcttcgcccccgagaagctgcaggagctggccttccagaccatccaggagatcagacacctgaaggagatgtacagactgaacctgagccaggacgagatcaagcaggaggtggaggactacctgcccagcttctgcaagtgggccggcgacttcatgcacaagaacaccagcaccgacttcccccagatgcagctgagcctgcccagcgacaacagcaaggacaacagcacctgcaacatcgaggtggtgaagcccatggacatcgaggagagcatctggagccccagattcggcctgaagggcaagatcgacgtgaccgtgggcgtgaagatccacagaggctacaagaccaagtacaagatcatgcccctggagctgaagaccggcaaggagagcaacagcatcgagcacagaagccaggtggtgctgtacaccctgctgagccaggagagaagagccgaccccgaggccggcctgctgctgtacctgaagaccggccagatgtaccccgtgcccgccaaccacctggacaagagagagctgctgaagctgagaaaccagatggccttcagcctgttccacagaatcagcaagagcgccaccagacagaagacccagctggccagcctgccccagatcatcgaggaggagaagacctgcaagtactgcagccagatcggcaactgcgccctgtacagcagagccgtggagcagcagatggactgcagcagcgtgcccatcgtgatgctgcccaagatcgaggaggagacccagcacctgaagcagacccacctggagtacttcagcctgtggtgcctgatgctgaccctggagagccagagcaaggacaacaagaagaaccaccagaacatctggctgatgcccgccagcgagatggagaagagcggcagctgcatcggcaacctgatcagaatggagcacgtgaagatcgtgtgcgacggccagtacctgcacaacttccagtgcaagcacggcgccatccccgtgaccaacctgatggccggcgacagagtgatcgtgagcggcgaggagagaagcctgttcgccctgagcagaggctacgtgaaggagatcaacatgaccaccgtgacctgcctgctggacagaaacctgagcgtgctgcccgagagcaccctgttcagactggaccaggaggagaagaactgcgacatcgacacccccctgggcaacctgagcaagctgatggagaacaccttcgtgagcaagaagctgagagacctgatcatcgacttcagagagccccagttcatcagctacctgagcagcgtgctgccccacgacgccaaggacaccgtggcctgcatcctgaagggcctgaacaagccccagagacaggccatgaagaaggtgctgctgagcaaggactacaccctgatcgtgggcatgcccggcaccggcaagaccaccaccatctgcaccctggtgcccgcccccgagcaggtggagaagggcggcgtgagcaacgtgaccgaggccaagctgatcgtgttcctgaccagcatcttcgtgaaggccggctgcagccccagcgacatcggcatcatcgccccctacagacagcagctgaagatcatcaacgacctgctggccagaagcatcggcatggtggaggtgaacaccgtggacaagtaccagggcagagacaagagcatcgtgctggtgagcttcgtgagaagcaacaaggacggcaccgtgggcgagctgctgaaggactggagaagactgaacgtggccatcaccagagccaagcacaagctgatcctgctgggctgcgtgcccagcctgaactgctacccccccctggagaagctgctgaaccacctgaacagcgagaagctgatcatcgacctgcccagcagagagcacgagagcctgtgccacatcctgggcgacttccagagagagtag

SEQ ID NO: 36531 - protein, 828 aa, Artificial Sequence
  derived and/or modified sequence
MNSTEFTEDVEEVLKSITVKVETEAEDAALDCSVNSRTSEKHSVDSVLTALQDSSKRKQLVSDGLLDSVPGVKRRRLIPEALLAGMRNRENSSPCQGNGEQAGRGRSLGNVWPGEEEPCNDATTPSYKKPLYGISHKIMEKKNPPSGDLLNVYELFEKANASNSPSSLRLLNEPQKRDCGSTGAGTDNDPNIYFLIQKMFYMLNTLTSNMSQLHSKVDLLSLEVSRIKKQVSPTEMVAKFQPPPEYQLTAAELKQIVDQSLSGGDLACRLLVQLFPELFSDVDFSRGCSACGFAAKRKLESLHLQLIRNYVEVYYPSVKDTAVWQAECLPQLNDFFSRFWAQREMEDSQPSGQVASFFEAEQVDPGHFLDNKDQEEALSLDRSSTIASDHVVDTQDLTEFLDEASSPGEFAVFLLHRLFPELFDHRKLGEQYSCYGDGGKQELDPQRLQIIRNYTEIYFPDMQEEEAWLQQCAQRINDELEGLGLDAGSEGDPPRDDCYDSSSLPDDISVVKVEDSFEGERPGRRSKKIWLVPIDFDKLEIPQPDFEVPGADCLLSKEQLRSIYESSLSIGNFASRLLVHLFPELFTHENLRKQYNCSGSLGKKQLDPSRIKLIRHYVQLLYPRAKNDRVWTLEFVGKLDERCRRRDTEQRRSYQQQRKVHVPGPECRDLTSYAINPERFREEFEGPPLPPERSSKDFCKIPLDELVVPSPDFPVPSPYLLSDKEVREIVQQSLSVGNFAARLLVRLFPELFTAENLRLQYNHSGACNKKQLDPTRLRLIRHYVEAVYPVEKMEEVWHYECIPSIDERCRRPNRKKCDILKKAKKVEK

SEQ ID NO: 36532 - DNA, 2487 bp, Artificial Sequence
  derived and/or modified sequence
atgaacagcaccgagttcaccgaggacgtggaggaggtgctgaagagcatcaccgtgaaggtggagaccgaggccgaggacgccgccctggactgcagcgtgaacagcagaaccagcgagaagcacagcgtggacagcgtgctgaccgccctgcaggacagcagcaagagaaagcagctggtgagcgacggcctgctggacagcgtgcccggcgtgaagagaagaagactgatccccgaggccctgctggccggcatgagaaacagagagaacagcagcccctgccagggcaacggcgagcaggccggcagaggcagaagcctgggcaacgtgtggcccggcgaggaggagccctgcaacgacgccaccacccccagctacaagaagcccctgtacggcatcagccacaagatcatggagaagaagaacccccccagcggcgacctgctgaacgtgtacgagctgttcgagaaggccaacgccagcaacagccccagcagcctgagactgctgaacgagccccagaagagagactgcggcagcaccggcgccggcaccgacaacgaccccaacatctacttcctgatccagaagatgttctacatgctgaacaccctgaccagcaacatgagccagctgcacagcaaggtggacctgctgagcctggaggtgagcagaatcaagaagcaggtgagccccaccgagatggtggccaagttccagcccccccccgagtaccagctgaccgccgccgagctgaagcagatcgtggaccagagcctgagcggcggcgacctggcctgcagactgctggtgcagctgttccccgagctgttcagcgacgtggacttcagcagaggctgcagcgcctgcggcttcgccgccaagagaaagctggagagcctgcacctgcagctgatcagaaactacgtggaggtgtactaccccagcgtgaaggacaccgccgtgtggcaggccgagtgcctgccccagctgaacgacttcttcagcagattctgggcccagagagagatggaggacagccagcccagcggccaggtggccagcttcttcgaggccgagcaggtggaccccggccacttcctggacaacaaggaccaggaggaggccctgagcctggacagaagcagcaccatcgccagcgaccacgtggtggacacccaggacctgaccgagttcctggacgaggccagcagccccggcgagttcgccgtgttcctgctgcacagactgttccccgagctgttcgaccacagaaagctgggcgagcagtacagctgctacggcgacggcggcaagcaggagctggacccccagagactgcagatcatcagaaactacaccgagatctacttccccgacatgcaggaggaggaggcctggctgcagcagtgcgcccagagaatcaacgacgagctggagggcctgggcctggacgccggcagcgagggcgacccccccagagacgactgctacgacagcagcagcctgcccgacgacatcagcgtggtgaaggtggaggacagcttcgagggcgagagacccggcagaagaagcaagaagatctggctggtgcccatcgacttcgacaagctggagatcccccagcccgacttcgaggtgcccggcgccgactgcctgctgagcaaggagcagctgagaagcatctacgagagcagcctgagcatcggcaacttcgccagcagactgctggtgcacctgttccccgagctgttcacccacgagaacctgagaaagcagtacaactgcagcggcagcctgggcaagaagcagctggaccccagcagaatcaagctgatcagacactacgtgcagctgctgtaccccagagccaagaacgacagagtgtggaccctggagttcgtgggcaagctggacgagagatgcagaagaagagacaccgagcagagaagaagctaccagcagcagagaaaggtgcacgtgcccggccccgagtgcagagacctgaccagctacgccatcaaccccgagagattcagagaggagttcgagggcccccccctgccccccgagagaagcagcaaggacttctgcaagatccccctggacgagctggtggtgcccagccccgacttccccgtgcccagcccctacctgctgagcgacaaggaggtgagagagatcgtgcagcagagcctgagcgtgggcaacttcgccgccagactgctggtgagactgttccccgagctgttcaccgccgagaacctgagactgcagtacaaccacagcggcgcctgcaacaagaagcagctggaccccaccagactgagactgatcagacactacgtggaggccgtgtaccccgtggagaagatggaggaggtgtggcactacgagtgcatccccagcatcgacgagagatgcagaagacccaacagaaagaagtgcgacatcctgaagaaggccaagaaggtggagaagtag

SEQ ID NO: 36533 - DNA, 2487 bp, Artificial Sequence
  derived and/or modified sequence
atgaactccacagaattcaccgaggatgtcgaggaggtactgaaatcaattactgtgaaagtcgagaccgaagcagaggacgccgcactggactgcagtgttaatagcagaacatcggagaagcattcagtggacagtgtgctgaccgcgcttcaagatagctccaagcgcaaacagctggtctccgacggattgctggattctgtccccggcgtcaaaagacgtcgcctgatacccgaagctctgcttgccggcatgcgtaacagagagaatagttctccatgccaaggaaatggggagcaggccggacgcggacgatcccttggcaacgtgtggcccggcgaggaagaaccttgtaatgacgcgacaaccccttcctacaagaagccgctttatggcatctctcataaaatcatggaaaagaaaaaccccccctctggcgacctactcaacgtctacgagctgtttgaaaaggctaatgccagcaatagtccttcatccctccgactactcaacgagccgcagaagagagactgcgggagcactggcgcgggtacagacaatgatccaaatatatatttcctgattcaaaagatgttttacatgcttaatactctgactagcaacatgtcacaacttcatagcaaggtagacctgctatctctcgaggttagccggataaaaaaacaagtcagccccacagaaatggtcgctaaatttcagcctccgcctgagtatcagttgactgctgcagaactgaagcagatcgtcgatcagagcctgagcggcggagatcttgcttgccgcctcttggtgcagctgtttccagaactgttttcagacgtcgacttttcccggggctgcagcgcctgtggctttgcagccaagcgcaagctcgagagcctacatctccagctgattcgcaattacgtggaggtgtactacccttctgtcaaggatactgccgtatggcaggcagaatgcctgccccagctcaatgatttcttctcccgcttctgggctcaaagggagatggaggattctcaaccgtctgggcaggtggcttcattctttgaggccgaacaagtggatcctggccactttctggacaataaagatcaggaggaagccctttctctcgatcgctcgagcactatcgcgagcgatcatgtggtcgacacacaggatttgaccgagttcctggacgaagcaagctctccaggagaattcgctgtatttttactgcacagactctttcctgaactctttgatcatcgcaagttgggcgaacagtatagctgctacggtgatggcggaaaacaagagctggatcctcagagacttcagattattaggaactataccgagatttactttcctgacatgcaggaggaggaggcctggctccagcaatgcgcccagcggatcaatgacgaactggagggcctcgggctggatgctggctccgagggcgaccccccacgggacgattgctatgacagctcctcccttccagacgatatctccgtggtgaaggtggaggactccttcgaaggagagcgtcccggcagacggagtaagaaaatttggctcgttcccattgatttcgacaaactggaaatcccccagcccgacttcgaggttccaggggccgactgtttgctaagcaaggagcagcttcggagcatttacgaatcatcactgagtatcggtaattttgcatccaggctccttgttcaccttttccccgagctgttcactcatgaaaatctcaggaagcagtacaattgcagtggaagtctgggaaagaaacagttagatccgagtcgcattaagctgatcagacattacgtccagttattatacccgcgggccaaaaacgatagagtgtggacccttgagtttgtcgggaagctcgatgaaagatgtaggcgccgggatacagaacaacgccggagctaccaacagcagaggaaggtccatgtgccaggccccgaatgcagggatctgacatcctatgccatcaaccctgaaaggtttagagaggaatttgagggtcctccactacctcccgagcgatcaagtaaggacttttgtaagatccccttggacgagctggtcgtccccagtccagacttcccggtgccatccccttacttgctttcagacaaggaagtgcgcgaaattgtccagcagagcttgtcggttggcaatttcgctgctaggttgctcgtgagactgtttccggaactcttcaccgcagagaacttgcgacttcagtacaatcacagcggtgcatgcaataaaaaacagctcgaccctactcggctccgcctgattcgccactacgtggaggctgtgtatcctgtggagaaaatggaggaggtgtggcactacgaatgcataccttccatcgacgagagatgtcggcggcctaaccgcaaaaaatgcgacatcttgaaaaaagccaagaaggtcgaaaagtag

SEQ ID NO: 36534 - DNA, 2487 bp, Artificial Sequence
  derived and/or modified sequence
atgaactctaccgaatttaccgaggatgtggaggaggtgttgaagagtattacagtcaaggtcgaaaccgaggccgaagacgctgccttagactgttcagtgaattctagaacctctgaaaaacacagtgtagacagtgtcctgactgctctgcaggattccagcaagagaaagcagttggtgtccgacggtctcctcgactcagtgccaggagtgaaaaggcgcaggctgattcctgaggcactgctggcagggatgcggaacagggaaaattctagcccctgtcagggcaacggtgagcaggccggtaggggccgctccttgggaaacgtgtggcctggcgaagaggaaccctgtaatgatgcgaccacccctagctacaagaaaccactatatgggatcagccataagatcatggagaaaaagaacccccccagcggggatcttctgaatgtctatgagctgttcgaaaaggcaaacgcctccaacagcccctcttcactccgcctgttaaatgaaccccagaagagagactgcgggtcaacaggggcaggcaccgataatgaccccaacatttacttcctcatacagaaaatgttttacatgctaaacactcttactagcaacatgtctcagttgcactctaaagtggacttgttgagcctagaagttagccgcattaagaagcaagtttcccccaccgagatggtcgccaagtttcaaccaccgccagaataccagctgactgctgccgagctgaagcaaatagtggatcaaagcttaagtggcggggatctggcttgccgtcttctcgtgcagctgtttcccgagctatttagtgatgttgattttagccgtgggtgtagcgcctgcggatttgcagcaaagcgcaaactggagtcactccacttgcagcttatcagaaattatgtcgaggtttattatccctctgtaaaagatactgcagtctggcaggccgagtgtttaccacagctgaatgacttttttagcagattttgggcccagagggaaatggaagattcccagccctccggacaagtggctagtttcttcgaggcagagcaggtggaccccggacacttcctggataataaggatcaggaagaagccctctcacttgatcggtcatccacgatcgcatctgatcacgtggtggacactcaggatttgactgagttcctggacgaagccagtagtccgggggaattcgccgtgtttttgcttcacaggctgttcccagaattattcgaccaccgcaagttgggtgaacaatatagctgttacggtgatggtggcaaacaggagttagatccacaaagactgcagattatcagaaattacactgagatctactttccagatatgcaggaggaagaagcatggctccagcagtgtgctcagcgcattaacgatgagcttgagggcttagggcttgacgcgggttctgagggagatcccccccgcgatgattgctacgattccagttccctgccagacgatatcagtgtggtgaaggtcgaggatagctttgagggggagaggcccggacgccggtctaaaaagatttggctggtgccgattgatttcgacaagctcgagatcccacaaccagacttcgaggttcccggcgcagactgtcttttgagcaaggaacagctgcgatcaatatacgaatctagcctgtccattggcaacttcgcgagcagactcctggtccacctctttccagaacttttcacacatgaaaacctccgcaagcagtataattgttcagggagcctaggcaagaaacagctggatccttccaggattaagttaatccgccactacgtgcagctgctgtatcccagggcaaaaaatgaccgcgtttggactttagagttcgtgggaaagctagacgagcgctgtcgtcggcgcgacacagaacagaggaggtcctaccagcagcagaggaaagtgcacgtgcccggtcctgagtgtcgagacctaaccagctatgctattaaccccgaacgattccgagaggagttcgaggggccccctctgccacccgagcggtctagtaaggacttctgtaagattcccctcgacgagctcgtcgtgccgagccctgactttccagtcccgtccccttacctgctgagcgataaagaagtacgcgaaatcgtacagcagtcattaagcgtggggaactttgccgcaagattattggtaagacttttcccagagctgttcacagccgagaatctgcggctgcaatacaaccattctggcgcgtgtaataagaagcagctggaccctaccagactgaggttgattaggcattatgtggaagcagtgtacccagtagagaaaatggaagaagtttggcattacgagtgcattccttctatagatgaaaggtgtaggcgtcccaatcgtaaaaaatgcgatattctcaagaaggccaagaaggtcgaaaagtag

SEQ ID NO: 36535 - DNA, 2487 bp, Artificial Sequence
  derived and/or modified sequence
atgaacagcacagagttcacagaagatgtggaggaggtgctgaagagcatcaccgtgaaggtggagacagaagcagaagatgctgccctggactgcagcgtgaacagcaggaccagcgagaagcacagcgtggacagcgtgctgacagccctgcaggacagcagcaagaggaagcagctggtgtctgatggcctgctggacagcgtgcctggggtgaagagaagaagactcatccctgaggccctgctggccggcatgaggaaccgggagaacagcagcccctgccagggcaatggagagcaggccggccggggccgcagcctgggcaatgtgtggccaggagaggaggagccctgcaatgatgccaccacccccagctacaagaagcccctgtatggcatcagccacaagatcatggagaagaagaacccccccagcggggacctgctgaatgtgtatgagctgtttgagaaggccaatgccagcaacagccccagcagcctgcggctgctgaatgagccccagaagagggactgtggcagcactggagctggaacagacaatgaccccaacatctacttcctgatccagaagatgttctacatgctgaacaccctgaccagcaacatgagccagctgcacagcaaggtggacctgctgagcctggaggtgagccgcatcaagaagcaggtgagccccacagagatggtggccaagttccagcccccacctgagtaccagctgacagctgctgagctgaagcagatcgtggaccagagcctgagcggcggggacctggcctgccgcctgctggtgcagctgtttcctgagctgttcagtgatgtggacttcagccggggctgcagcgcctgtggctttgctgccaagaggaagctggagagcctgcacctgcagctgatccggaactacgtggaggtgtactaccccagcgtgaaggacacagctgtgtggcaggctgaatgtctgccccagctgaatgacttcttcagccgcttctgggcccagcgggagatggaggacagccagcccagcggccaggtggccagcttctttgaggccgagcaggtggaccccggccacttcctggacaacaaggaccaggaggaggccctgagcctggacaggagcagcaccatcgccagtgaccacgtggtggacacccaggacctgacagagttcctggatgaggccagcagccctggagaatttgctgtgttcctgctgcacaggctcttccctgagctgtttgaccacaggaagctgggggagcagtacagctgctatggagatggcggcaagcaggagctggacccccagaggctgcagatcatccggaactacacagagatctacttcccagacatgcaggaggaggaggcctggctgcagcagtgtgcccagaggatcaatgatgagctggagggcctgggcctggatgctggcagcgagggggaccccccaagagatgactgctatgacagcagcagcctgcctgatgacatctctgtggtgaaggtggaggacagctttgaaggagagcggcccggccgccgcagcaagaagatctggctggtgcccatcgactttgacaagctggagatcccccagcctgactttgaggtgcctggagctgactgcctgctgagcaaggagcagctgcggagcatctatgagagcagcctgagcatcggcaactttgccagccggctgctggtgcacctgtttcctgagctgttcacccatgagaacctgaggaagcagtacaactgcagcggcagcctgggcaagaagcagctggaccccagccgcatcaagctgatccgccactacgtgcagctgctgtacccccgggccaagaatgacagagtgtggaccctggagtttgtgggcaagctggatgagcgctgcagaagaagagacacagagcagaggaggagctaccagcagcagaggaaggtgcacgtgcccggccctgagtgccgggacctgaccagctatgccatcaaccctgagcgcttccgggaggagtttgagggcccccccctgcccccagagaggagcagcaaggacttctgcaagatccccctggatgagctggtggtgcccagcccagacttccctgtgcccagcccctacctgctgagtgacaaggaggtgcgggagatcgtgcagcagagcctgtctgtgggcaactttgctgcccggctgctggtgcggctcttccctgagctgttcaccgctgagaacctgcggctgcagtacaaccacagcggggcctgcaacaagaagcagctggaccccacccggctgcggctcatccgccactacgtggaggccgtgtaccctgtggagaagatggaggaggtgtggcactatgagtgcatccccagcattgatgagcgctgccggcggcccaacaggaagaagtgtgacatcctgaagaaggccaagaaggtggagaagtag

SEQ ID NO: 36536 - DNA, 2487 bp, Artificial Sequence
  derived and/or modified sequence
atgaacagcaccgagttcaccgaggacgtggaggaggtgctgaagagtatcactgtcaaggtagaaacagaagccgaagacgccgcgctggattgtagcgtaaattctcgcacaagcgaaaagcactcagtggattctgtgctcactgccctgcaggacagctcaaagcgcaagcagctcgtgtctgacggattgttggactctgttccaggcgtgaaaaggagaaggctgattcccgaagccctactggccggaatgcgtaaccgtgaaaactccagtccgtgtcagggaaatggggagcaggccggacggggccgatccctcggtaacgtttggcctggagaggaagaaccttgcaatgacgccaccaccccttcctataagaagccgctttacggaatttctcacaaaattatggaaaaaaagaatcctccttctggggacctcttgaacgtgtacgagctcttcgagaaggctaacgccagtaatagccccagctcgctgcgcctcttaaacgaaccacagaagagagactgcggaagcaccggcgctgggactgataacgatcctaacatctactttctgattcaaaaaatgttttatatgctcaataccttaaccagcaatatgtcacagctacactctaaggtcgacctgttatcgctagaggtatcccgtatcaagaaacaagttagtccaacggagatggtggccaaatttcagccccctccagagtatcagctcacagctgcggaactgaagcagattgtggatcagtcattaagcggaggtgacctggcctgtaggttgctcgtccagctttttcccgagctgttctccgacgttgactttagccgtgggtgcagtgcttgcgggtttgccgccaagaggaagcttgagagcttgcatctgcagctcattcggaactacgtggaggtgtactacccatcggtaaaggatactgccgtgtggcaagcagaatgcctaccacaactgaatgacttcttcagccgattctgggcccagagggaaatggaagattctcagccttcaggccaggtggcgtcctttttcgaggccgaacaggtcgatcccggacactttctggacaacaaggaccaggaggaggccctttcactcgacagaagctcaacaattgcaagcgatcacgtcgtcgacacccaggaccttaccgaatttctcgatgaagcctcttcaccaggggaattcgccgttttccttttgcatcggctgtttccagaactgtttgaccaccggaagctgggggagcagtacagttgttacggcgacggtggcaaacaagagctcgatccacagcggctgcagatcatacgaaattataccgagatctacttccctgacatgcaggaagaggaggcatggttacagcagtgcgcccagagaattaatgacgagttggaggggctggggttagacgccgggtctgaaggggatccacccagggacgattgctacgacagcagctcactaccggacgatatctcagtggtgaaagtcgaagacagctttgaaggcgagcgcccaggcagacgctcaaagaaaatctggctcgtgccaatagactttgacaaactggaaatcccccaaccagactttgaggttccaggagctgactgtcttctctcaaaggaacagttacgtagtatttatgaatcatcactgtcaattggtaacttcgcttcccgcctccttgttcacctgtttcctgaacttttcactcatgaaaacctacgaaaacagtacaactgctccggatccctgggcaagaagcaactcgatccttcccgcatcaaactgattcggcattatgttcagctactgtatccaagagcgaaaaacgaccgtgtctggacactggagtttgtgggcaaactggacgaacgatgtagacgccgcgataccgagcagcggcggtcatatcagcagcagaggaaggtccatgtcccaggacctgagtgccgcgacctgaccagttacgccattaaccccgaacggttcagagaagagttcgaagggcccccgctgcctcctgaaagatcctccaaagatttctgcaaaattccgcttgacgagctagtcgtgccctcaccggacttccctgtcccctccccgtatttgctctcagataaggaggttcgagagatcgtccagcagagtctgtcggtcggaaatttcgctgcccggcttcttgtccggctgtttcctgagctattcacggctgaaaacctgcgattgcaatacaaccattcaggtgcatgcaataagaagcagttggaccccacgcggcttaggctgattaggcactacgtagaggctgtctatcctgtcgagaagatggaggaggtgtggcattacgagtgcattccctcaatcgacgagcgatgcagaaggcccaacagaaaaaagtgcgacatcctgaagaaggctaaaaaggtcgagaaatag

SEQ ID NO: 36537 - DNA, 2487 bp, Artificial Sequence
  derived and/or modified sequence
atgaacagcaccgagttcaccgaggacgtggaggaggtgctgaagagtataacagtgaaggtagagactgaggccgaggacgctgcgctcgattgtagcgttaactctcgcacatccgagaaacacagcgtggacagcgtcctaaccgccctgcaggactcaagtaagagaaagcagctggtaagtgatggcttgctggatagtgtccccggggttaagcgacgtcggctcattccagaagctctgctggccggcatgcggaatagggagaactcctctccctgccagggcaacggggagcaggccggtaggggaagaagccttggaaacgtttggccaggggaagaggagccatgtaatgatgccacaacaccctcgtacaagaaaccactgtacggtatctcacataagatcatggaaaaaaaaaaccctccatctggtgacttgctgaacgtttacgaactattcgagaaggcaaacgccagtaactctcctagctccctgagattgctgaacgagcctcaaaagcgcgattgtggaagcactggcgctgggacagacaatgatcccaacatttacttcctaatccaaaagatgttctatatgctgaataccctgacttccaacatgagtcagctacatagcaaggtcgatttgctgtccctcgaggtgtctcgtataaaaaaacaagtgtcccctaccgaaatggtggccaagtttcagccaccccccgagtatcaactcacagctgcagagctcaagcagatcgtggatcaatctctgtccgggggtgacctggcgtgtcgcctgctggtgcagctcttccccgaactgttctcagatgttgatttttccaggggctgtagcgcctgtggatttgccgccaagaggaagctggagagccttcatctgcagctcattagaaattacgtagaggtatactaccctagtgtgaaggacactgccgtctggcaggcagaatgtttgccccagctcaatgacttcttttcaaggttctgggcccagcgtgagatggaggactcacaaccctcgggccaggtcgctagcttctttgaggcagagcaagtggatccaggacatttcttagataacaaagaccaagaagaggccctgtccctggatcgcagcagcactatcgccagcgaccatgtggtggatacacaggacctcaccgagttcctcgacgaggcgtccagtcccggagagtttgccgtgttcctgctgcatcgcttgttccccgagctatttgatcatcggaaactcggcgaacagtattcatgttatggtgacggggggaagcaggagctagacccacagcgccttcagataatccgcaattataccgagatatactttccggacatgcaggaggaagaagcctggcttcagcagtgtgcacagcggattaatgacgagctcgaagggctcgggctcgatgctgggagcgaaggcgacccaccacgtgatgactgctacgatagtagcagcctgcctgatgacatctccgtggtcaaggtggaggacagctttgaaggcgaacgcccagggaggcgtagtaaaaagatttggctggtgccaatagactttgataaactagagattcctcagccagacttcgaggtccctggagccgactgtttgctgagtaaggaacagctccggtcaatatatgagagctctttatccatcggtaacttcgcttcgaggttgctcgtccacctgttccccgagctctttacccacgagaacctgcgcaaacagtacaactgtagcggctcccttggtaagaagcagctggacccctcacggatcaaattgattcgtcattacgtgcagctgctctatccacgtgcgaagaacgatcgagtctggaccttggaatttgtaggaaagctggatgaacgttgtcggcgcagagataccgagcagcgcaggagctaccagcaacagcggaaggtgcatgtgccagggccagaatgccgcgatctcactagttacgccattaaccccgaacgcttcagagaagaattcgagggtccaccactcccaccagagcggagcagcaaagacttctgtaagataccactggacgaactggtggtgcctagccccgactttcctgtgcccagcccctatctactgagcgacaaggaagtacgcgagatcgttcaacagtctctgagcgtgggcaactttgcggcgcgacttctcgtccgcttattccccgaactgttcacagccgaaaacctgaggctacaatataaccacagcggcgcttgtaacaagaaacagcttgaccccacacggctgcgcctcattcgtcactacgtggaagccgtataccctgtggagaagatggaggaggtgtggcactacgaatgtatcccatccattgatgaacgatgccgcagacccaatcgcaagaagtgcgacatcttaaaaaaagcgaagaaggttgaaaaatag

SEQ ID NO: 36538 - DNA, 2487 bp, Artificial Sequence
  derived and/or modified sequence
atgaatagtactgaatttactgaggatgtagaagaggttctcaagtctatcactgtaaaagtggagactgaagcggaagacgccgctttagactgctctgttaattcacggaccagcgagaaacattcagtagactctgttctgacagcattgcaggactcctcaaagcggaagcagctggtgtcagacggactcttggatagtgtgcctggggttaagagacggaggctcattccagaagcactcttggctggtatgcggaacagagagaactcaagcccctgtcaaggtaacggagaacaggctggcagaggtcgatccctagggaacgtgtggcctggggaggaagaaccttgtaatgatgccaccacaccaagctacaaaaaaccgctgtacgggatctcacacaagatcatggagaagaaaaatcctccttctggggacttattgaacgtgtacgaactcttcgagaaggcgaacgcttccaattcccctagcagtctacgactcctgaacgaaccgcaaaaacgtgattgcggctcaaccggcgcaggtaccgacaatgaccccaatatctactttttgattcagaagatgttttacatgttgaacacactgacttccaatatgtcccagctgcactcgaaggttgaccttctgtctcttgaggtcagccgaattaagaaacaggtatcgccaaccgagatggtcgcaaagttccagcccccaccggaataccaactcaccgccgcagagctgaagcaaattgtggaccagtccctgtccggcggagatttggcctgcagattacttgtgcagctgtttcccgaactgtttagcgatgtcgacttttctcgagggtgttcggcctgcggcttcgctgccaagcgcaaactggagagtctgcacctccagctgattcgtaactatgtggaagtatattatccaagtgtgaaggacactgccgtgtggcaggccgaatgcctgccccagttgaacgattttttctcacgattctgggcccagagagagatggaggacagtcagccctcagggcaagtcgcgagctttttcgaggcagagcaggtggaccctggacattttctggacaataaggatcaggaggaagccctgtcattagaccgctctagcaccattgcatcagatcatgtggtggacacccaggacttgacagagtttctcgatgaggccagctcgcccggtgagttcgctgtctttctcctgcacaggttatttccggagctcttcgaccacaggaagttgggtgagcagtatagctgctatggggatggaggcaaacaggaactcgatccacagcgcctgcagatcatcaggaactatacggaaatatacttcccggatatgcaggaggaagaggcttggctccaacaatgcgcacagagaataaacgacgagcttgagggattaggactggacgctggatccgaaggtgatccacccagggacgattgttacgattcttcatctctaccagacgacattagtgttgtaaaggtggaggattctttcgaaggagagcgacctggacgtcgatcgaaaaagatctggctggtgcccatcgactttgataagctggagattccccagcccgactttgaagtacctggggcagattgcttgctgagtaaagagcaacttaggagcatttacgagtcaagtctgtcgataggtaactttgcaagtaggctgctcgttcacctgttccctgagttattcacgcacgagaatctaagaaagcaatataactgcagtgggtcactcggtaaaaaacaactcgacccttcacggattaagctaattcggcactatgtgcagctgctctacccaagggctaagaacgaccgggtctggacgctggaatttgtaggcaagctagacgagcgctgcagacgtcgtgatacagagcagcgaaggagttaccaacagcaaaggaaagtacacgtcccgggacccgagtgcagagatttgacctcgtatgccattaatccggaacgattccgggaggaattcgagggccctcccctacctcccgagcgctcctctaaagacttctgcaagatcccactagacgagctggtcgtcccatcccctgactttccggtgccttccccctatctgctctctgacaaggaggtcagagagatcgtacaacagtccctcagtgtgggaaattttgcagcacgccttctggtccgattatttccagagctatttactgctgaaaacctacgcctgcaatacaaccacagcggggcttgtaataaaaaacagttagaccccacacgacttcggctgatccgacactatgttgaggcggtttacccagtcgaaaaaatggaggaagtttggcactacgaatgcattccgtcaatcgacgaaaggtgtcggaggcccaatcgcaaaaaatgcgatatactgaaaaaggctaagaaagtggaaaagtag

SEQ ID NO: 36539 - DNA, 2487 bp, Artificial Sequence
  derived and/or modified sequence
atgaactcaaccgagtttactgaagacgtggaagaggtgcttaaatctataacagtgaaggtcgagacggaggccgaggatgccgcattagattgttccgttaatagtaggacgtctgaaaaacatagcgtcgactccgtcctcacagcgctccaggattccagcaagcgaaagcagctggtgtccgacggactcttggactcagtcccaggggtcaagcgtagaagactgatcccagaagccctcttagctggtatgcggaaccgcgagaactcttcaccttgccaggggaacggagaacaggccggtaggggacgatctctgggaaacgtctggcccggtgaggaagaaccatgtaatgacgccaccacaccctcatacaagaaacctctatacggcataagccacaagataatggaaaaaaaaaaccctccgtctggagatctgcttaatgtgtacgagctttttgaaaaagcaaacgcctctaactctccatcgagtttaagactcttaaacgaaccacagaagcgagattgcggcagcaccggggcagggactgataacgaccccaatatttactttctaatccagaaaatgttttacatgttgaacacactgacctctaacatgagtcagctccactcaaaggtggatttgctgagccttgaagtcagtcgcattaaaaagcaggtgtctcctaccgaaatggtcgcaaagtttcaaccaccgcctgagtatcagctaactgccgcagagctgaaacaaatcgttgaccaatccctttccgggggagacttggcctgtcgcctgctcgttcagctatttcctgagctgttttctgacgtggacttttcaagaggatgtagcgcctgcggttttgccgcaaaacgaaaattggaaagtcttcacttgcagctgatcagaaactatgtcgaagtctactatccttctgtgaaggataccgccgtgtggcaggctgaatgccttccacagctgaatgatttctttagccggttctgggcacagagggagatggaggattcacaaccatctggacaagtggcatcgttctttgaggccgaacaggttgaccctggacattttctcgacaataaggatcaggaggaggcattgtctctggaccggagtagcaccatcgccagcgaccacgtggtcgacacacaggatctgaccgagtttttagacgaagcgtcctcccctggagaattcgctgtattcctgctgcacagactctttccagaactctttgatcacaggaagctgggagaacaatactcctgttacggagatggaggtaaacaagagctggacccccagcggttacagatcatccgaaactacaccgagatctacttccctgatatgcaggaagaagaagcctggctccagcagtgtgcccaaaggatcaacgacgagcttgagggactgggattggacgcagggtcagaaggggaccccccaagggatgattgctacgatagcagtagtttgcctgacgatatctccgtggttaaggtggaggactccttcgaaggcgaacgccctgggaggcgctctaaaaaaatttggttagttcccatagatttcgataagctggagattccacagcctgattttgaggttccaggcgctgattgcttactttctaaggagcagttgcgaagtatatatgaatcatctctgagtatcggaaattttgcctccagactgctggtccacctgttccctgagctctttacccatgagaatttgcgtaaacaatataactgtagtggaagcttggggaagaagcagctggaccccagccgtattaagctcattcggcactatgtgcagctgctgtacccacgggctaagaatgacagagtttggaccctagagtttgttgggaagttggatgagagatgccgacgtcgagacaccgagcagcgcaggagttaccaacagcagcgcaaggttcacgtgcctggcccagaatgccgcgacctcacatcatacgcgattaatcctgagcgattcagggaggaatttgaggggcctccacttccccctgaacggagctcaaaagacttttgtaaaattcccctggatgagctggtcgtaccctcccccgactttcccgtcccctccccctacttattgtctgataaggaagtcagagaaattgtgcagcaatcactgtccgtgggcaactttgcagcaagattactagtacgcttgttcccagaactatttactgctgaaaatctcagactgcaatataatcattctggggcttgtaacaaaaagcagttagaccctacgaggctaagactcatcagacattacgtagaggccgtgtacccagtggaaaagatggaggaagtttggcattatgagtgcattccaagcattgacgagagatgccggagacctaacagaaaaaagtgcgatattcttaagaaggccaagaaggtggagaaatag

SEQ ID NO: 36540 - DNA, 6200 bp, Artificial Sequence
  derived and/or modified sequence
acacaaagagaggggaaaatacacggcgctcgcccgcccgccgcccccagcgcctccccgggccgccctggccaggccctccgcgcgcggcccccactccccggccccgcgccctcccccccacgtggcgcccaaactcggcgcgggcccgcccggcaaagtacagaactcgcgtcccagcggaatagaagatgaactcaactgaattcaccgaagatgtagaagaagttctaaaaagtatcactgtgaaagtggagacagaggctgaagatgctgctctggactgctccgtgaattccaggacttctgagaagcactctgtggacagcgtcctcactgccctgcaggactccagcaaacgaaagcagctggtcagcgatggcctgctagactctgtccccggcgtgaagaggaggcggctgatccccgaggctctcctagcaggcatgcggaaccgtgagaacagctcgccctgccaaggcaatggtgagcaggccggcaggggcaggagcctgggcaatgtgtggcctggagaggaggagccctgcaacgatgccaccaccccttcctacaagaagcctctgtatggcatctcgcacaagatcatggagaagaagaatcctccctcgggggacctgctaaacgtgtacgagctctttgagaaggcaaacgccagcaacagcccctcgtcactgcggctcctgaatgagccacagaagcgggactgtggcagcaccggggcaggcactgacaacgaccccaacatctacttcctgatccagaagatgttctacatgctgaacaccctcacgtccaacatgtcccagctgcacagcaaggtggacctgctctcccttgaggtgagccgcatcaagaagcaggtgagccccactgagatggtggccaaattccagccgccccctgagtaccagctcacagccgcagagctcaagcagatcgtggaccagagcctgtcagggggggacctggcctgccgcttgctggtgcagctcttccccgagctcttcagcgacgtggacttctcccggggctgcagtgcctgtggctttgcggccaagcgcaagctggagtcgctgcacctgcagctcatccgcaactatgtggaggtctactacccctcggtgaaggacacggctgtgtggcaggccgagtgcctgccccagctgaacgacttcttcagccgcttctgggcccagcgggaaatggaggacagccagcccagcggccaggtcgccagcttctttgaggcagagcaggtggaccccggccacttcctggacaacaaagaccaggaggaggccctgtctcttgaccggagcagcaccatcgcctcagaccacgtggtggacacgcaggacctcactgagttcctggacgaagcctcctcaccaggcgagtttgccgtcttcctcctccaccggctcttccccgagctcttcgaccaccgcaagctgggtgaacagtacagctgctacggggacggtggaaagcaggagctggacccgcagcggctgcagatcatccgcaactacacggagatctacttccctgacatgcaggaggaggaggcctggctgcagcagtgtgcccagcgcatcaacgacgagctcgagggcctggggctggacgcgggcagtgaaggcgaccccccgcgtgatgactgctacgactcctccagtctgcccgacgacatctcagtggtcaaggtggaggacagcttcgagggcgagcggccgggtcgccgctccaagaagatctggctggtgcccatcgacttcgacaagttagagatcccccagcctgacttcgaggtgcccggtgccgactgcctgctcagcaaggagcagctacgcagcatctacgagagcagcctgtccatcggcaacttcgcctcgcgcctgctggtgcacctgttccccgagctcttcacgcacgagaacctgcgcaagcagtacaactgcagcggctccctgggcaagaagcagctggacccctcccgcatcaagctcatccgccactacgtgcagctgctctacccacgcgccaaaaacgaccgcgtctggaccctggagttcgtgggcaaactggatgagcgctgccggcgccgggacacggagcaaaggcgctcctaccagcagcagcgcaaggtccacgtgccgggccctgagtgcagagacttgaccagctatgcaatcaaccccgagaggttccgggaggagtttgaggggcccccactgccccccgagaggagcagcaaggacttttgcaagatccccttggacgagctggtggtcccctcgcctgacttcccggtgccttctccctacctgctgtctgacaaggaggtgcgtgagatcgtgcagcagagcctctccgtgggcaactttgccgcccggctcctcgtccgcctgtttcccgaactcttcaccgccgagaacctccggctgcagtacaaccattccggggcttgcaacaagaagcaactggaccccacgcggctgcggctcatccgccactacgtggaagccgtctacccggtggagaagatggaggaggtgtggcactacgaatgtatccccagcatcgatgagaggtgccgccgccccaacaggaaaaaatgcgacatcctcaagaaagcaaagaaagtggagaagtgaaggcccgtgacctgcccagagattcggggtcaccagaggctgagcgatgggcacccttgggactgagcaatacttgggagcacgcctatggcatccacagacaggcaccttatgtccgtggggagtggcttactacatttgcacacgtaaacacccacccaaccgcaagaaagaagccttgagtttggtctcttgtacttacaacttctgtcctatgtgccccggcggggcagcctgagtgtggggagagcaagctgtgagggcagggaccagaggttaggggtcctctctccctggttgtgccctccccagcccctcacagcttataatgcaaacccagcaactctcttgcccctcttcccatattttacatcttccattttgacccatttttttttaattaaaaagaaacccttaaaaaaaatcattgggctctttgggggccattttacttagaaaaaaatctctttaaaagtgccatgttcgtgcacagtggctaatcatagcttcaggtggcatggatactgattttactgaccttgttttttacatctgattttggaagagtcaagatgccccttggatggcagtagaggggatggaatagtgcgaagtcctttacgaccacatgcaagttttcccttctgctctggtgccagggaaggcttccgttcagcttggcctgtccttcaggcgcgttggtagaatgttgtgtcactctttaggcgagaacactggatgatgatgatatgaatgtagacagccgtggaaacacgttcgcagtgtctccatctgagccgtgtccttccgctgcccccattccttctccatacatggttgctggttggagggagtggacatgtttccttggaaaacagtgcaggggcttttggcttcttgttagatttaagggtgggcctctttgagctcaccatgaactgtttacttttccgtgtgtgtatttgtacaaaatccaggttccgggagctttgtggtgacttccccagacctcagtgttagctactccaggcagtactacatcctcattcctcagggcgggcccaggtctgggcccctcttggggataccatgcattggaaggacacaggccattttagatggggtacacatgtcccttcccagggtccactcagaactttcctcttggactctctagaaggtcctgctgtcctatacctggccaccccctgccttggggggcacatgtcttcgttccctcccgactgggaatgtcaggctcctgcaggccagctgcatgctctccaggagcaccaactgggaaatcccctgacaggtaaagtcctttaaaatgatacttttacctacctaactctgggggccaaatgcttaagagggaaaggaaacagtcgaatgcaaacagtgtgtcataccagagtcctggaaaatttattgaatcacacagggtagtcatagaacccctgtgggatggcttaatattttgctactttaaaatgcagagataacagaaacaatctggattttcttcattcagctgataagaacttcagttccagtggctgtatgacataattttgcctgtacccaggagcattttttaaaatacaggattttaaaagcaatgttaagttgctgatctaactagtaaatttgctcctaagtgtcatttacagattatttctgttgaaactgcaaacagatttagaaaggcacagggactgaatgactctctgtcttacacagctactcatgcacacacgcactgcttactaaaagctgaagtgagatgaagggggcctacacgaataacaagttcaacttctttgtgcctggaaaggagggactggagcagccaggagactcactttcccccctcgcttgggcccttctctatgccttagtctctccagcacatgcacacagcatgcacacacacgcaccctacccaaagacagctgtggccctctcccaccacctcccccttcccaccgctggttgttgggggctggaggcgggaggtcccatggaatttgttctggtttctaggatgtaaacgaggactccaagccatgaattgccctgctttctagagggtggaatgttgaccctgcaactttagaagcacaatcatttattaataatttttttgaaactcccatctacccctgttagagaaatcaacaggttctaggaattaaatatgtctctttgtaacccagagcatgttcaatttttggaaaccgtatttcagtgattttcttaataccttacatgtgtagggcatcttcccccagaatcttacagtccctttctgtgaagagaagtggacacacgtgggaactctcaccatctctggactgtcgtcaggaaacgcctgcaggtccttgccctgtctgtatggtgtcctcacttctccatccatacaggtggctccagtgggcatttttttattttaaattttttacatgaagcaatagaagtacaaaatacttattttttcaaaatttaatgtgttccatgaaacctgttggcagtcgctttccttcccccacatctaaattctttggtttttagttgtttgttttttggatttttttttttttttttttggccttgtatcccaaggactaaaagattagcacagacacgttttgatgttgaatgaactagtaagtcacagtaggtggtagtcttcattgatttctctgtaagtttttaaagaatgtatgaagatagtcacgaatgtactgagtgttcgcatcccccttcagttcaccttggctgtgtctacaggacaacaaatgtttgacagggaataaagtcgtgtctggtgtcatttgcgctagcgtgcccctcccctttcggtgttggctccaaaccttcctttccttttatgtttgtggggagtggggaaccacatcagcagcaatcatcaaccaaccaaccaatgggatctacttagtggtgaatagattggctatttaattggtaaaagttgctggtctgaccacaccacagcatgaccactgggttcatttagagatggcctccgtttccaacgttccccacaaatgtttgcttctttcccagtcaagaggggatctcgagactcccgagtggaggtcgtgagcttgcaccccgcctggctgtgtagatcgactgtatagatacatgaagtgggggtgagggccaaggggctattactgctgttgggaaatacttgcctctcgtagatccagccttaatgtttttctgacatcctagtaatagcagaccctgcacaaagtggatatcagacttaatactgtgaggagacaaaataatgagaatagttttaccaaagataatgaaatctcgcatcatgtctgcattttaccatagattggagtgcatccttaggaaactgaatgtaacaaaaacccaggacatttttggaaattgtatgctctctagcaactttgtgtgaatttttatacaaacactgttttatgagttatataaaatgttataaaaatagaaaaa

SEQ ID NO: 36541 - DNA, 6644 bp, Artificial Sequence
  derived and/or modified sequence
atgggccccgccgccagggggcgcagcgctcccttcccggccgttccacggcggttcgcggttcccgctgcccaggagctggaggcgggcccggcgccttgggtgtgcacccgggctggcgcgaggcctggccggccggccgcaaagctgaagcctggggcgctcgccgctcctcgtgagcgctcctttccttctctatgataaacgtgatttcccacgcatgctttgcccttgcctcatccgtgagctgtgcaccaccgatttggaggcccttgtgtgcttgtttacctacgtctccctatgtagctattttaaacaaggtgtttttacagagataaaagttttattgattgctcaggtggtctttctggaagaattctgcacgtaaacgctaactcgacaagagtgccgggaggaacaaggttactcactagagttggaaatgtgcagttcatctccttaaagtaacttttgaatggttgaatacaaatagtaaacatgccacagggcagcgtggcatagtgccagaaagctacggttgcaggaaactgaggtttaatttttagaagtcaatgtcacctgtagcagagaagttccttgaaatcaaatcagacatatggcaattgtgaaaagattgaacggaatagaagatgaactcaactgaattcaccgaagatgtagaagaagttctaaaaagtatcactgtgaaagtggagacagaggctgaagatgctgctctggactgctccgtgaattccaggacttctgagaagcactctgtggacagcgtcctcactgccctgcaggactccagcaaacgaaagcagctggtcagcgatggcctgctagactctgtccccggcgtgaagaggaggcggctgatccccgaggctctcctagcaggcatgcggaaccgtgagaacagctcgccctgccaaggcaatggtgagcaggccggcaggggcaggagcctgggcaatgtgtggcctggagaggaggagccctgcaacgatgccaccaccccttcctacaagaagcctctgtatggcatctcgcacaagatcatggagaagaagaatcctccctcgggggacctgctaaacgtgtacgagctctttgagaaggcaaacgccagcaacagcccctcgtcactgcggctcctgaatgagccacagaagcgggactgtggcagcaccggggcaggcactgacaacgaccccaacatctacttcctgatccagaagatgttctacatgctgaacaccctcacgtccaacatgtcccagctgcacagcaaggtggacctgctctcccttgaggtgagccgcatcaagaagcaggtgagccccactgagatggtggccaaattccagccgccccctgagtaccagctcacagccgcagagctcaagcagatcgtggaccagagcctgtcagggggggacctggcctgccgcttgctggtgcagctcttccccgagctcttcagcgacgtggacttctcccggggctgcagtgcctgtggctttgcggccaagcgcaagctggagtcgctgcacctgcagctcatccgcaactatgtggaggtctactacccctcggtgaaggacacggctgtgtggcaggccgagtgcctgccccagctgaacgacttcttcagccgcttctgggcccagcgggaaatggaggacagccagcccagcggccaggtcgccagcttctttgaggcagagcaggtggaccccggccacttcctggacaacaaagaccaggaggaggccctgtctcttgaccggagcagcaccatcgcctcagaccacgtggtggacacgcaggacctcactgagttcctggacgaagcctcctcaccaggcgagtttgccgtcttcctcctccaccggctcttccccgagctcttcgaccaccgcaagctgggtgaacagtacagctgctacggggacggtggaaagcaggagctggacccgcagcggctgcagatcatccgcaactacacggagatctacttccctgacatgcaggaggaggaggcctggctgcagcagtgtgcccagcgcatcaacgacgagctcgagggcctggggctggacgcgggcagtgaaggcgaccccccgcgtgatgactgctacgactcctccagtctgcccgacgacatctcagtggtcaaggtggaggacagcttcgagggcgagcggccgggtcgccgctccaagaagatctggctggtgcccatcgacttcgacaagttagagatcccccagcctgacttcgaggtgcccggtgccgactgcctgctcagcaaggagcagctacgcagcatctacgagagcagcctgtccatcggcaacttcgcctcgcgcctgctggtgcacctgttccccgagctcttcacgcacgagaacctgcgcaagcagtacaactgcagcggctccctgggcaagaagcagctggacccctcccgcatcaagctcatccgccactacgtgcagctgctctacccacgcgccaaaaacgaccgcgtctggaccctggagttcgtgggcaaactggatgagcgctgccggcgccgggacacggagcaaaggcgctcctaccagcagcagcgcaaggtccacgtgccgggccctgagtgcagagacttgaccagctatgcaatcaaccccgagaggttccgggaggagtttgaggggcccccactgccccccgagaggagcagcaaggacttttgcaagatccccttggacgagctggtggtcccctcgcctgacttcccggtgccttctccctacctgctgtctgacaaggaggtgcgtgagatcgtgcagcagagcctctccgtgggcaactttgccgcccggctcctcgtccgcctgtttcccgaactcttcaccgccgagaacctccggctgcagtacaaccattccggggcttgcaacaagaagcaactggaccccacgcggctgcggctcatccgccactacgtggaagccgtctacccggtggagaagatggaggaggtgtggcactacgaatgtatccccagcatcgatgagaggtgccgccgccccaacaggaaaaaatgcgacatcctcaagaaagcaaagaaagtggagaagtgaaggcccgtgacctgcccagagattcggggtcaccagaggctgagcgatgggcacccttgggactgagcaatacttgggagcacgcctatggcatccacagacaggcaccttatgtccgtggggagtggcttactacatttgcacacgtaaacacccacccaaccgcaagaaagaagccttgagtttggtctcttgtacttacaacttctgtcctatgtgccccggcggggcagcctgagtgtggggagagcaagctgtgagggcagggaccagaggttaggggtcctctctccctggttgtgccctccccagcccctcacagcttataatgcaaacccagcaactctcttgcccctcttcccatattttacatcttccattttgacccatttttttttaattaaaaagaaacccttaaaaaaaatcattgggctctttgggggccattttacttagaaaaaaatctctttaaaagtgccatgttcgtgcacagtggctaatcatagcttcaggtggcatggatactgattttactgaccttgttttttacatctgattttggaagagtcaagatgccccttggatggcagtagaggggatggaatagtgcgaagtcctttacgaccacatgcaagttttcccttctgctctggtgccagggaaggcttccgttcagcttggcctgtccttcaggcgcgttggtagaatgttgtgtcactctttaggcgagaacactggatgatgatgatatgaatgtagacagccgtggaaacacgttcgcagtgtctccatctgagccgtgtccttccgctgcccccattccttctccatacatggttgctggttggagggagtggacatgtttccttggaaaacagtgcaggggcttttggcttcttgttagatttaagggtgggcctctttgagctcaccatgaactgtttacttttccgtgtgtgtatttgtacaaaatccaggttccgggagctttgtggtgacttccccagacctcagtgttagctactccaggcagtactacatcctcattcctcagggcgggcccaggtctgggcccctcttggggataccatgcattggaaggacacaggccattttagatggggtacacatgtcccttcccagggtccactcagaactttcctcttggactctctagaaggtcctgctgtcctatacctggccaccccctgccttggggggcacatgtcttcgttccctcccgactgggaatgtcaggctcctgcaggccagctgcatgctctccaggagcaccaactgggaaatcccctgacaggtaaagtcctttaaaatgatacttttacctacctaactctgggggccaaatgcttaagagggaaaggaaacagtcgaatgcaaacagtgtgtcataccagagtcctggaaaatttattgaatcacacagggtagtcatagaacccctgtgggatggcttaatattttgctactttaaaatgcagagataacagaaacaatctggattttcttcattcagctgataagaacttcagttccagtggctgtatgacataattttgcctgtacccaggagcattttttaaaatacaggattttaaaagcaatgttaagttgctgatctaactagtaaatttgctcctaagtgtcatttacagattatttctgttgaaactgcaaacagatttagaaaggcacagggactgaatgactctctgtcttacacagctactcatgcacacacgcactgcttactaaaagctgaagtgagatgaagggggcctacacgaataacaagttcaacttctttgtgcctggaaaggagggactggagcagccaggagactcactttcccccctcgcttgggcccttctctatgccttagtctctccagcacatgcacacagcatgcacacacacgcaccctacccaaagacagctgtggccctctcccaccacctcccccttcccaccgctggttgttgggggctggaggcgggaggtcccatggaatttgttctggtttctaggatgtaaacgaggactccaagccatgaattgccctgctttctagagggtggaatgttgaccctgcaactttagaagcacaatcatttattaataatttttttgaaactcccatctacccctgttagagaaatcaacaggttctaggaattaaatatgtctctttgtaacccagagcatgttcaatttttggaaaccgtatttcagtgattttcttaataccttacatgtgtagggcatcttcccccagaatcttacagtccctttctgtgaagagaagtggacacacgtgggaactctcaccatctctggactgtcgtcaggaaacgcctgcaggtccttgccctgtctgtatggtgtcctcacttctccatccatacaggtggctccagtgggcatttttttattttaaattttttacatgaagcaatagaagtacaaaatacttattttttcaaaatttaatgtgttccatgaaacctgttggcagtcgctttccttcccccacatctaaattctttggtttttagttgtttgttttttggatttttttttttttttttttggccttgtatcccaaggactaaaagattagcacagacacgttttgatgttgaatgaactagtaagtcacagtaggtggtagtcttcattgatttctctgtaagtttttaaagaatgtatgaagatagtcacgaatgtactgagtgttcgcatcccccttcagttcaccttggctgtgtctacaggacaacaaatgtttgacagggaataaagtcgtgtctggtgtcatttgcgctagcgtgcccctcccctttcggtgttggctccaaaccttcctttccttttatgtttgtggggagtggggaaccacatcagcagcaatcatcaaccaaccaaccaatgggatctacttagtggtgaatagattggctatttaattggtaaaagttgctggtctgaccacaccacagcatgaccactgggttcatttagagatggcctccgtttccaacgttccccacaaatgtttgcttctttcccagtcaagaggggatctcgagactcccgagtggaggtcgtgagcttgcaccccgcctggctgtgtagatcgactgtatagatacatgaagtgggggtgagggccaaggggctattactgctgttgggaaatacttgcctctcgtagatccagccttaatgtttttctgacatcctagtaatagcagaccctgcacaaagtggatatcagacttaatactgtgaggagacaaaataatgagaatagttttaccaaagataatgaaatctcgcatcatgtctgcattttaccatagattggagtgcatccttaggaaactgaatgtaacaaaaacccaggacatttttggaaattgtatgctctctagcaactttgtgtgaatttttatacaaacactgttttatgagttatataaaatgtt

SEQ ID NO: 36542 - protein, 422 aa, Artificial Sequence
  derived and/or modified sequence
MGPAWLWLLGTGILASVHCQPLLAHGDKSLQGPQPPRHQLSEPAPAYHRITPTITNFALRLYKELAADAPGNIFFSPVSISTTLALLSLGAQANTSALILEGLGFNLTETPEADIHQGFRSLLHTLALPSPKLELKVGNSLFLDKRLKPRQHYLDSIKELYGAFAFSANFTDSVTTGRQINDYLRRQTYGQVVDCLPEFSQDTFMVLANYIFFKAKWKHPFSRYQTQKQESFFVDERTSLQVPMMHQKEMHRFLYDQDLACTVLQIEYRGNALALLVLPDPGKMKQVEAALQPQTLRKWGQLLLPSLLDLHLPRFSISGTYNLEDILPQIGLTNILNLEADFSGVTGQLNKTISKVSHKAMVDMSEKGTEAGAASGLLSQPPSLNTMSDPHAHFNRPFLLLLWEVTTQSLLFLGKVVNPVAG

SEQ ID NO: 36543 - DNA, 1269 bp, Artificial Sequence
  derived and/or modified sequence
atgggcccagcttggttatggttgttaggcacaggtattctagcgtcagtgcattgccaacccctgctcgcccacggggataagagtctgcagggccctcaacctccacgccaccagctttctgagcccgcacccgcttaccatcgcattacacccacaattactaactttgcccttagactgtacaaggagctggcagctgatgccccaggcaacatttttttcagtcctgtttccatctcaacaactctagcgctgttgtcattaggagctcaggccaacacctcagcactgattctggagggcctggggttcaacctgactgagacccctgaggcagacatacatcagggtttcagatcgctgctgcacactctggcccttccttctcccaaactggaactgaaggttggcaatagcctgttcctggacaaaagactgaagcctcggcagcattatctggactccatcaaggaactgtacggagcctttgcattttcagccaacttcaccgatagcgtgaccaccggtagacaaataaacgactacctgcggcgacagacttacggccaggtcgttgattgtctccctgagtttagtcaggataccttcatggtgctcgcaaattatatcttctttaaggcaaagtggaagcacccattctctcggtaccagacccagaagcaggaaagcttcttcgtcgatgaacggacatccttgcaggtgcctatgatgcatcagaaggaaatgcaccggtttctttacgatcaggacctagcatgtaccgtgctgcagatcgaataccggggtaacgcactggcactcctcgtgcttccggaccctgggaagatgaagcaagtcgaggccgcacttcagccgcagacgctccggaagtggggtcagttgttgctcccttccctcctcgacctgcacctgccacggttttccatctcgggaacttataatttggaggatattctgcctcaaattgggttgacaaacatcctcaaccttgaggcagacttttccggcgtgacaggccagttaaacaaaactatatctaaggtcagtcataaagcaatggttgacatgagcgagaaaggaaccgaggctggggctgcgtccgggctgctgagtcagccaccatccctcaatacgatgagcgatccacatgcccatttcaaccgcccatttctgttgttgctgtgggaagtgacaacacagtcactcttgtttttggggaaggtcgtgaaccccgtggccggatag

SEQ ID NO: 36544 - DNA, 1269 bp, Artificial Sequence
  derived and/or modified sequence
atggggcccgcctggttgtggttactgggaactgggatccttgccagcgtacactgtcagccacttctggctcacggagataaatcattacaagggccacaaccccctaggcaccagctctctgaaccagcccccgcctaccataggataacacccacaattacaaattttgccttacgcctctataaagaactcgcagctgacgcacccggtaatatattcttcagccctgtaagtatctcaactactcttgcattgttaagtcttggggcccaggcgaatacctccgcgctcatcctggaaggactcggctttaaccttaccgaaacccccgaagcggatatccaccagggcttccgatctctgctacacactctcgcccttccttcccccaagcttgagttgaaagtgggtaacagcctgttcctagataagcgtctgaaaccacggcaacattacttggattcaatcaaagagctgtatggtgcctttgcattcagtgccaatttcacggattccgtcactacggggcgccagattaacgactacctgagacgccagacatatggccaggtagttgattgcttgcccgagttttcccaggacaccttcatggtgctggctaattacatcttcttcaaagcgaagtggaaacatcctttttctaggtatcaaacccaaaagcaggaaagcttctttgtggacgagcgcacatctctgcaggtgcctatgatgcatcaaaaggaaatgcacaggtttctgtacgaccaagacctagcctgtaccgtgctgcagatcgagtatagagggaacgccctggcactcctggtgctccctgaccccgggaaaatgaaacaggtggaagctgccctgcaacctcaaaccctcaggaaatggggacaactcttgctgccgtcactccttgatcttcacttacctcggttttcaatctcagggacctataacctggaggacattctgccacagatcgggctgactaatattctaaacctcgaagctgatttttctggagtcaccggccagctcaacaagaccattagcaaagtaagccacaaagccatggttgatatgagtgaaaagggcaccgaggcaggggctgcatccggattgctatcccaacctccaagcctgaataccatgagtgatccacacgctcacttcaacaggccttttctccttcttctctgggaggttaccacccaaagcctccttttcctgggcaaggttgtgaatccggtggctgggtag

SEQ ID NO: 36545 - DNA, 1269 bp, Artificial Sequence
  derived and/or modified sequence
atggggcctgcgtggctatggctgctgggcacaggtatattagcctctgtgcattgccaaccgctgctcgcacacggggacaaaagtttacaaggaccacagccccctcgtcaccagctttccgaaccggcacccgcctaccacagaatcacaccaacaatcacgaacttcgctctccgactgtataaagaactggcagcggatgcccctgggaatatctttttctcccctgtttctatttcgactactttggccctgttaagtctgggagcacaggccaacactagcgctttgatcctcgagggcctcggcttcaacctgaccgagacccctgaggccgatatccatcaggggttcagatcactcttacacacactggcactgccatctcccaaattggaattaaaagtcggtaactctctctttctggacaaacggctcaaaccacggcagcattacctcgattccattaaagaattatacggagcctttgcattttctgctaattttacggattccgtaactactggacgccaaatcaacgactaccttcggagacagacatatgggcaagtggttgactgtcttcctgagttctcccaggatacatttatggtcctcgctaattacatcttttttaaagccaagtggaagcatcctttctcccgttatcagacacagaaacaggagtctttctttgttgatgaaaggacttctctgcaggttccaatgatgcaccaaaaagaaatgcatagatttctctatgaccaagacttggcgtgcacagttcttcagatcgagtacaggggaaacgccctggcacttctcgtcttacccgatcctggaaagatgaagcaggtggaggccgctttgcaaccccagacactgaggaaatggggacagcttcttcttccctcactgctcgatttacatctgccccgattctctattagtggcacctataacttagaagacatacttcctcagatcgggttgacaaacattctcaacctcgaggccgacttcagcggggtaacaggacagctcaataagaccatatccaaagtctcacacaaggccatggtagatatgtcagagaaaggcacggaagccggcgctgcatccggactcttaagccagccaccaagcctgaacactatgtcggatccccacgcacattttaataggccattccttttactgctgtgggaagtcaccacccaatctcttttgttcttaggcaaagttgttaatccagtcgccgggtag

SEQ ID NO: 36546 - DNA, 1269 bp, Artificial Sequence
  derived and/or modified sequence
atgggccccgcctggctgtggctgctgggcaccggcatcctggccagcgtgcactgccagcccctgctggcccacggcgacaagagcctgcagggcccccagccccccagacaccagctgagcgagcccgcccccgcctaccacagaatcacccccaccatcaccaacttcgccctgagactgtacaaggagctggccgccgacgcccccggcaacatcttcttcagccccgtgagcatcagcaccaccctggccctgctgagcctgggcgcccaggccaacaccagcgccctgatcctggagggcctgggcttcaacctgaccgagacccccgaggccgacatccaccagggcttcagaagcctgctgcacaccctggccctgcccagccccaagctggagctgaaggtgggcaacagcctgttcctggacaagagactgaagcccagacagcactacctggacagcatcaaggagctgtacggcgccttcgccttcagcgccaacttcaccgacagcgtgaccaccggcagacagatcaacgactacctgagaagacagacctacggccaggtggtggactgcctgcccgagttcagccaggacaccttcatggtgctggccaactacatcttcttcaaggccaagtggaagcaccccttcagcagataccagacccagaagcaggagagcttcttcgtggacgagagaaccagcctgcaggtgcccatgatgcaccagaaggagatgcacagattcctgtacgaccaggacctggcctgcaccgtgctgcagatcgagtacagaggcaacgccctggccctgctggtgctgcccgaccccggcaagatgaagcaggtggaggccgccctgcagccccagaccctgagaaagtggggccagctgctgctgcccagcctgctggacctgcacctgcccagattcagcatcagcggcacctacaacctggaggacatcctgccccagatcggcctgaccaacatcctgaacctggaggccgacttcagcggcgtgaccggccagctgaacaagaccatcagcaaggtgagccacaaggccatggtggacatgagcgagaagggcaccgaggccggcgccgccagcggcctgctgagccagccccccagcctgaacaccatgagcgacccccacgcccacttcaacagacccttcctgctgctgctgtgggaggtgaccacccagagcctgctgttcctgggcaaggtggtgaaccccgtggccggctag

SEQ ID NO: 36547 - DNA, 1476 bp, Artificial Sequence
  derived and/or modified sequence
ttcctgtgggtagaggtgatgcagtgctgaagacctgggcccctgctcagtgcctttgctctagaatgggtccagcttggctttggctactgggaacagggatcctggcctctgtccactgtcagccccttcttgcccatggagataaaagtctgcaggggcctcaaccccccaggcatcagctctcagagccagcccccgcctaccacagaatcacacccaccattaccaattttgctttgcgtttgtataaagagctggcagcagacgcccccggaaacatcttcttctcgccagtgagcatctccaccaccctggccctgctctctcttggggcccaagctaacacctcagctctgatcctggagggcctgggattcaacctcacagaaacccctgaagccgacatccaccagggcttccggagcctcctccacacccttgccctgcccagccccaaactcgaactaaaagtaggaaactccctgttcctagacaagcgactaaagcctcggcagcactatttggacagcatcaaggagctttatggagcttttgctttttctgccaacttcacagattctgttacaactgggaggcagattaatgactatttgagaaggcaaacatacgggcaagtcgtggactgcctcccggagttcagccaggacacgttcatggttcttgccaattacatcttcttcaaagccaagtggaagcaccctttcagtcgctaccagacccagaagcaggaaagtttctttgtggatgagaggacttctctccaggtccccatgatgcaccaaaaggaaatgcacagattcctctatgaccaggatttggcttgcaccgtcctccagatagaatacagaggaaatgccttggcgctgctggtcctccctgacccggggaaaatgaagcaggtggaggctgctctgcagccacagaccctgagaaaatggggccaattgctcctgcccagtctgttggatttgcacttgccaaggttttcaatttctggaacatataacctggaagacatacttccccaaattggtctcaccaacatactcaacttagaagctgacttctcaggagtcactgggcagctcaacaaaaccatctccaaggtgtcacacaaggcgatggtggacatgagtgagaaggggaccgaggccggggctgcttcaggcctcctctcccagcccccatctctgaacaccatgtcagacccacatgcccacttcaacaggcctttcctcttgctcctttgggaggtcaccacccagagcttactcttcctgggaaaagttgtcaacccagttgcagggtaaccatggtgggaggccaggagttatcttatctcatcctggaccaaacagataggccagaaccagcctgcatcctggggctgctatgtggttcagttaatcagtgtgccaagattctaataaagttgaccttgggttctgtgaa

SEQ ID NO: 36548 - DNA, 1269 bp, Artificial Sequence
  derived and/or modified sequence
atgggccccgcctggctgtggcttcttggaaccggaattttggcttccgtccattgccaacccttactcgcccacggcgataaatccttgcaaggcccacagcccccgcgccaccaactgagcgaacccgcacctgcctatcatagaataacgccaacaatcacaaatttcgctcttcggctgtataaagaacttgccgccgacgccccagggaacatcttcttctctcccgtgagcatatctacaacactggccctgttaagcctgggcgcacaagcgaacacttccgccctcatccttgagggactcggatttaatctgaccgagactccggaagcagatattcatcaaggattcaggagcctgcttcatactctcgctctcccttcgcctaagctagagcttaaagttggtaattccctgttcctcgataaaaggctgaagccacgtcagcactacctggacagcatcaaagagctctatggtgcttttgctttctccgcaaattttacggattcagtaacgaccggcagacagattaacgactatcttcgcaggcagacgtatggacaggtggtcgactgtcttcccgagtttagccaagacacgtttatggtgctcgctaattacattttcttcaaagctaagtggaaacatccttttagtaggtaccagacgcagaagcaggagtcattctttgtagatgagcgaacctcccttcaggtccctatgatgcatcagaaggagatgcacagattcctctacgaccaggacctggcctgcacggtgctgcaaatagaataccggggcaatgccctggctctccttgttctgccagatcctggaaaaatgaagcaggtagaggcagctctgcaacctcaaaccctaaggaagtggggccaactgctcctcccgtctctgctcgatctacacctgccgaggttctccatctcaggtacctataatctggaagacattctccctcagatcgggctcactaacatcctgaaccttgaagccgacttttcgggggtgacaggacaactgaacaaaacaatttcaaaggtgagccataaggccatggtcgacatgtctgagaagggcacagaggcgggggcggcctcagggcttttgtctcaaccccccagcttgaatactatgtctgaccctcatgctcacttcaaccgcccattcctgctgttactgtgggaggtcaccacacagagtttgctatttctgggcaaggtcgtgaatccagtggctggatag

SEQ ID NO: 36549 - DNA, 1269 bp, Artificial Sequence
  derived and/or modified sequence
atgggccctgcctggctgtggctgctgggcaccggcatcctggcctctgtgcactgccagcccctgctggcccatggagacaagagcctgcagggcccccagcccccaagacaccagctgtctgagcccgccccagcctaccaccgcatcacccccaccatcaccaactttgccctgcggctgtacaaggagctggccgcagatgcccctggcaacatcttcttcagccctgtgtccatcagcaccaccctggccctgctgagcctgggcgcccaggccaacaccagcgccctgatcctggagggcctgggcttcaacctgacagagaccccagaggccgacatccaccagggcttccgcagcctgctgcacaccctggccctgcccagccccaagctggagctgaaggtgggcaacagcctcttcctggacaagaggctgaagccccggcagcactacctggacagcatcaaggagctgtatggagcctttgccttcagcgccaacttcacagattctgtgaccaccggccggcagatcaatgactacctgcggcggcagacctacggccaggtggtggactgcctgcctgagttcagccaggacaccttcatggtgctggccaactacatcttcttcaaggccaagtggaagcaccccttcagccgctaccagacccagaagcaggagagcttctttgtggatgagaggaccagcctgcaggtgcccatgatgcaccagaaggagatgcaccgcttcctgtatgaccaggacctggcctgcaccgtgctgcagatcgagtacagaggaaatgccctggccctgctggtgctgcctgaccccgggaagatgaagcaggtggaggccgccctgcagccccagaccctgaggaagtggggccagctgctgctgcccagcctgctggacctgcacctgccccgcttcagcatcagcggcacctacaacctggaggacatcctgccccagatcggcctgaccaacatcctgaacctggaggccgacttctctggagtgacaggccagctgaacaagaccatcagcaaggtgagccacaaggccatggtggacatgtctgagaagggcacagaagctggagctgccagcggcctgctgagccagccccccagcctgaacaccatgtctgacccccacgcccacttcaaccggcccttcctgctgctgctgtgggaggtgaccacccagagcctgctcttcctgggcaaggtggtgaaccctgtggccggctag

SEQ ID NO: 36550 - DNA, 1269 bp, Artificial Sequence
  derived and/or modified sequence
atgggccccgcctggctgtggctgctgggcaccggcatcctggcctccgtgcactgtcagccacttttagcccatggagataagtcacttcagggcccacagccaccccggcatcaattatcggaacctgcccctgcttaccacagaatcaccccaactatcactaacttcgctctgagactgtataaggagctcgctgccgacgcccctggaaacattttcttttctccagtgtccatttcgactaccttagcgctgctttctcttggggcacaggctaacacttcagctctgattctggagggccttggtttcaatttgaccgaaacacctgaagcagatatccatcagggcttccggagccttctacacaccttggctctgccgagtcctaaacttgaactaaaggtcggcaactcactgttccttgataagcgtctcaagccgcgacaacactacctagactcaatcaaggaactctacggagcttttgccttcagcgccaatttcacagattctgtgaccaccggccgacaaataaacgattatcttagacgccagacctatggacaggtggttgattgtctccccgagtttagccaagacacattcatggttctagcaaattatattttttttaaggcaaagtggaaacaccccttttcacggtaccagacacagaaacaggaatctttcttcgtggatgaacgcacaagcctgcaggtgcctatgatgcaccagaaagaaatgcaccgatttttgtacgaccaggacctcgcatgcaccgtactccagatagaatatagggggaatgcacttgccctcttagtactccccgatccagggaagatgaagcaggttgaagccgcactgcagccacagacactgcgaaaatggggccaattactactgcctagtttgctcgacctgcatttgcccaggttctcaatctccggtacctataacctggaggatatcctgccacagattgggctgactaacatcttgaatctggaggcggatttctcgggtgtgaccggccagctgaataagacaatcagcaaagttagccacaaggctatggtggatatgagcgagaaggggaccgaggccggagcagcttccggattgctgagccaacccccatcccttaacaccatgtccgaccctcacgcccattttaatcgacccttcctgcttctgctgtgggaggtaacaacgcagagtttactgttcctcggaaaagttgtgaatccagtggcgggttag

SEQ ID NO: 36551 - RNA, 1269 nt, Artificial Sequence
  derived and/or modified sequence
auggggcccgccugguugugguuacugggaacugggauccuugccagcguacacugucagccacuucuggcucacggagauaaaucauuacaagggccacaacccccuaggcaccagcucucugaaccagcccccgccuaccauaggauaacacccacaauuacaaauuuugccuuacgccucuauaaagaacucgcagcugacgcacccgguaauauauucuucagcccuguaaguaucucaacuacucuugcauuguuaagucuuggggcccaggcgaauaccuccgcgcucauccuggaaggacucggcuuuaaccuuaccgaaacccccgaagcggauauccaccagggcuuccgaucucugcuacacacucucgcccuuccuucccccaagcuugaguugaaaguggguaacagccuguuccuagauaagcgucugaaaccacggcaacauuacuuggauucaaucaaagagcuguauggugccuuugcauucagugccaauuucacggauuccgucacuacggggcgccagauuaacgacuaccugagacgccagacauauggccagguaguugauugcuugcccgaguuuucccaggacaccuucauggugcuggcuaauuacaucuucuucaaagcgaaguggaaacauccuuuuucuagguaucaaacccaaaagcaggaaagcuucuuuguggacgagcgcacaucucugcaggugccuaugaugcaucaaaaggaaaugcacagguuucuguacgaccaagaccuagccuguaccgugcugcagaucgaguauagagggaacgcccuggcacuccuggugcucccugaccccgggaaaaugaaacagguggaagcugcccugcaaccucaaacccucaggaaauggggacaacucuugcugccgucacuccuugaucuucacuuaccucgguuuucaaucucagggaccuauaaccuggaggacauucugccacagaucgggcugacuaauauucuaaaccucgaagcugauuuuucuggagucaccggccagcucaacaagaccauuagcaaaguaagccacaaagccaugguugauaugagugaaaagggcaccgaggcaggggcugcauccggauugcuaucccaaccuccaagccugaauaccaugagugauccacacgcucacuucaacaggccuuuucuccuucuucucugggagguuaccacccaaagccuccuuuuccugggcaagguugugaauccgguggcuggguag

SEQ ID NO: 36552 - RNA, 1269 nt, Artificial Sequence
  derived and/or modified sequence
auggggccugcguggcuauggcugcugggcacagguauauuagccucugugcauugccaaccgcugcucgcacacggggacaaaaguuuacaaggaccacagcccccucgucaccagcuuuccgaaccggcacccgccuaccacagaaucacaccaacaaucacgaacuucgcucuccgacuguauaaagaacuggcagcggaugccccugggaauaucuuuuucuccccuguuucuauuucgacuacuuuggcccuguuaagucugggagcacaggccaacacuagcgcuuugauccucgagggccucggcuucaaccugaccgagaccccugaggccgauauccaucagggguucagaucacucuuacacacacuggcacugccaucucccaaauuggaauuaaaagucgguaacucucucuuucuggacaaacggcucaaaccacggcagcauuaccucgauuccauuaaagaauuauacggagccuuugcauuuucugcuaauuuuacggauuccguaacuacuggacgccaaaucaacgacuaccuucggagacagacauaugggcaagugguugacugucuuccugaguucucccaggauacauuuaugguccucgcuaauuacaucuuuuuuaaagccaaguggaagcauccuuucucccguuaucagacacagaaacaggagucuuucuuuguugaugaaaggacuucucugcagguuccaaugaugcaccaaaaagaaaugcauagauuucucuaugaccaagacuuggcgugcacaguucuucagaucgaguacaggggaaacgcccuggcacuucucgucuuacccgauccuggaaagaugaagcagguggaggccgcuuugcaaccccagacacugaggaaauggggacagcuucuucuucccucacugcucgauuuacaucugccccgauucucuauuaguggcaccuauaacuuagaagacauacuuccucagaucggguugacaaacauucucaaccucgaggccgacuucagcgggguaacaggacagcucaauaagaccauauccaaagucucacacaaggccaugguagauaugucagagaaaggcacggaagccggcgcugcauccggacucuuaagccagccaccaagccugaacacuaugucggauccccacgcacauuuuaauaggccauuccuuuuacugcugugggaagucaccacccaaucucuuuuguucuuaggcaaaguuguuaauccagucgccggguag

SEQ ID NO: 36553 - protein, 2394 aa, Artificial Sequence
  derived and/or modified sequence
MWLSGKSQVQKRGAVRYLQAPPVNGEASACPAPPTHLDRTTCARRRPARLPPPWGAAGIRPAPRASRASFWARFPPHCFPSGCSGSRVLEGGEIGFRFRGGRVAAAALRSRWARGDAAAAGSREGRGRMNRAKPTTVRRPSAAAKPSGHPPPGDFIALGSKGQANESKTASTLLKPAPSGLPSERKRDAAAALSSASALTGLTKRPKLSSTPPLSALGRLAEAAVAEKRAISPSIKEPSVVPIEVLPTVLLDEIEAAELEGNDDRIEGVLCGAVKQLKVTRAKPDSTLYLSLMYLAKIKPNIFATEGVIEALCSLLRRDASINFKAKGNSLVSVLACNLLMAAYEEDENWPEIFVKVYIEDSLGERIWVDSPHCKTFVDNIQTAFNTRMPPRSVLLQGEAGRVAGDLGAGSSPHPSLTEEEDSQTELLIAEEKLSPEQEGQLMPRYEELAESVEEYVLDMLRDQLNRRQPIDNVSRNLLRLLTSTCGYKEVRLLAVQKLEMWLQNPKLTRPAQDLLMSVCMNCNTHGSEDMDVISHLIKIRLKPKVLLNHFMLCIRELLSAHKDNLGTTIKLVIFNELSSARNPNNMQVLYTALQHSSELAPKFLAMVFQDLLTNKDDYLRASRALLREIIKQTKHEINFQAFCLGLMQERKEPQYLEMEFKERFVVHITDVLAVSMMLGITAQVKEAGIAWDKGEKRNLEVLRSFQNQIAAIQRDAVWWLHTVVPSISKLAPKDYVHCLHKVLFTEQPETYYKWDNWPPESDRNFFLRLCSEVPILEDTLMRILVIGLSRELPLGPADAMELADHLVKRAAAVQADDVEVLKVGRTQLIDAVLNLCTYHHPENIQLPPGYQPPNLAISTLYWKAWPLLLVVAAFNPENIGLAAWEEYPTLKMLMEMVMTNNYSYPPCTLTDEETRTEMLNRELQTAQREKQEILAFEGHLAAASTKQTITESSSLLLSQLTSLDPQYAAHTAPPCACRRDLGPPRRPPPHILDQVKSLNQSLRLGHLLCRSRNPDFLLHIIQRQASSQSMPWLADLVQSSEGSLDVLPVQCLCEFLLHDAVDDAASGEEDDEGESKEQKAKKRQRQQKQRQLLGRLQDLLLGPKADEQTTCEVLDYFLRRLGSSQVASRVLAMKGETLPALPKAGPAHECLPQGLSLVLSEGSLRDGEEKEPPMEEDVGDTDVLQGYQWLLRDLPRLPLFDSVRSTTALALQQAIHMETDPQTISAYLIYLSQHTPVEEQAQHSDLALDVARLVVERSTIMSHLFSKLSPSAASDAVLSALLSIFSRYVRRMRQSKEGEEVYSWSESQDQVFLRWSSGETATMHILVVHAMVILLTLGPPRADDSEFQALLDIWFPEEKPLPTAFLVDTSEEALLLPDWLKLRMIRSEVLRLVDAALQDLEPQQLLLFVQSFGIPVSSMSKLLQFLDQAVAHDPQTLEQNIMDKSKMPGTCGVGSHTLTEPQPGQAFGAWVRAGVTLLRFADYMAHLVEVQHERGASGGQTFHSLLTASLPPRRDSTEAPKPKSSPEQPIGQGRIRVGTQLRVLGPEDDLAGMFLQIFPLSPDPRWQSSSPRPVALALQQALGQELARVVQGSPEVPGITVRVLQALATLLSSPHGGALVMSMHRSHFLACPLLRQLCQYQRCVPQDTGFSSLFLKVLLQMLQWLDSPGVEGGPLRAQLRMLASQASAGRRLSDVRGGLLRLAEALAFRQDLEVVSSTVRAVIATLRSGEQCSVEPDLISKVLQGLIEVRSPHLEELLTAFFSATADAASPFPACKPVVVVSSLLLQEEEPLAGGKPGADGGSLEAVRLGPSSGLLVDWLEMLDPEVVSSCPDLQLRLLFSRRKGKGQAQVPSFRPYLLTLFTHQSSWPTLHQCIRVLLGKSREQRFDPSASLDFLWACIHVPRIWQGRDQRTPQAGLGRKRREELVLRVQGPELISLVELILAEAETRSQDGDTAACSLIQARLPLLLSCCCGDDESVRKVTEHLSGCIQQWGDSVLGRRCRDLLLQLYLQRPELRVPVPEVLLHSEGAASSSVCKLDGLIHRFITLLADTSDSRALENRGADASMACRKLAVAHPLLLLRHLPMIAALLHGRTHLNFQEFRQQNHLSCFLHVLGLLELLQPHVFRSEHQGALWDCLLSFIRLLLNYRKSSRHLAAFINKFVQFIHKYITYNAPAAISFLQKHADPLHDLSFDNSDLVMLKSLLAGLSLPSRDDRTDRGLDEEGEEESSAGSLPLVSVSLFTPLTAAEMAPYMKRLSRGQTVEDLLEVLSDIDEMSRRRPEILSFFSTNLQRLMSSAEECCRNLAFSLALRSMQNSPSIAAAFLPTFMYCLGSQDFEVVQTALRNLPEYALLCQEHAAVLLHRAFLVGMYGQMDPSAQISEALRILHMEAVM

SEQ ID NO: 36554 - protein, 2190 aa, Artificial Sequence
  derived and/or modified sequence
MNRAKPTTVRRPSAAAKPSGHPPPGDFIALGSKGQANESKTASTLLKPAPSGLPSERKRDAAAALSSASALTGLTKRPKLSSTPPLSALGRLAEAAVAEKRAISPSIKEPSVVPIEVLPTVLLDEIEAAELEGNDDRIEGVLCGAVKQLKVTRAKPDSTLYLSLMYLAKIKPNIFATEGVIEALCSLLRRDASINFKAKGNSLVSVLACNLLMAAYEEDENWPEIFVKVYIEDSLGERIWVDSPHCKTFVDNIQTAFNTRMPPRSVLLQGEAGRVAGDLGAGSSPHPSLTEEEDSQTELLIAEEKLSPEQEGQLMPRYEELAESVEEYVLDMLRDQLNRRQPIDNVSRNLLRLLTSTCGYKEVRLLAVQKLEMWLQNPKLTRPAQDLLMSVCMNCNTHGSEDMDVISHLIKIRLKPKVLLNHFMLCIRELLSAHKDNLGTTIKLVIFNELSSARNPNNMQVLYTALQHSSELAPKFLAMVFQDLLTNKDDYLRASRALLREIIKQTKHEINFQAFCLGLMQERKEPQYLEMEFKERFVVHITDVLAVSMMLGITAQVKEAGIAWDKGEKRNLEVLRSFQNQIAAIQRDAVWWLHTVVPSISKLAPKDYVHCLHKVLFTEQPETYYKWDNWPPESDRNFFLRLCSEVPILEDTLMRILVIGLSRELPLGPADAMELADHLVKRAAAVQADDVEVLKVGRTQLIDAVLNLCTYHHPENIQLPPGYQPPNLAISTLYWKAWPLLLVVAAFNPENIGLAAWEEYPTLKMLMEMVMTNNYSYPPCTLTDEETRTEMLNRELQTAQREKQEILAFEGHLAAASTKQTITESSSLLLSQLTSLDPQGPPRRPPPHILDQVKSLNQSLRLGHLLCRSRNPDFLLHIIQRQASSQSMPWLADLVQSSEGSLDVLPVQCLCEFLLHDAVDDAASGEEDDEGESKEQKAKKRQRQQKQRQLLGRLQDLLLGPKADEQTTCEVLDYFLRRLGSSQVASRVLAMKGLSLVLSEGSLRDGEEKEPPMEEDVGDTDVLQGYQWLLRDLPRLPLFDSVRSTTALALQQAIHMETDPQTISAYLIYLSQHTPVEEQAQHSDLALDVARLVVERSTIMSHLFSKLSPSAASDAVLSALLSIFSRYVRRMRQSKEGEEVYSWSESQDQVFLRWSSGETATMHILVVHAMVILLTLGPPRADDSEFQALLDIWFPEEKPLPTAFLVDTSEEALLLPDWLKLRMIRSEVLRLVDAALQDLEPQQLLLFVQSFGIPVSSMSKLLQFLDQAVAHDPQTLEQNIMDKNYMAHLVEVQHERGASGGQTFHSLLTASLPPRRDSTEAPKPKSSPEQPIGQGRIRVGTQLRVLGPEDDLAGMFLQIFPLSPDPRWQSSSPRPVALALQQALGQELARVVQGSPEVPGITVRVLQALATLLSSPHGGALVMSMHRSHFLACPLLRQLCQYQRCVPQDTGFSSLFLKVLLQMLQWLDSPGVEGGPLRAQLRMLASQASAGRRLSDVRGGLLRLAEALAFRQDLEVVSSTVRAVIATLRSGEQCSVEPDLISKVLQGLIEVRSPHLEELLTAFFSATADAASPFPACKPVVVVSSLLLQEEEPLAGGKPGADGGSLEAVRLGPSSGLLVDWLEMLDPEVVSSCPDLQLRLLFSRRKGKGQAQVPSFRPYLLTLFTHQSSWPTLHQCIRVLLGKSREQRFDPSASLDFLWACIHVPRIWQGRDQRTPQKRREELVLRVQGPELISLVELILAEAETRSQDGDTAACSLIQARLPLLLSCCCGDDESVRKVTEHLSGCIQQWGDSVLGRRCRDLLLQLYLQRPELRVPVPEVLLHSEGAASSSVCKLDGLIHRFITLLADTSDSRALENRGADASMACRKLAVAHPLLLLRHLPMIAALLHGRTHLNFQEFRQQNHLSCFLHVLGLLELLQPHVFRSEHQGALWDCLLSFIRLLLNYRKSSRHLAAFINKFVQFIHKYITYNAPAAISFLQKHADPLHDLSFDNSDLVMLKSLLAGLSLPSRDDRTDRGLDEEGEEESSAGSLPLVSVSLFTPLTAAEMAPYMKRLSRGQTVEDLLEVLSDIDEMSRRRPEILSFFSTNLQRLMSSAEECCRNLAFSLALRSMQNSPSIAAAFLPTFMYCLGSQDFEVVQTALRNLPEYALLCQEHAAVLLHRAFLVGMYGQMDPSAQISEALRILHMEAVM

SEQ ID NO: 36555 - DNA, 7185 bp, Artificial Sequence
  derived and/or modified sequence
atgtggctgagcggcaagagccaggtgcagaagagaggcgccgtgagatacctgcaggccccccccgtgaacggcgaggccagcgcctgccccgccccccccacccacctggacagaaccacctgcgccagaagaagacccgccagactgccccccccctggggcgccgccggcatcagacccgcccccagagccagcagagccagcttctgggccagattccccccccactgcttccccagcggctgcagcggcagcagagtgctggagggcggcgagatcggcttcagattcagaggcggcagagtggccgccgccgccctgagaagcagatgggccagaggcgacgccgccgccgccggcagcagagagggcagaggcagaatgaacagagccaagcccaccaccgtgagaagacccagcgccgccgccaagcccagcggccaccccccccccggcgacttcatcgccctgggcagcaagggccaggccaacgagagcaagaccgccagcaccctgctgaagcccgcccccagcggcctgcccagcgagagaaagagagacgccgccgccgccctgagcagcgccagcgccctgaccggcctgaccaagagacccaagctgagcagcaccccccccctgagcgccctgggcagactggccgaggccgccgtggccgagaagagagccatcagccccagcatcaaggagcccagcgtggtgcccatcgaggtgctgcccaccgtgctgctggacgagatcgaggccgccgagctggagggcaacgacgacagaatcgagggcgtgctgtgcggcgccgtgaagcagctgaaggtgaccagagccaagcccgacagcaccctgtacctgagcctgatgtacctggccaagatcaagcccaacatcttcgccaccgagggcgtgatcgaggccctgtgcagcctgctgagaagagacgccagcatcaacttcaaggccaagggcaacagcctggtgagcgtgctggcctgcaacctgctgatggccgcctacgaggaggacgagaactggcccgagatcttcgtgaaggtgtacatcgaggacagcctgggcgagagaatctgggtggacagcccccactgcaagaccttcgtggacaacatccagaccgccttcaacaccagaatgccccccagaagcgtgctgctgcagggcgaggccggcagagtggccggcgacctgggcgccggcagcagcccccaccccagcctgaccgaggaggaggacagccagaccgagctgctgatcgccgaggagaagctgagccccgagcaggagggccagctgatgcccagatacgaggagctggccgagagcgtggaggagtacgtgctggacatgctgagagaccagctgaacagaagacagcccatcgacaacgtgagcagaaacctgctgagactgctgaccagcacctgcggctacaaggaggtgagactgctggccgtgcagaagctggagatgtggctgcagaaccccaagctgaccagacccgcccaggacctgctgatgagcgtgtgcatgaactgcaacacccacggcagcgaggacatggacgtgatcagccacctgatcaagatcagactgaagcccaaggtgctgctgaaccacttcatgctgtgcatcagagagctgctgagcgcccacaaggacaacctgggcaccaccatcaagctggtgatcttcaacgagctgagcagcgccagaaaccccaacaacatgcaggtgctgtacaccgccctgcagcacagcagcgagctggcccccaagttcctggccatggtgttccaggacctgctgaccaacaaggacgactacctgagagccagcagagccctgctgagagagatcatcaagcagaccaagcacgagatcaacttccaggccttctgcctgggcctgatgcaggagagaaaggagccccagtacctggagatggagttcaaggagagattcgtggtgcacatcaccgacgtgctggccgtgagcatgatgctgggcatcaccgcccaggtgaaggaggccggcatcgcctgggacaagggcgagaagagaaacctggaggtgctgagaagcttccagaaccagatcgccgccatccagagagacgccgtgtggtggctgcacaccgtggtgcccagcatcagcaagctggcccccaaggactacgtgcactgcctgcacaaggtgctgttcaccgagcagcccgagacctactacaagtgggacaactggccccccgagagcgacagaaacttcttcctgagactgtgcagcgaggtgcccatcctggaggacaccctgatgagaatcctggtgatcggcctgagcagagagctgcccctgggccccgccgacgccatggagctggccgaccacctggtgaagagagccgccgccgtgcaggccgacgacgtggaggtgctgaaggtgggcagaacccagctgatcgacgccgtgctgaacctgtgcacctaccaccaccccgagaacatccagctgccccccggctaccagccccccaacctggccatcagcaccctgtactggaaggcctggcccctgctgctggtggtggccgccttcaaccccgagaacatcggcctggccgcctgggaggagtaccccaccctgaagatgctgatggagatggtgatgaccaacaactacagctaccccccctgcaccctgaccgacgaggagaccagaaccgagatgctgaacagagagctgcagaccgcccagagagagaagcaggagatcctggccttcgagggccacctggccgccgccagcaccaagcagaccatcaccgagagcagcagcctgctgctgagccagctgaccagcctggacccccagtacgccgcccacaccgcccccccctgcgcctgcagaagagacctgggcccccccagaagaccccccccccacatcctggaccaggtgaagagcctgaaccagagcctgagactgggccacctgctgtgcagaagcagaaaccccgacttcctgctgcacatcatccagagacaggccagcagccagagcatgccctggctggccgacctggtgcagagcagcgagggcagcctggacgtgctgcccgtgcagtgcctgtgcgagttcctgctgcacgacgccgtggacgacgccgccagcggcgaggaggacgacgagggcgagagcaaggagcagaaggccaagaagagacagagacagcagaagcagagacagctgctgggcagactgcaggacctgctgctgggccccaaggccgacgagcagaccacctgcgaggtgctggactacttcctgagaagactgggcagcagccaggtggccagcagagtgctggccatgaagggcgagaccctgcccgccctgcccaaggccggccccgcccacgagtgcctgccccagggcctgagcctggtgctgagcgagggcagcctgagagacggcgaggagaaggagccccccatggaggaggacgtgggcgacaccgacgtgctgcagggctaccagtggctgctgagagacctgcccagactgcccctgttcgacagcgtgagaagcaccaccgccctggccctgcagcaggccatccacatggagaccgacccccagaccatcagcgcctacctgatctacctgagccagcacacccccgtggaggagcaggcccagcacagcgacctggccctggacgtggccagactggtggtggagagaagcaccatcatgagccacctgttcagcaagctgagccccagcgccgccagcgacgccgtgctgagcgccctgctgagcatcttcagcagatacgtgagaagaatgagacagagcaaggagggcgaggaggtgtacagctggagcgagagccaggaccaggtgttcctgagatggagcagcggcgagaccgccaccatgcacatcctggtggtgcacgccatggtgatcctgctgaccctgggcccccccagagccgacgacagcgagttccaggccctgctggacatctggttccccgaggagaagcccctgcccaccgccttcctggtggacaccagcgaggaggccctgctgctgcccgactggctgaagctgagaatgatcagaagcgaggtgctgagactggtggacgccgccctgcaggacctggagccccagcagctgctgctgttcgtgcagagcttcggcatccccgtgagcagcatgagcaagctgctgcagttcctggaccaggccgtggcccacgacccccagaccctggagcagaacatcatggacaagagcaagatgcccggcacctgcggcgtgggcagccacaccctgaccgagccccagcccggccaggccttcggcgcctgggtgagagccggcgtgaccctgctgagattcgccgactacatggcccacctggtggaggtgcagcacgagagaggcgccagcggcggccagaccttccacagcctgctgaccgccagcctgccccccagaagagacagcaccgaggcccccaagcccaagagcagccccgagcagcccatcggccagggcagaatcagagtgggcacccagctgagagtgctgggccccgaggacgacctggccggcatgttcctgcagatcttccccctgagccccgaccccagatggcagagcagcagccccagacccgtggccctggccctgcagcaggccctgggccaggagctggccagagtggtgcagggcagccccgaggtgcccggcatcaccgtgagagtgctgcaggccctggccaccctgctgagcagcccccacggcggcgccctggtgatgagcatgcacagaagccacttcctggcctgccccctgctgagacagctgtgccagtaccagagatgcgtgccccaggacaccggcttcagcagcctgttcctgaaggtgctgctgcagatgctgcagtggctggacagccccggcgtggagggcggccccctgagagcccagctgagaatgctggccagccaggccagcgccggcagaagactgagcgacgtgagaggcggcctgctgagactggccgaggccctggccttcagacaggacctggaggtggtgagcagcaccgtgagagccgtgatcgccaccctgagaagcggcgagcagtgcagcgtggagcccgacctgatcagcaaggtgctgcagggcctgatcgaggtgagaagcccccacctggaggagctgctgaccgccttcttcagcgccaccgccgacgccgccagccccttccccgcctgcaagcccgtggtggtggtgagcagcctgctgctgcaggaggaggagcccctggccggcggcaagcccggcgccgacggcggcagcctggaggccgtgagactgggccccagcagcggcctgctggtggactggctggagatgctggaccccgaggtggtgagcagctgccccgacctgcagctgagactgctgttcagcagaagaaagggcaagggccaggcccaggtgcccagcttcagaccctacctgctgaccctgttcacccaccagagcagctggcccaccctgcaccagtgcatcagagtgctgctgggcaagagcagagagcagagattcgaccccagcgccagcctggacttcctgtgggcctgcatccacgtgcccagaatctggcagggcagagaccagagaaccccccaggccggcctgggcagaaagagaagagaggagctggtgctgagagtgcagggccccgagctgatcagcctggtggagctgatcctggccgaggccgagaccagaagccaggacggcgacaccgccgcctgcagcctgatccaggccagactgcccctgctgctgagctgctgctgcggcgacgacgagagcgtgagaaaggtgaccgagcacctgagcggctgcatccagcagtggggcgacagcgtgctgggcagaagatgcagagacctgctgctgcagctgtacctgcagagacccgagctgagagtgcccgtgcccgaggtgctgctgcacagcgagggcgccgccagcagcagcgtgtgcaagctggacggcctgatccacagattcatcaccctgctggccgacaccagcgacagcagagccctggagaacagaggcgccgacgccagcatggcctgcagaaagctggccgtggcccaccccctgctgctgctgagacacctgcccatgatcgccgccctgctgcacggcagaacccacctgaacttccaggagttcagacagcagaaccacctgagctgcttcctgcacgtgctgggcctgctggagctgctgcagccccacgtgttcagaagcgagcaccagggcgccctgtgggactgcctgctgagcttcatcagactgctgctgaactacagaaagagcagcagacacctggccgccttcatcaacaagttcgtgcagttcatccacaagtacatcacctacaacgcccccgccgccatcagcttcctgcagaagcacgccgaccccctgcacgacctgagcttcgacaacagcgacctggtgatgctgaagagcctgctggccggcctgagcctgcccagcagagacgacagaaccgacagaggcctggacgaggagggcgaggaggagagcagcgccggcagcctgcccctggtgagcgtgagcctgttcacccccctgaccgccgccgagatggccccctacatgaagagactgagcagaggccagaccgtggaggacctgctggaggtgctgagcgacatcgacgagatgagcagaagaagacccgagatcctgagcttcttcagcaccaacctgcagagactgatgagcagcgccgaggagtgctgcagaaacctggccttcagcctggccctgagaagcatgcagaacagccccagcatcgccgccgccttcctgcccaccttcatgtactgcctgggcagccaggacttcgaggtggtgcagaccgccctgagaaacctgcccgagtacgccctgctgtgccaggagcacgccgccgtgctgctgcacagagccttcctggtgggcatgtacggccagatggaccccagcgcccagatcagcgaggccctgagaatcctgcacatggaggccgtgatgtag

SEQ ID NO: 36556 - DNA, 6573 bp, Artificial Sequence
  derived and/or modified sequence
atgaacagagccaagcccaccaccgtgagaagacccagcgccgccgccaagcccagcggccaccccccccccggcgacttcatcgccctgggcagcaagggccaggccaacgagagcaagaccgccagcaccctgctgaagcccgcccccagcggcctgcccagcgagagaaagagagacgccgccgccgccctgagcagcgccagcgccctgaccggcctgaccaagagacccaagctgagcagcaccccccccctgagcgccctgggcagactggccgaggccgccgtggccgagaagagagccatcagccccagcatcaaggagcccagcgtggtgcccatcgaggtgctgcccaccgtgctgctggacgagatcgaggccgccgagctggagggcaacgacgacagaatcgagggcgtgctgtgcggcgccgtgaagcagctgaaggtgaccagagccaagcccgacagcaccctgtacctgagcctgatgtacctggccaagatcaagcccaacatcttcgccaccgagggcgtgatcgaggccctgtgcagcctgctgagaagagacgccagcatcaacttcaaggccaagggcaacagcctggtgagcgtgctggcctgcaacctgctgatggccgcctacgaggaggacgagaactggcccgagatcttcgtgaaggtgtacatcgaggacagcctgggcgagagaatctgggtggacagcccccactgcaagaccttcgtggacaacatccagaccgccttcaacaccagaatgccccccagaagcgtgctgctgcagggcgaggccggcagagtggccggcgacctgggcgccggcagcagcccccaccccagcctgaccgaggaggaggacagccagaccgagctgctgatcgccgaggagaagctgagccccgagcaggagggccagctgatgcccagatacgaggagctggccgagagcgtggaggagtacgtgctggacatgctgagagaccagctgaacagaagacagcccatcgacaacgtgagcagaaacctgctgagactgctgaccagcacctgcggctacaaggaggtgagactgctggccgtgcagaagctggagatgtggctgcagaaccccaagctgaccagacccgcccaggacctgctgatgagcgtgtgcatgaactgcaacacccacggcagcgaggacatggacgtgatcagccacctgatcaagatcagactgaagcccaaggtgctgctgaaccacttcatgctgtgcatcagagagctgctgagcgcccacaaggacaacctgggcaccaccatcaagctggtgatcttcaacgagctgagcagcgccagaaaccccaacaacatgcaggtgctgtacaccgccctgcagcacagcagcgagctggcccccaagttcctggccatggtgttccaggacctgctgaccaacaaggacgactacctgagagccagcagagccctgctgagagagatcatcaagcagaccaagcacgagatcaacttccaggccttctgcctgggcctgatgcaggagagaaaggagccccagtacctggagatggagttcaaggagagattcgtggtgcacatcaccgacgtgctggccgtgagcatgatgctgggcatcaccgcccaggtgaaggaggccggcatcgcctgggacaagggcgagaagagaaacctggaggtgctgagaagcttccagaaccagatcgccgccatccagagagacgccgtgtggtggctgcacaccgtggtgcccagcatcagcaagctggcccccaaggactacgtgcactgcctgcacaaggtgctgttcaccgagcagcccgagacctactacaagtgggacaactggccccccgagagcgacagaaacttcttcctgagactgtgcagcgaggtgcccatcctggaggacaccctgatgagaatcctggtgatcggcctgagcagagagctgcccctgggccccgccgacgccatggagctggccgaccacctggtgaagagagccgccgccgtgcaggccgacgacgtggaggtgctgaaggtgggcagaacccagctgatcgacgccgtgctgaacctgtgcacctaccaccaccccgagaacatccagctgccccccggctaccagccccccaacctggccatcagcaccctgtactggaaggcctggcccctgctgctggtggtggccgccttcaaccccgagaacatcggcctggccgcctgggaggagtaccccaccctgaagatgctgatggagatggtgatgaccaacaactacagctaccccccctgcaccctgaccgacgaggagaccagaaccgagatgctgaacagagagctgcagaccgcccagagagagaagcaggagatcctggccttcgagggccacctggccgccgccagcaccaagcagaccatcaccgagagcagcagcctgctgctgagccagctgaccagcctggacccccagggcccccccagaagaccccccccccacatcctggaccaggtgaagagcctgaaccagagcctgagactgggccacctgctgtgcagaagcagaaaccccgacttcctgctgcacatcatccagagacaggccagcagccagagcatgccctggctggccgacctggtgcagagcagcgagggcagcctggacgtgctgcccgtgcagtgcctgtgcgagttcctgctgcacgacgccgtggacgacgccgccagcggcgaggaggacgacgagggcgagagcaaggagcagaaggccaagaagagacagagacagcagaagcagagacagctgctgggcagactgcaggacctgctgctgggccccaaggccgacgagcagaccacctgcgaggtgctggactacttcctgagaagactgggcagcagccaggtggccagcagagtgctggccatgaagggcctgagcctggtgctgagcgagggcagcctgagagacggcgaggagaaggagccccccatggaggaggacgtgggcgacaccgacgtgctgcagggctaccagtggctgctgagagacctgcccagactgcccctgttcgacagcgtgagaagcaccaccgccctggccctgcagcaggccatccacatggagaccgacccccagaccatcagcgcctacctgatctacctgagccagcacacccccgtggaggagcaggcccagcacagcgacctggccctggacgtggccagactggtggtggagagaagcaccatcatgagccacctgttcagcaagctgagccccagcgccgccagcgacgccgtgctgagcgccctgctgagcatcttcagcagatacgtgagaagaatgagacagagcaaggagggcgaggaggtgtacagctggagcgagagccaggaccaggtgttcctgagatggagcagcggcgagaccgccaccatgcacatcctggtggtgcacgccatggtgatcctgctgaccctgggcccccccagagccgacgacagcgagttccaggccctgctggacatctggttccccgaggagaagcccctgcccaccgccttcctggtggacaccagcgaggaggccctgctgctgcccgactggctgaagctgagaatgatcagaagcgaggtgctgagactggtggacgccgccctgcaggacctggagccccagcagctgctgctgttcgtgcagagcttcggcatccccgtgagcagcatgagcaagctgctgcagttcctggaccaggccgtggcccacgacccccagaccctggagcagaacatcatggacaagaactacatggcccacctggtggaggtgcagcacgagagaggcgccagcggcggccagaccttccacagcctgctgaccgccagcctgccccccagaagagacagcaccgaggcccccaagcccaagagcagccccgagcagcccatcggccagggcagaatcagagtgggcacccagctgagagtgctgggccccgaggacgacctggccggcatgttcctgcagatcttccccctgagccccgaccccagatggcagagcagcagccccagacccgtggccctggccctgcagcaggccctgggccaggagctggccagagtggtgcagggcagccccgaggtgcccggcatcaccgtgagagtgctgcaggccctggccaccctgctgagcagcccccacggcggcgccctggtgatgagcatgcacagaagccacttcctggcctgccccctgctgagacagctgtgccagtaccagagatgcgtgccccaggacaccggcttcagcagcctgttcctgaaggtgctgctgcagatgctgcagtggctggacagccccggcgtggagggcggccccctgagagcccagctgagaatgctggccagccaggccagcgccggcagaagactgagcgacgtgagaggcggcctgctgagactggccgaggccctggccttcagacaggacctggaggtggtgagcagcaccgtgagagccgtgatcgccaccctgagaagcggcgagcagtgcagcgtggagcccgacctgatcagcaaggtgctgcagggcctgatcgaggtgagaagcccccacctggaggagctgctgaccgccttcttcagcgccaccgccgacgccgccagccccttccccgcctgcaagcccgtggtggtggtgagcagcctgctgctgcaggaggaggagcccctggccggcggcaagcccggcgccgacggcggcagcctggaggccgtgagactgggccccagcagcggcctgctggtggactggctggagatgctggaccccgaggtggtgagcagctgccccgacctgcagctgagactgctgttcagcagaagaaagggcaagggccaggcccaggtgcccagcttcagaccctacctgctgaccctgttcacccaccagagcagctggcccaccctgcaccagtgcatcagagtgctgctgggcaagagcagagagcagagattcgaccccagcgccagcctggacttcctgtgggcctgcatccacgtgcccagaatctggcagggcagagaccagagaaccccccagaagagaagagaggagctggtgctgagagtgcagggccccgagctgatcagcctggtggagctgatcctggccgaggccgagaccagaagccaggacggcgacaccgccgcctgcagcctgatccaggccagactgcccctgctgctgagctgctgctgcggcgacgacgagagcgtgagaaaggtgaccgagcacctgagcggctgcatccagcagtggggcgacagcgtgctgggcagaagatgcagagacctgctgctgcagctgtacctgcagagacccgagctgagagtgcccgtgcccgaggtgctgctgcacagcgagggcgccgccagcagcagcgtgtgcaagctggacggcctgatccacagattcatcaccctgctggccgacaccagcgacagcagagccctggagaacagaggcgccgacgccagcatggcctgcagaaagctggccgtggcccaccccctgctgctgctgagacacctgcccatgatcgccgccctgctgcacggcagaacccacctgaacttccaggagttcagacagcagaaccacctgagctgcttcctgcacgtgctgggcctgctggagctgctgcagccccacgtgttcagaagcgagcaccagggcgccctgtgggactgcctgctgagcttcatcagactgctgctgaactacagaaagagcagcagacacctggccgccttcatcaacaagttcgtgcagttcatccacaagtacatcacctacaacgcccccgccgccatcagcttcctgcagaagcacgccgaccccctgcacgacctgagcttcgacaacagcgacctggtgatgctgaagagcctgctggccggcctgagcctgcccagcagagacgacagaaccgacagaggcctggacgaggagggcgaggaggagagcagcgccggcagcctgcccctggtgagcgtgagcctgttcacccccctgaccgccgccgagatggccccctacatgaagagactgagcagaggccagaccgtggaggacctgctggaggtgctgagcgacatcgacgagatgagcagaagaagacccgagatcctgagcttcttcagcaccaacctgcagagactgatgagcagcgccgaggagtgctgcagaaacctggccttcagcctggccctgagaagcatgcagaacagccccagcatcgccgccgccttcctgcccaccttcatgtactgcctgggcagccaggacttcgaggtggtgcagaccgccctgagaaacctgcccgagtacgccctgctgtgccaggagcacgccgccgtgctgctgcacagagccttcctggtgggcatgtacggccagatggaccccagcgcccagatcagcgaggccctgagaatcctgcacatggaggccgtgatgtag

SEQ ID NO: 36557 - DNA, 7185 bp, Artificial Sequence
  derived and/or modified sequence
atgtggctgtctgggaagtctcaagttcagaagcgaggcgcagtgagataccttcaggcgcctccagtgaatggagaggccagcgcgtgcccagctcccccgacgcacctggatcgaacaacatgcgctaggcgccgtccagctcgattgcctcctccgtggggagcagccggcatccggcccgcgccgcgggcttcaagggcctcgttttgggctaggttccctccacattgctttcccagcgggtgttctggcagtagggtgctggagggcggcgaaatcggttttcgcttccgcggaggccgcgttgcagctgcagcactccggtctcgctgggctcggggcgatgctgcagcagccggaagccgagaggggcgaggaagaatgaacagagccaagccgaccacagtgcggaggccatcagcagccgccaaaccatccggacacccaccacccggcgactttatagccctgggcagtaagggtcaggccaatgaaagcaaaaccgcttccacattgctcaaacccgcgccatctggcttacccagtgagcggaagagagatgctgcggcggccctctcttctgcttcagcgctgaccgggcttaccaagcggcccaagctgtcttcaactccccccctgtccgctctcggacgcctcgcagaagccgcagtcgctgaaaaaagagctatctcacctagtattaaagagccatcagtggtacctattgaggtgctgccaaccgttctgttggacgagattgaagcagcggaactggaaggcaatgatgatcggatcgaaggtgtgctttgcggtgcagtcaagcaactgaaagtgacaagggccaagcccgacagcaccctatacctgagtctgatgtacctggccaagatcaagcccaacatttttgccaccgagggtgtaatcgaggccctgtgtagccttctccgacgggacgctagcattaacttcaaagccaaaggcaactcactggtgagcgtattggcctgcaatctgctgatggcagcatacgaggaggacgagaactggcccgaaatattcgtcaaggtttatatcgaagatagtttaggggagaggatctgggtcgattcgccgcactgtaaaacgttcgtggacaacatccagaccgcattcaacaccaggatgcccccaagatccgtactgctgcaaggcgaagccggccgcgtcgccggggacctcggcgccggctccagccctcacccgagcctgaccgaggaggaagacagccagacagaattgctgattgccgaagaaaagctgtcacccgagcaggaaggtcagctcatgcccagatacgaagaactcgctgaaagtgtggaagaatatgtcctggatatgctgagggatcagctgaaccggcgccagccaattgacaacgtatccagaaatttactcaggctcctcacaagcacttgtggatataaagaagttcggcttctggccgtgcagaagctcgagatgtggctgcaaaaccctaagttgacgagacctgctcaagacctcttaatgtctgtctgcatgaactgtaatacccacggaagtgaagacatggatgttataagtcacctaataaagattagactgaaaccaaaagtcctgcttaatcacttcatgctctgtataagagagctcttatcggcccacaaggacaacttgggaacaaccataaaactggtgatctttaacgagctgtcttcagcccgaaacccgaataatatgcaggttctgtatacagccctgcaacatagctctgaactcgccccaaagtttctcgctatggtcttccaagatttgcttacaaataaagacgattatctgcgggcctctagggctctgctcagagagattatcaaacaaaccaagcacgaaatcaactttcaggctttctgtctcgggctcatgcaggaacgaaaagagccacaatatttagaaatggaatttaaggagcgcttcgtggtgcacatcaccgatgtgttggccgtgtctatgatgcttgggatcaccgctcaggtgaaggaggcgggtattgcctgggataagggcgagaaacggaatcttgaagtgctccgctcttttcagaaccagatcgcggccatacaacgggacgccgtatggtggctgcacactgtcgtaccttcgatttctaaactcgccccaaaggattatgtccattgcctgcacaaagtactgttcaccgaacagcccgaaacatattataagtgggacaattggccacccgaaagtgatcgcaacttttttctgcggctatgtagtgaagtgccaatcctggaagacacactcatgcgcattcttgtcattggactgagtcgcgaactccccctgggacccgccgacgccatggagttggccgaccacctggtcaagagggccgccgcagtgcaggcagatgacgtcgaagtcttaaaggttgggcggacccagctcatcgacgccgtgctgaatctatgcacctatcatcatcctgagaatatccaactccctccaggttaccagcccccaaacctagctattagcacactttactggaaggcatggcctctactcctggtggtagcggcctttaatcccgagaatattggcctggcagcctgggaagaatatcccacactcaagatgctgatggaaatggtgatgaccaataactatagctacccgccatgcactttgaccgatgaagaaacgcgtaccgagatgctcaatagggagctccagacagcacaaagagagaaacaggagatcctcgcattcgagggccacttggccgctgcatccaccaagcagactattactgagtcttcttcactgcttctatcccagttaaccagtttggacccccagtacgcagctcacactgctcctccttgtgcgtgccgtcgggatctgggcccacctagacggccacccccccacatcctcgaccaggtgaagtcactcaaccagagcctgaggttaggccacttgctgtgcaggagccgcaatcccgattttctgttacacatcattcagcgtcaggcctcttctcagtccatgccatggttggcagatttagtgcaatcctccgaaggctcactggacgtgttaccggtgcagtgcctttgtgagttcctcctccacgacgcagtcgacgacgctgctagtggggaggaggacgacgaaggggaaagcaaagagcaaaaggccaaaaagcgtcagcgccagcagaaacaaaggcagcttttggggagactgcaggacctgctcctcggccctaaggccgacgaacaaactacttgcgaagtgctggactatttcctacgcagactcggaagctcgcaggtggcctctcgggtgctcgccatgaaaggtgaaacattgcccgccctacctaaggcgggccctgcgcacgagtgcttgcctcaaggtttatccttagttctctccgagggctcgctgcgtgatggagaggagaaggagccacccatggaggaggacgtcggcgacacagatgttctccagggctaccagtggttgcttcgcgacttaccacgcctgccactctttgactcagtgcggtctaccacagccttagctctgcagcaggccattcacatggagacagatcctcagaccatctcagcttacctgatctatctgtcacagcacacaccagtcgaagagcaggctcagcacagtgatctagcactcgacgtggcacgcctagtcgtggaaaggtctacaatcatgtcccatctatttagtaaactgtcaccttctgctgcctccgatgctgtgctcagcgccttactctccattttttccagatacgtcaggcggatgcggcagtccaaagaaggcgaggaggtgtattcttggtcagagagtcaggatcaggtcttcctccggtggtctagtggcgaaacagctaccatgcacatcctcgtggttcatgctatggtcatcctgctgacactgggaccccccagggccgacgactcagagtttcaggctctccttgatatttggtttcctgaggaaaaacctctgccgaccgcctttctcgtcgacacctccgaagaagccctgctgttaccggattggctgaagctgaggatgatcaggagtgaggttttgaggctcgtggacgctgctttacaggatctggaacctcaacagcttctgctatttgtgcagagttttggaatacctgtgtccagcatgtccaaactgctccaattcctagaccaggctgtagcccacgatccacaaacactggagcagaatatcatggacaaatctaagatgcctgggacctgtggcgtgggctcccacacactaactgaaccacagcctgggcaggctttcggcgcttgggtgagagctggcgtgacattgctccgattcgccgattacatggcacaccttgtcgaagtccagcacgagagaggcgcctccggtggccagacatttcacagtctattgaccgcctcactgcctcctagaagggactcaaccgaggcaccgaagcctaagagtagccccgagcagcctatcggccagggcagaattcgggtgggtactcaactcagagtgttagggccagaagatgatctggccgggatgttcctgcagatctttccattatccccagaccctcgatggcaatcctccagccccaggcctgtcgcactagctctgcaacaagccctcggccaggagctggcccgcgtggtgcagggtagcccggaagtgcccgggatcaccgtccgtgtactgcaggcacttgctacactcctatccagtccacacgggggagccctggtcatgagtatgcacaggagccacttcctggcttgcccactgctgagacaactctgtcagtaccaaaggtgcgttccacaggacacaggcttttctagcttgtttctgaaggtgttactgcaaatgctgcagtggctggattctcccggagtggaagggggaccactgagagctcagttgaggatgctcgcgagccaggcctctgctggcagacgcctttccgatgtgcgcggtggtcttctgcgcttggccgaggccctggcattccggcaggaccttgaggtcgtgagttcaaccgtaagggctgtcattgccactcttcggagtggagaacagtgttctgttgaacctgatttgatttctaaggtgctgcaaggcctcatcgaagtgcgcagcccccatctcgaggaactgctgacagcgttcttcagcgcgactgcagacgcagctagcccattcccagcatgtaaacccgtagtcgtggtatcttcattgctgcttcaagaggaagagcccctggcgggaggaaagcctggagctgatggaggatctctcgaagccgtccgcctcgggccaagcagcggattgcttgtggattggcttgaaatgctggatcctgaggtagtcagtagctgccctgacctccaactgcgactcctcttttccagacgcaaggggaagggacaggcccaggtgcctagcttcagaccctatctgctgacactgttcactcatcagtcctcctggcccaccctgcaccagtgcatccgtgtcttactgggcaaaagccgtgagcagcggtttgaccctagcgcttcactcgactttctttgggcttgcatccacgttcccagaatctggcagggaagggaccagaggacaccacaggcaggcctggggagaaagagaagagaggaattagtcctgcgcgtgcaaggacccgagttgatctctctcgtggagctgatacttgctgaagcagaaaccagatcccaggacggagacaccgctgcttgctcacttatacaggcccggttgccccttctgctgagttgttgctgtggggacgacgagtccgtgaggaaagtcaccgagcatctcagcgggtgcattcagcagtggggcgactctgtcctcgggaggcgttgccgggatctgctcctgcagttgtacctgcagcggcccgagttgcgtgtacccgtccctgaggtactacttcacagtgagggtgcggccagtagcagcgtctgcaagctagacggacttatccatcgatttatcacccttctggccgacaccagcgactccagggcacttgagaacagaggtgcagacgccagcatggcctgtcgaaaacttgctgtcgcccaccctttgcttttgcttagacacctgccgatgattgccgccctgctacatggtcgcacccacctaaactttcaagagtttcgccaacagaatcatttatcttgcttcctgcatgtgttgggacttctggagttgctccagccgcacgtctttcggagcgaacaccagggagcactgtgggactgcctactgagtttcatccggttactgcttaactaccgcaagtccagcaggcatttggcggcttttattaataagttcgtgcaattcatacacaaatacataacctacaatgctccagccgcgatttcattcttacagaaacatgccgaccctctccacgatctgagttttgacaactcggatcttgttatgttaaaatccctcttggccggtctatccctgccctctcgagacgaccgcacagataggggtcttgatgaggaaggcgaggaggaaagctcggccggctccctgcccttagtgtcagtatctttgtttacgccactcactgccgccgagatggccccttacatgaagaggttgtcgagaggacagaccgttgaggaccttctcgaggtgctcagcgacatcgacgagatgtctagaaggcgccctgaaatactgagtttttttagcacgaatctgcagcggcttatgtcttccgccgaggaatgctgcaggaacctggcattcagcctggcattgcgaagcatgcagaactcaccaagcattgctgccgcttttctacccaccttcatgtactgtttgggctctcaggattttgaggtagtccagaccgccctccggaatcttccagagtacgccctgctctgccaagagcacgctgccgttctgcttcaccgggcctttctggtggggatgtacggacaaatggacccctccgctcagatcagtgaagcattgagaatcctgcacatggaggcagtgatgtag

SEQ ID NO: 36558 - DNA, 6573 bp, Artificial Sequence
  derived and/or modified sequence
atgaaccgcgccaaacctactaccgtgagacgtccaagtgcggctgccaaaccaagtggccatccaccaccaggggactttatcgcactaggatcaaaaggtcaagcgaatgaatccaaaactgcctctacactgctgaaacctgcaccatctggcctgcccagcgagaggaaacgcgatgccgcggccgctctttctagcgcctcagccttgaccggcctgactaagcgcccgaagctgagcagtactcccccattatctgcactcgggcggcttgctgaagccgcggtagccgagaagcgggctataagccctagcatcaaagaacccagtgtcgtgcctatagaggtgctgccaactgtgctgctggacgagatcgaagccgccgaactcgagggcaatgacgatagaatagaaggtgtcttatgcggggccgtcaaacagctgaaggtaacccgcgcaaagcctgatagtaccctgtatctgagtttgatgtatctggcaaaaatcaagccaaacatattcgctacagaaggggtgatcgaggccctttgttctctactgaggcgggatgcaagcattaatttcaaggctaaggggaactcgttggtttccgtgctcgcctgtaacctgttaatggctgcgtacgaagaggacgaaaactggccagagattttcgtgaaggtctacattgaagattctctgggagagagaatctgggtggattcacctcattgcaagaccttcgtggacaatatacagaccgcctttaataccagaatgccccccaggagcgtgctgctgcagggagaagctggacgagttgcaggggatctaggggccggctcatccccacatccgagcttaactgaggaggaagactctcagaccgagctgttgattgctgaggagaagctgtcgccagaacaggagggacagttaatgccaaggtacgaggaactggctgagtcagtggaagagtacgtgttggatatgctgcgggatcagctgaatcgcaggcagcctatcgacaacgtcagccgtaatctgctacgcctgctaacctccacgtgtggatacaaggaggtgcgcctattggccgtccaaaaacttgagatgtggttacagaacccgaagttgactcgcccagcccaagacctgctgatgtctgtgtgcatgaattgtaacacacatgggagtgaagacatggatgtaatcagccacttgattaaaataagattaaaaccaaaagtgttattaaatcattttatgctttgtattcgcgagttgctctcagcccacaaggataacctcggtactaccataaaactggtgatttttaatgagctctccagcgcccgtaacccaaacaatatgcaggtcctgtacaccgctctccaacacagcagcgaactggcccctaagtttcttgcaatggtgtttcaggatctgctgaccaacaaggacgattacctcagggctagtagagctctgttgcgggagataatcaaacaaactaaacatgagatcaatttccaggccttctgcctcgggcttatgcaggagaggaaggaaccgcagtacctggagatggagtttaaagagcgattcgtggtccacattacagatgtgttagcagtttctatgatgcttggcatcaccgcccaagtaaaggaagccgggattgcctgggacaaaggcgaaaagcgtaacctcgaggtgttgcgatcatttcagaaccagattgccgctatccagagggatgcagtctggtggctgcatacggttgttccatctatttccaagctcgcccccaaggattacgtacactgcctacacaaggtgttgtttacagaacagcccgagacgtactataagtgggataattggccccccgaatccgaccggaatttcttcctgcggctctgctccgaggtgccaatcctggaggatacactgatgaggatactggtgattggcctctcgagggaactgccactgggccctgcggatgccatggaacttgcggaccacctcgtgaaaagagccgccgcggtccaggctgatgatgtggaagtcctcaaggtggggcggacccaactaattgacgccgtcctcaatctgtgtacataccaccatcccgagaacatccaactgccccctggataccagccaccaaaccttgcaattagtaccctttactggaaggcctggccgctgctgctcgtagtcgcggctttcaacccagaaaacattggactggctgcgtgggaagagtatccaaccttgaaaatgctgatggaaatggtcatgaccaacaattattcataccctccttgcactcttacggatgaggagacacgtaccgagatgctcaacagggaactgcagaccgcccagcgtgagaagcaagaaattctcgcttttgaaggtcacttggcagccgcctctaccaagcagactattaccgagagtagctcactgctcctctcacagctcacaagcctggatccacagggtccccccagacgccccccgccccacatcctcgaccaggtaaagtcgttgaatcagtccctgagactggggcacctgctgtgtcggtcaagaaatcccgactttctcctacacatcatccagcgccaagcatcctctcagagcatgccttggctcgccgatcttgtccaaagctcagagggatcactagacgtgttgcctgtgcaatgcctgtgtgaattcctgctccacgacgctgtggatgacgccgcctccggtgaggaggatgatgaaggcgagagtaaggagcagaaggcaaagaagcgccagcgacaacagaagcagaggcagctgttagggcggctccaagatctgctcctggggcctaaagctgacgagcagacgacctgtgaagttctcgactactttctccgacgactaggttctagtcaggttgccagtcgtgttctcgccatgaaaggactgtcattggtcctgtccgagggatcgctgagggacggggaggagaaggagccccccatggaagaggacgttggcgacacagacgtcttgcagggctaccagtggctcttgcgggacctcccgaggctgcctttgttcgactctgtgaggtccacaacagcacttgccttacagcaagctattcatatggagacagatccccagacgatctctgcgtacttaatttatctgagccagcacacgcccgttgaagaacaagctcaacatagcgacctggcactggatgttgcaagacttgtagtcgagagaagcacaatcatgtctcacctctttagcaaactgtctccatcagcagccagtgacgccgtgttatcggctctgctgtcgatctttagcaggtatgtgagacgtatgaggcaaagtaaagagggtgaagaggtgtattcatggagcgaatcacaggaccaggtctttctgagatggagctccggtgagaccgcaaccatgcatatccttgttgttcacgccatggtcattcttctgaccctgggccctccaagggcagacgactcagagtttcaggctctcctcgacatttggttccccgaagaaaaaccccttcccactgcattccttgtggatactagcgaagaggccctgctgctgccagactggctgaaactcagaatgatcaggagcgaagtgcttcggctggtggacgctgcccttcaagacctggaaccacagcaacttctgttgtttgttcagtcatttgggatcccagtgagctccatgagtaagctgctgcaatttctcgaccaggcggtggcacatgatcctcagacactcgaacagaacatcatggacaaaaactacatggcccatctggtagaggtacagcacgaacgcggggcctccggcgggcagacttttcattctctcctgaccgcgtcactgccccccagacgcgatagtaccgaagcccctaagcccaagagctcgccagagcagcctatcggtcaaggaagaataagggtcggcacacagttaagggttctaggcccagaggatgacctggcgggcatgtttctacagatttttccacttagccccgatccacgctggcaatcttcttccccgcgtccagtagccctcgctctccagcaggcacttggacaagagttggcacgcgtggtccaaggctcaccagaggtgcctggtatcactgttagggtcttgcaggcgcttgccactctgctgagtagccctcatggaggtgccttagtgatgagcatgcacagaagccacttccttgcttgtcctctgctgcgacaactatgtcagtatcagaggtgcgtgccacaggacacaggattttcatccctttttctgaaggtgctgctgcagatgctccagtggctggatagccctggcgtggagggtggccctttgcgcgcacagttgcggatgctcgcttcccaggcttcagctggccggaggttaagcgatgtaagaggaggcctgctgagattagccgaggccctggctttccgccaagacttagaagtggtcagttctacagtgcgagccgtcatcgccaccttgaggtccggagaacaatgttccgtcgaacccgacttgatttcaaaggtactgcagggactgatagaagtgcggtctccacatctggaggaactgctgactgcctttttctcagccaccgccgatgccgctagccctttccccgcttgcaaaccggttgtcgtggtatcttctctcttactccaagaggaggagccactggcggggggaaagcctggggctgacggcggctctctcgaagcggtaaggttaggcccatcctctggcctgctcgttgattggcttgaaatgctggatccggaggtggtgtcaagttgccccgatttgcaactacgattactattttccagaagaaagggcaaagggcaagcacaggtaccgtccttccgcccatatttactcactctgttcacccaccagtctagctggccaacactgcaccagtgcattcgggtcctgctgggtaagtctcgagaacagagattcgacccttccgcgagccttgatttcctctgggcctgtatacatgtgccgcgcatttggcagggaagagatcagagaacaccccagaaaagacgtgaagagctcgtcctgcgagtgcagggcccagagctcatatcattggtagaactcatcttagcggaggcagagacgcgttcccaggatggtgacaccgccgcctgttcattaatccaggctcggctcccgcttctcctcagttgctgctgcggagatgatgaaagcgtgcgcaaggtgaccgaacatttgtccggctgcattcagcaatggggggacagtgttctgggacggcgctgtcgcgacctgctgctgcagctttacctgcaacggccggagcttcgcgttccggtgcctgaagtactccttcattcagagggtgccgcctcttcctcagtttgcaagctggacgggttaattcatagatttatcacactcctagccgacacgtccgattcgcgcgccctggagaatcggggagcggacgcctccatggcctgccggaaactggcagtggcacaccctctactcctcctgaggcatttgcccatgatcgctgccctactgcatggccgaacccacctgaactttcaagaatttcgacagcagaatcacctatcttgtttcctccacgtgctgggacttctcgaactactgcagccacacgtgtttcgaagcgagcatcaaggagctttgtgggactgtttgctaagctttatacggttgttactcaactatagaaaatcgagtaggcatctagcagcttttatcaacaagtttgtccagttcatacataaatatataacatacaacgcgcccgcggcaattagtttcctgcaaaaacacgctgatcctctgcatgatctgtctttcgacaactctgatctcgtcatgctgaaaagcctgctggccggtctgagcctcccgagtcgggatgatcgtaccgatcgaggtctagatgaggagggggaagaagagtccagcgctggttcccttcctctggtgagcgtgtctctgttcacgcccttgacagccgcagaaatggcaccctacatgaagagactctcaagaggacagaccgtggaggaccttctggaggtactgtccgatatcgacgaaatgagcagaagaagaccagagatactgtctttcttctccaccaacctccaacggctgatgtcgtcagctgaggaatgctgccgaaatcttgctttctcgctcgctctgagaagtatgcagaactcgccaagtatcgctgcagcattcctgccaacattcatgtactgcctgggctcccaagatttcgaagtagtgcagacagccttgcggaatctgccagagtacgctctgctgtgtcaggagcacgcagcagtcctcctgcaccgcgcttttctcgtcggcatgtacggccagatggatccaagcgcccagatctctgaggccctacgcatcctccatatggaggcagtgatgtag

SEQ ID NO: 36559 - DNA, 7485 bp, Artificial Sequence
  derived and/or modified sequence
atgtggttaagtggcaaaagccaggtgcagaaaagaggagccgtgcgctacctgcaggcaccacctgtgaatggagaggccagcgcctgccccgcgccgccgacccacctggaccggaccacatgcgcgcggcgccggccagcccgcctcccgccgccatggggcgctgcaggcatcaggccggcgccgcgggcctctcgcgcctccttctgggcccgcttcccgccgcactgttttccttccggttgttccggaagtcgggtcctcgagggcggtgagatcggtttccgattccggggtggccgggtggcggcggcggcgctccggtcgcgatgggccagaggtgacgccgcagccgccgggagccgcgagggacggggcaggatgaaccgggccaagcccaccacggtgcgccggcccagcgccgcggccaaaccctcagggcaccctcccccaggagacttcattgctctgggctcaaagggtcaggccaatgaatcgaaaacggcgtccaccctgctgaagccagccccttccggcctgccttctgagcgcaagcgggatgcggcggccgcgttgtccagtgcctcggccctcaccggtctcaccaaacgccccaaactctcctccacaccccctctgagtgccctggggcgcctggctgaggctgcagtggcagaaaaacgagccatttctccgtcgattaaagagccatctgtggtgccaattgaagtgctgcccacggtgctgctggatgagatcgaggcggccgagctggagggcaacgatgacaggatcgagggcgtgctgtgcggggccgtgaagcagctgaaggtcacccgcgccaagcctgacagcaccctctacctgagcctcatgtacctggccaagatcaagcccaacatcttcgccactgagggcgtcattgaggctctgtgtagcctcctgcggcgggacgcctccatcaacttcaaggccaaggggaacagcctggtgtctgtgctggcctgtaacctcctcatggccgcctacgaggaggacgagaactggcccgagatctttgtcaaggtgtacatcgaggactccctgggggagcggatctgggtggacagccctcactgtaagacgtttgtggacaacatccagacggccttcaacaccagaatgccccccaggagcgtgctgctgcagggggaggcgggccgcgttgcgggcgacctgggtgcagggagcagcccacacccctccctcacggaggaggaggacagccagacggagttgctgatcgcggaggagaagctgagccccgagcaggagggccagctcatgcccaggtacgaagagctcgcggagagcgtggaggagtatgtcctggacatgctgcgggaccagctgaaccggcgccagcccatcgacaacgtctccaggaacctcctgcggctcctcacctccacctgcggctataaggaggtgcggctgctggcggtgcagaagctggagatgtggctgcagaaccccaagctgacccggccggcccaggacctgctgatgtccgtctgcatgaactgcaacacgcacggttccgaagacatggacgtcatctcacacctgatcaagatccgcctcaagcccaaggtcctcctcaaccacttcatgctgtgcatcagggagctgctgagcgcgcacaaggacaacctgggcaccaccatcaagttggtgatcttcaatgagctctccagcgcccggaacccgaacaacatgcaggtcctctataccgcactgcagcacagctcagagctggcgcccaagttcctggccatggtgttccaggacctgctgaccaacaaggacgactacctgcgggcctcgcgggccctgctgcgggagatcatcaagcagaccaagcacgagatcaacttccaggccttctgcctggggctcatgcaggagcgcaaggagccgcagtacctggagatggagttcaaggagcgcttcgtggtgcacatcaccgacgtcctggccgtgtccatgatgctgggcatcacagcgcaggtgaaggaggccggcatcgcctgggacaaaggagaaaagaggaacctggaagtgctccgctcattccagaaccagattgccgccatccagcgggatgccgtctggtggctccacactgtggtcccctccatcagcaagctcgcccctaaggactacgtgcactgcctgcacaaggtgctgttcacagagcagccggagacctactacaagtgggacaactggccacccgagagtgaccgcaacttcttcctgcgtctgtgctccgaggtgcccattttggaggacacgctgatgcgcatcctggtcatcgggctgtcccgggagctcccgctcgggcctgcggacgccatggagcttgctgaccacctggtgaagcgggcggctgccgtgcaggcggatgatgtggaggtgctgaaggtggggaggacccagctgatcgacgccgttctgaatctgtgcacctaccatcaccctgaaaacatccagctcccaccggggtaccagcctccgaacctcgccatctctaccctctactggaaggcctggcccctcctgctggtcgtcgccgcattcaacccagagaacatcggcctggctgcgtgggaggagtacccgaccctgaagatgctcatggagatggtgatgaccaacaactactcctacccaccgtgcaccctgacggatgaggagacccggacggagatgctgaaccgtgagctgcagaccgcccagcgggagaagcaggagatcctggccttcgaggggcacctggcggccgcgtccaccaagcagaccatcactgagagcagcagcctcctcctgtcgcagctcaccagcctggacccccagtacgcagcccacacagccccgccctgcgcctgccgtcgggacctggggcccccccggaggcctccccctcacatcctggatcaagtgaaaagcctcaaccagtccctccgcctcgggcacctcttgtgccgcagccgaaaccctgactttctcctccacatcatccagcggcaggcctcctcgcagtccatgccctggctggcggacctggtacagtccagcgagggctccctggacgtgctgcccgtgcagtgtctgtgcgagttcctgctgcacgatgctgtggacgatgctgcttccggggaggaggacgacgagggcgagagcaaggagcagaaggccaagaagcggcagaggcaacagaagcagcggcagctgctgggccgcctgcaggacctgctactgggcccgaaggctgatgagcagaccacgtgtgaggtgctggactacttcttgcggcgcctcggctcctcccaggtggcctcccgcgtgctggccatgaagggtgagaccctgcctgcactgccgaaagccggcccagctcatgagtgtctgccacagggtttgtcgctggtgctttcggagggcagcctgcgggacggggaggagaaggagccccccatggaggaggatgtgggggacacagatgtgctgcagggctatcagtggctgctgcgggacctgcctcgcctgcctctgttcgacagcgtcaggagcaccacagccctggccctgcagcaggcaatccacatggagactgatccccagaccatcagcgcctacctgatctacttgtcccagcacacgcctgtggaggagcaggcccagcacagcgacctggccctggacgtggcccggctggtcgtggagcgctccaccatcatgtcccacctcttctcgaagctctccccgagtgccgcgtcggacgccgtgctgagcgctctgttgtccatcttctcacgctacgtgaggcgcatgcggcagagcaaggagggcgaggaggtctacagctggtcggagtctcaggaccaggtcttcctacgctggagcagcggggagacagccaccatgcacatcctcgtggtccatgccatggtgatcctgctgacgctgggcccgcctcgagccgacgacagcgagttccaggcgctgctggacatctggtttccggaggagaagccactgcccaccgccttcctggtggacacatcggaggaggcgctgctgcttcctgactggctgaagctgcgcatgatccgttctgaggtgctccgcctggtggacgccgccctgcaggacctggagccgcagcagctgctgctgttcgtgcagtcgtttggcatccccgtgtccagcatgagcaaactcctccagttcctggaccaggcagtggcccacgacccccagactctggagcagaacatcatggacaagagtaagatgccagggacctgcggagtgggttcacacacgctgaccgagccccagcccggccaggcttttggggcctgggtgcgagcgggtgtgaccctgctacggtttgcagattacatggcccacctggtggaggtccagcatgagcgcggcgcctccggaggccagactttccactccttgctcacagcctccctgccgccccgccgagacagcacagaggcacccaaaccaaagagcagcccagagcagcccataggccagggccggattcgggtggggacccagctccgggtgctgggccctgaggacgacctggctggcatgttcctccagattttcccgctcagcccggaccctcggtggcagagctccagtccccgccccgtggccctcgccctgcagcaggccctgggccaggagctggcccgcgtcgtccagggcagccccgaggtgccgggcatcacggtgcgtgtcctgcaggccctcgccaccctgctcagctccccacacggcggtgccctggtgatgtccatgcaccgtagccacttcctggcctgcccgctgctgcgccagctctgccagtaccagcgctgtgtgccacaggacaccggcttctcctcgctcttcctgaaggtgctcctgcagatgctgcagtggctggacagccctggcgtggagggcgggcccctgcgggcacagctcaggatgcttgccagccaggcctcagccgggcgcaggctcagtgatgtgcgaggggggctcctgcgcctggccgaggccctggccttccgtcaggacctggaggtggtcagctccaccgtccgtgccgtcatcgccaccctgaggtctggggagcagtgcagcgtggagccggacctgatcagcaaagtcctccaggggctgatcgaggtgaggtccccccacctggaggagctgctgactgcattcttctctgccactgcggatgctgcctccccgtttccagcctgtaagcccgttgtggtggtgagctccctgctgctgcaggaggaggagcccctggctggggggaagccgggtgcggacggtggcagcctggaggccgtgcggctggggccctcgtcaggcctcctagtggactggctggaaatgctggaccccgaggtggtcagcagctgccccgacctgcagctcaggctgctcttctcccggaggaagggcaaaggtcaggcccaggtgccctcgttccgtccctacctcctgaccctcttcacgcatcagtccagctggcccacactgcaccagtgcatccgagtcctgctgggcaagagccgggaacagaggttcgacccctctgcctctctggacttcctctgggcctgcatccatgttcctcgcatctggcaggggcgggaccagcgcaccccgcaggcaggtcttgggaggaagcggcgggaggagctggtgctgcgggtccagggcccggagctcatcagcctggtggagctgatcctggccgaggcggagacgcggagccaggacggggacacagccgcctgcagcctcatccaggcccggctgcccctgctgctcagctgctgctgtggggacgatgagagtgtcaggaaggtgacggagcacctgtcaggctgcatccagcagtggggagacagcgtgctgggcaggcgctgccgagaccttctcctgcagctctacctacagcggccggagctgcgggtgcccgtgcctgaggtcctactgcacagcgaaggggctgccagcagcagcgtctgcaagctggacggactcatccaccgcttcatcacgctccttgcggacaccagcgactcccgggcgttggagaaccgaggggcggatgccagcatggcctgccggaagctggcggtggcgcacccgctgctgctgctcaggcacctgcccatgatcgcggcgctcctgcacggccgcacccacctcaacttccaggagttccggcagcagaaccacctgagctgcttcctgcacgtgctgggcctgctggagctgctgcagccgcacgtgttccgcagcgagcaccagggggcgctgtgggactgccttctgtccttcatccgcctgctgctgaattacaggaagtcctcccgccatctggctgccttcatcaacaagtttgtgcagttcatccataagtacattacctacaatgccccagcagccatctccttcctgcagaagcacgccgacccgctccacgacctgtccttcgacaacagtgacctggtgatgctgaaatccctccttgcagggctcagcctgcccagcagggacgacaggaccgaccgaggcctggacgaagagggcgaggaggagagctcagccggctccttgcccctggtcagcgtctccctgttcacccctctgaccgcggccgagatggccccctacatgaaacggctttcccggggccaaacggtggaggatctgctggaggttctgagtgacatagacgagatgtcccggcggagacccgagatcctgagcttcttctcgaccaacctgcagcggctgatgagctcggccgaggagtgttgccgcaacctcgccttcagcctggccctgcgctccatgcagaacagccccagcattgcagccgctttcctgcccacgttcatgtactgcctgggcagccaggactttgaggtggtgcagacggccctccggaacctgcctgagtacgctctcctgtgccaagagcacgcggctgtgctgctccaccgggccttcctggtgggcatgtacggccagatggaccccagcgcgcagatctccgaggccctgaggatcctgcatatggaggccgtgatgtgagcctgtggcagccgacccccctccaagccccggcccgtcccgtccccggggatcctcgaggcaaagcccaggaagcgtgggcgttgctggtctgtccgaggaggtgagggcgccgagccctgaggccaggcaggcccaggagcaatactccgagccctggggtggctccgggccggccgctggcatcaggggccgtccagcaagccctcattcaccttctgggccacagccctgccgcggagcggcggatccccccgggcatggcctgggctggttttgaatgaaacgacctgaactgtc

SEQ ID NO: 36560 - DNA, 6959 bp, Artificial Sequence
  derived and/or modified sequence
gtggccgggtggcggcggcggcgctccggtcgcgatgggccagaggtgacgccgcagccgccgggagccgcgagggacggggcaggatgaaccgggccaagcccaccacggtgcgccggcccagcgccgcggccaaaccctcagggcaccctcccccaggagacttcattgctctgggctcaaagggtcaggccaatgaatcgaaaacggcgtccaccctgctgaagccagccccttccggcctgccttctgagcgcaagcgggatgcggcggccgcgttgtccagtgcctcggccctcaccggtctcaccaaacgccccaaactctcctccacaccccctctgagtgccctggggcgcctggctgaggctgcagtggcagaaaaacgagccatttctccgtcgattaaagagccatctgtggtgccaattgaagtgctgcccacggtgctgctggatgagatcgaggcggccgagctggagggcaacgatgacaggatcgagggcgtgctgtgcggggccgtgaagcagctgaaggtcacccgcgccaagcctgacagcaccctctacctgagcctcatgtacctggccaagatcaagcccaacatcttcgccactgagggcgtcattgaggctctgtgtagcctcctgcggcgggacgcctccatcaacttcaaggccaaggggaacagcctggtgtctgtgctggcctgtaacctcctcatggccgcctacgaggaggacgagaactggcccgagatctttgtcaaggtgtacatcgaggactccctgggggagcggatctgggtggacagccctcactgtaagacgtttgtggacaacatccagacggccttcaacaccagaatgccccccaggagcgtgctgctgcagggggaggcgggccgcgttgcgggcgacctgggtgcagggagcagcccacacccctccctcacggaggaggaggacagccagacggagttgctgatcgcggaggagaagctgagccccgagcaggagggccagctcatgcccaggtacgaagagctcgcggagagcgtggaggagtatgtcctggacatgctgcgggaccagctgaaccggcgccagcccatcgacaacgtctccaggaacctcctgcggctcctcacctccacctgcggctataaggaggtgcggctgctggcggtgcagaagctggagatgtggctgcagaaccccaagctgacccggccggcccaggacctgctgatgtccgtctgcatgaactgcaacacgcacggttccgaagacatggacgtcatctcacacctgatcaagatccgcctcaagcccaaggtcctcctcaaccacttcatgctgtgcatcagggagctgctgagcgcgcacaaggacaacctgggcaccaccatcaagttggtgatcttcaatgagctctccagcgcccggaacccgaacaacatgcaggtcctctataccgcactgcagcacagctcagagctggcgcccaagttcctggccatggtgttccaggacctgctgaccaacaaggacgactacctgcgggcctcgcgggccctgctgcgggagatcatcaagcagaccaagcacgagatcaacttccaggccttctgcctggggctcatgcaggagcgcaaggagccgcagtacctggagatggagttcaaggagcgcttcgtggtgcacatcaccgacgtcctggccgtgtccatgatgctgggcatcacagcgcaggtgaaggaggccggcatcgcctgggacaaaggagaaaagaggaacctggaagtgctccgctcattccagaaccagattgccgccatccagcgggatgccgtctggtggctccacactgtggtcccctccatcagcaagctcgcccctaaggactacgtgcactgcctgcacaaggtgctgttcacagagcagccggagacctactacaagtgggacaactggccacccgagagtgaccgcaacttcttcctgcgtctgtgctccgaggtgcccattttggaggacacgctgatgcgcatcctggtcatcgggctgtcccgggagctcccgctcgggcctgcggacgccatggagcttgctgaccacctggtgaagcgggcggctgccgtgcaggcggatgatgtggaggtgctgaaggtggggaggacccagctgatcgacgccgttctgaatctgtgcacctaccatcaccctgaaaacatccagctcccaccggggtaccagcctccgaacctcgccatctctaccctctactggaaggcctggcccctcctgctggtcgtcgccgcattcaacccagagaacatcggcctggctgcgtgggaggagtacccgaccctgaagatgctcatggagatggtgatgaccaacaactactcctacccaccgtgcaccctgacggatgaggagacccggacggagatgctgaaccgtgagctgcagaccgcccagcgggagaagcaggagatcctggccttcgaggggcacctggcggccgcgtccaccaagcagaccatcactgagagcagcagcctcctcctgtcgcagctcaccagcctggacccccaggggcccccccggaggcctccccctcacatcctggatcaagtgaaaagcctcaaccagtccctccgcctcgggcacctcttgtgccgcagccgaaaccctgactttctcctccacatcatccagcggcaggcctcctcgcagtccatgccctggctggcggacctggtacagtccagcgagggctccctggacgtgctgcccgtgcagtgtctgtgcgagttcctgctgcacgatgctgtggacgatgctgcttccggggaggaggacgacgagggcgagagcaaggagcagaaggccaagaagcggcagaggcaacagaagcagcggcagctgctgggccgcctgcaggacctgctactgggcccgaaggctgatgagcagaccacgtgtgaggtgctggactacttcttgcggcgcctcggctcctcccaggtggcctcccgcgtgctggccatgaagggtttgtcgctggtgctttcggagggcagcctgcgggacggggaggagaaggagccccccatggaggaggatgtgggggacacagatgtgctgcagggctatcagtggctgctgcgggacctgcctcgcctgcctctgttcgacagcgtcaggagcaccacagccctggccctgcagcaggcaatccacatggagactgatccccagaccatcagcgcctacctgatctacttgtcccagcacacgcctgtggaggagcaggcccagcacagcgacctggccctggacgtggcccggctggtcgtggagcgctccaccatcatgtcccacctcttctcgaagctctccccgagtgccgcgtcggacgccgtgctgagcgctctgttgtccatcttctcacgctacgtgaggcgcatgcggcagagcaaggagggcgaggaggtctacagctggtcggagtctcaggaccaggtcttcctacgctggagcagcggggagacagccaccatgcacatcctcgtggtccatgccatggtgatcctgctgacgctgggcccgcctcgagccgacgacagcgagttccaggcgctgctggacatctggtttccggaggagaagccactgcccaccgccttcctggtggacacatcggaggaggcgctgctgcttcctgactggctgaagctgcgcatgatccgttctgaggtgctccgcctggtggacgccgccctgcaggacctggagccgcagcagctgctgctgttcgtgcagtcgtttggcatccccgtgtccagcatgagcaaactcctccagttcctggaccaggcagtggcccacgacccccagactctggagcagaacatcatggacaagaattacatggcccacctggtggaggtccagcatgagcgcggcgcctccggaggccagactttccactccttgctcacagcctccctgccgccccgccgagacagcacagaggcacccaaaccaaagagcagcccagagcagcccataggccagggccggattcgggtggggacccagctccgggtgctgggccctgaggacgacctggctggcatgttcctccagattttcccgctcagcccggaccctcggtggcagagctccagtccccgccccgtggccctcgccctgcagcaggccctgggccaggagctggcccgcgtcgtccagggcagccccgaggtgccgggcatcacggtgcgtgtcctgcaggccctcgccaccctgctcagctccccacacggcggtgccctggtgatgtccatgcaccgtagccacttcctggcctgcccgctgctgcgccagctctgccagtaccagcgctgtgtgccacaggacaccggcttctcctcgctcttcctgaaggtgctcctgcagatgctgcagtggctggacagccctggcgtggagggcgggcccctgcgggcacagctcaggatgcttgccagccaggcctcagccgggcgcaggctcagtgatgtgcgaggggggctcctgcgcctggccgaggccctggccttccgtcaggacctggaggtggtcagctccaccgtccgtgccgtcatcgccaccctgaggtctggggagcagtgcagcgtggagccggacctgatcagcaaagtcctccaggggctgatcgaggtgaggtccccccacctggaggagctgctgactgcattcttctctgccactgcggatgctgcctccccgtttccagcctgtaagcccgttgtggtggtgagctccctgctgctgcaggaggaggagcccctggctggggggaagccgggtgcggacggtggcagcctggaggccgtgcggctggggccctcgtcaggcctcctagtggactggctggaaatgctggaccccgaggtggtcagcagctgccccgacctgcagctcaggctgctcttctcccggaggaagggcaaaggtcaggcccaggtgccctcgttccgtccctacctcctgaccctcttcacgcatcagtccagctggcccacactgcaccagtgcatccgagtcctgctgggcaagagccgggaacagaggttcgacccctctgcctctctggacttcctctgggcctgcatccatgttcctcgcatctggcaggggcgggaccagcgcaccccgcagaagcggcgggaggagctggtgctgcgggtccagggcccggagctcatcagcctggtggagctgatcctggccgaggcggagacgcggagccaggacggggacacagccgcctgcagcctcatccaggcccggctgcccctgctgctcagctgctgctgtggggacgatgagagtgtcaggaaggtgacggagcacctgtcaggctgcatccagcagtggggagacagcgtgctgggcaggcgctgccgagaccttctcctgcagctctacctacagcggccggagctgcgggtgcccgtgcctgaggtcctactgcacagcgaaggggctgccagcagcagcgtctgcaagctggacggactcatccaccgcttcatcacgctccttgcggacaccagcgactcccgggcgttggagaaccgaggggcggatgccagcatggcctgccggaagctggcggtggcgcacccgctgctgctgctcaggcacctgcccatgatcgcggcgctcctgcacggccgcacccacctcaacttccaggagttccggcagcagaaccacctgagctgcttcctgcacgtgctgggcctgctggagctgctgcagccgcacgtgttccgcagcgagcaccagggggcgctgtgggactgccttctgtccttcatccgcctgctgctgaattacaggaagtcctcccgccatctggctgccttcatcaacaagtttgtgcagttcatccataagtacattacctacaatgccccagcagccatctccttcctgcagaagcacgccgacccgctccacgacctgtccttcgacaacagtgacctggtgatgctgaaatccctccttgcagggctcagcctgcccagcagggacgacaggaccgaccgaggcctggacgaagagggcgaggaggagagctcagccggctccttgcccctggtcagcgtctccctgttcacccctctgaccgcggccgagatggccccctacatgaaacggctttcccggggccaaacggtggaggatctgctggaggttctgagtgacatagacgagatgtcccggcggagacccgagatcctgagcttcttctcgaccaacctgcagcggctgatgagctcggccgaggagtgttgccgcaacctcgccttcagcctggccctgcgctccatgcagaacagccccagcattgcagccgctttcctgcccacgttcatgtactgcctgggcagccaggactttgaggtggtgcagacggccctccggaacctgcctgagtacgctctcctgtgccaagagcacgcggctgtgctgctccaccgggccttcctggtgggcatgtacggccagatggaccccagcgcgcagatctccgaggccctgaggatcctgcatatggaggccgtgatgtgagcctgtggcagccgacccccctccaagccccggcccgtcccgtccccggggatcctcgaggcaaagcccaggaagcgtgggcgttgctggtctgtccgaggaggtgagggcgccgagccctgaggccaggcaggcccaggagcaatactccgagccctggggtggctccgggccggccgctggcatcaggggccgtccagcaagccctcattcaccttctgggccacagccctgccgcggagcggcggatccccccgggcatggcctgggctggttttgaatgaaacgacctgaactgtc

SEQ ID NO: 36561 - DNA, 7185 bp, Artificial Sequence
  derived and/or modified sequence
atgtggctgagcggcaagagccaggtgcagaagagaggagctgtgcgctacctgcaggcccctcctgtgaatggagaggccagcgcctgcccagccccacccacccacctggacaggaccacctgtgccaggagaagacctgcccggctgcccccaccctggggcgctgctggcatccggcctgccccccgggccagccgggccagcttctgggcccgcttccccccccactgcttccccagcggctgcagcggcagccgggtgctggagggcggggagatcggcttccgcttccggggcggccgggtggccgccgccgccctgcggagccgctgggcccggggagatgctgctgctgctggcagccgggagggccggggccgcatgaacagagccaagcccaccaccgtgcggcggcccagcgctgctgccaagcccagcggccaccccccacctggggacttcatcgccctgggcagcaagggccaggccaatgaaagcaagacagccagcaccctgctgaagccagcccccagcggcctgcccagcgagaggaagagagatgctgctgctgccctgagcagcgccagcgccctgaccggcctgaccaagaggcccaagctgagcagcaccccacccctgagcgccctgggccgcctggccgaggccgctgtggccgagaagagggccatcagccccagcatcaaggagcccagcgtggtgcccatcgaggtgctgcccaccgtgctgctggatgaaattgaggccgctgagctggagggcaatgatgaccgcatcgagggcgtgctgtgtggggctgtgaagcagctgaaggtgacccgggccaagccagacagcaccctgtacctgagcctgatgtacctggccaagatcaagcccaacatctttgccacagaaggagtgattgaggccctgtgcagcctgctgcggagagatgccagcatcaacttcaaggccaagggcaacagcctggtgtctgtgctggcctgcaacctgctgatggccgcctatgaggaggatgagaactggccagagatctttgtgaaggtgtacatcgaggacagcctgggggagcgcatctgggtggacagcccccactgcaagacctttgtggacaacatccagacagccttcaacaccaggatgccacccaggtctgtgctgctgcagggcgaggccggccgggtggccggggacctgggcgccggcagcagcccccaccccagcctgacagaggaggaggacagccagacagagctgctgattgctgaggagaagctgagccctgagcaggagggccagctgatgcccaggtatgaggagctggccgagagcgtggaggagtatgtgctggacatgctgcgggaccagctgaacagacggcagcccatcgacaacgtgtccaggaacctgctgcggctgctgaccagcacctgtggctacaaggaggtgcggctgctggccgtgcagaagctggagatgtggctgcagaaccccaagctgaccaggcctgcccaggacctgctgatgtctgtgtgcatgaactgcaacacccacggcagcgaggacatggatgtgatcagccacctgatcaagatccggctgaagcccaaggtgctgctgaaccacttcatgctgtgcatccgggagctgctgagcgcccacaaggacaacctgggcaccaccatcaagctggtgatcttcaatgagctgagcagcgccaggaaccccaacaacatgcaggtgctgtacacagccctgcagcacagcagcgagctggcccccaagttcctggccatggtgttccaggacctgctgaccaacaaggatgactacctgcgggccagccgggccctgctgcgggagatcatcaagcagaccaagcatgagatcaacttccaggccttctgcctgggcctgatgcaggagaggaaggagccccagtacctggagatggagttcaaggagagatttgtggtgcacatcacagatgtgctggccgtgtccatgatgctgggcatcacagcccaggtgaaggaggccggcatcgcctgggacaagggggagaagaggaacctggaggtgctgcgctccttccagaaccagattgctgccatccagagagatgctgtgtggtggctgcacacagtggtgcccagcatcagcaagctggcccccaaggactatgtgcactgcctgcacaaggtgctcttcacagagcagcctgagacctactacaagtgggacaactggcccccagagagtgacaggaacttcttcctgcggctgtgcagcgaggtgcccatcctggaggacaccctgatgaggatcctggtgattggcctgagccgggagctgcccctgggccctgcagatgccatggagctggccgaccacctggtgaagagagctgctgctgtgcaggctgatgatgtggaggtgctgaaggtgggccgcacccagctgattgatgctgtgctgaacctgtgcacctaccaccaccctgagaacatccagctgcccccaggctaccagccccccaacctggccatcagcaccctgtactggaaggcctggcccctgctgctggtggtggccgccttcaaccctgagaacatcggcctggccgcctgggaggagtaccccaccctgaagatgctgatggagatggtgatgaccaacaactacagctacccaccctgcaccctgacagatgaggagaccaggacagagatgctgaaccgggagctgcagacagcccagcgggagaagcaggagatcctggcctttgagggccacctggccgccgccagcaccaagcagaccatcacagagagcagcagcctgctgctgagccagctgaccagcctggacccccagtatgctgcccacacagccccaccctgtgcctgcagaagagacctgggccccccccggcggcccccaccccacatcctggaccaggtgaagagcctgaaccagagcctgcggctgggccacctgctgtgccgcagcagaaatccagacttcctgctgcacatcatccagaggcaggccagcagccagagcatgccctggctggccgacctggtgcagagcagcgagggcagcctggatgtgctgcctgtgcagtgcctgtgtgagttcctgctgcatgatgctgtggatgatgctgccagcggggaggaggatgatgaaggagagagcaaggagcagaaggccaagaagaggcagaggcagcagaagcagaggcagctgctgggccgcctgcaggacctgctgctgggccccaaggcagatgagcagaccacctgtgaggtgctggactacttcctgcggcggctgggcagcagccaggtggccagccgggtgctggccatgaagggggagaccctgcctgccctgcccaaggccggccctgcccacgagtgcctgccccagggcctgagcctggtgctgtctgagggcagcctgagagatggagaggagaaggagccccccatggaggaggatgtgggggacacagatgtgctgcagggctaccagtggctgctgcgggacctgccccggctgcccctgtttgattctgtgcgcagcaccacagccctggccctgcagcaggccatccacatggagacagacccccagaccatcagcgcctacctgatctacctgagccagcacacccctgtggaggagcaggcccagcacagcgacctggccctggatgtggcccggctggtggtggagaggagcaccatcatgagccacctgttcagcaagctgagccccagcgctgccagtgatgctgtgctgagcgccctgctgagcatcttcagccgctacgtgcggaggatgaggcagagcaaggagggggaggaggtgtacagctggagcgagagccaggaccaggtgttcctgcgctggagcagcggggagacagccaccatgcacatcctggtggtgcacgccatggtgatcctgctgaccctgggcccccccagggcagatgacagcgagttccaggccctgctggacatctggttccctgaggagaagcccctgcccacagccttcctggtggacaccagcgaggaggccctgctgctgcctgactggctgaagctgaggatgatccgctctgaggtgctgcggctggtggatgctgccctgcaggacctggagccccagcagctgctgctgtttgtgcagagctttggcatccctgtgtcctccatgagcaagctgctgcagttcctggaccaggccgtggcccatgacccccagaccctggagcagaacatcatggacaagagcaagatgcctggcacctgtggggtgggcagccacaccctgacagagccccagcccggccaggccttcggggcctgggtgcgggccggcgtgaccctgctgcgctttgctgactacatggcccacctggtggaggtgcagcacgagcggggggccagcggcggccagaccttccacagcctgctgacagccagcctgcccccccggcgggacagcacagaggcccccaagcccaagagcagccctgagcagcccatcggccagggccgcatccgggtgggcacccagctgcgggtgctgggcccagaagatgacctggccggcatgttcctgcagatcttccccctgagcccagacccccgctggcagagcagcagccccaggcctgtggccctggccctgcagcaggccctgggccaggagctggcccgggtggtgcagggcagccctgaggtgcccggcatcaccgtgcgggtgctgcaggccctggccaccctgctgagcagcccccacggcggggccctggtgatgtccatgcacaggagccacttcctggcctgccccctgctgcggcagctgtgccagtaccagagatgtgtgccccaggacaccggcttcagcagcctcttcctgaaggtgctgctgcagatgctgcagtggctggacagccctggggtggagggcggccccctgcgggcccagctgaggatgctggccagccaggccagcgctggaagaaggctgagtgatgtgcggggcggcctgctgcggctggccgaggccctggccttccggcaggacctggaggtggtgagcagcacagtgcgggccgtcatcgccaccctgcggtctggagagcagtgcagcgtggagccagacctgatcagcaaggtgctgcagggcctcatcgaggtgcgcagcccccacctggaggagctgctgacagccttcttcagcgccacagcagatgctgccagccccttccctgcctgcaagcctgtggtggtggtgagcagcctgctgctgcaggaggaggagcccctggccggcggcaagccaggagcagatggcggcagcctggaggccgtgcggctgggccccagcagcggcctgctggtggactggctggagatgctggaccctgaggtggtgagcagctgcccagacctgcagctgcggctgctcttcagcaggaggaagggcaagggccaggcccaggtgcccagcttccggccctacctgctgaccctcttcacccaccagagctcctggcccaccctgcaccagtgcatccgggtgctgctgggcaagagccgggagcagagatttgaccccagcgccagcctggacttcctgtgggcctgcatccacgtgccccgcatctggcagggccgggaccagaggaccccccaggccggcctgggcaggaagagaagagaggagctggtgctgcgggtgcagggccctgagctgatcagcctggtggagctgatcctggccgaggccgagaccaggagccaggatggagacacagctgcctgcagcctcatccaggcccggctgcccctgctgctgagctgctgctgcggagatgatgaatctgtgaggaaggtgacagagcacctgagcggctgcatccagcagtggggagacagcgtgctgggccgccgctgccgggacctgctgctgcagctgtacctgcagaggcctgagctgcgggtgcctgtgcctgaggtgctgctgcacagcgagggcgccgccagcagctctgtgtgcaagctggatggcctcatccaccgcttcatcaccctgctggccgacaccagtgacagccgggccctggagaacagaggagcagatgcctccatggcctgcaggaagctggccgtggcccaccccctgctgctgctgcggcacctgcccatgattgctgccctgctgcacggccgcacccacctgaacttccaggagttccggcagcagaaccacctgagctgcttcctgcacgtgctgggcctgctggagctgctgcagccccacgtgttccgctctgagcaccagggcgccctgtgggactgcctgctgtccttcatccggctgctgctgaactacaggaagagcagccgccacctggccgccttcatcaacaagtttgtgcagttcatccacaagtacatcacctacaatgccccagctgccatctccttcctgcagaagcacgccgaccccctgcatgacctgagctttgacaacagcgacctggtgatgctgaagagcctgctggccggcctgagcctgcccagcagagatgacagaacagaccggggcctggatgaggagggggaggaggagagcagcgctggcagcctgcccctggtgtctgtgtccctcttcacccccctgacagctgctgagatggccccctacatgaagaggctgagccggggccagacagtggaggacctgctggaggtgctgagtgacattgatgagatgagcagaagaagacctgagatcctgtccttcttcagcaccaacctgcagaggctgatgagcagcgctgaggagtgctgcaggaacctggccttcagcctggccctgcgctccatgcagaacagccccagcattgctgctgccttcctgcccaccttcatgtactgcctgggcagccaggactttgaggtggtgcagacagccctgaggaacctgcctgaatatgccctgctgtgccaggagcacgccgctgtgctgctgcaccgggccttcctggtgggcatgtatggccagatggaccccagcgcccagatcagcgaggccctgcgcatcctgcacatggaggccgtgatgtag

SEQ ID NO: 36562 - DNA, 6573 bp, Artificial Sequence
  derived and/or modified sequence
atgaacagagccaagcccaccaccgtgcggcggcccagcgctgctgccaagcccagcggccaccccccacctggggacttcatcgccctgggcagcaagggccaggccaatgaaagcaagacagccagcaccctgctgaagccagcccccagcggcctgcccagcgagaggaagagagatgctgctgctgccctgagcagcgccagcgccctgaccggcctgaccaagaggcccaagctgagcagcaccccacccctgagcgccctgggccgcctggccgaggccgctgtggccgagaagagggccatcagccccagcatcaaggagcccagcgtggtgcccatcgaggtgctgcccaccgtgctgctggatgaaattgaggccgctgagctggagggcaatgatgaccgcatcgagggcgtgctgtgtggggctgtgaagcagctgaaggtgacccgggccaagccagacagcaccctgtacctgagcctgatgtacctggccaagatcaagcccaacatctttgccacagaaggagtgattgaggccctgtgcagcctgctgcggagagatgccagcatcaacttcaaggccaagggcaacagcctggtgtctgtgctggcctgcaacctgctgatggccgcctatgaggaggatgagaactggccagagatctttgtgaaggtgtacatcgaggacagcctgggggagcgcatctgggtggacagcccccactgcaagacctttgtggacaacatccagacagccttcaacaccaggatgccacccaggtctgtgctgctgcagggcgaggccggccgggtggccggggacctgggcgccggcagcagcccccaccccagcctgacagaggaggaggacagccagacagagctgctgattgctgaggagaagctgagccctgagcaggagggccagctgatgcccaggtatgaggagctggccgagagcgtggaggagtatgtgctggacatgctgcgggaccagctgaacagacggcagcccatcgacaacgtgtccaggaacctgctgcggctgctgaccagcacctgtggctacaaggaggtgcggctgctggccgtgcagaagctggagatgtggctgcagaaccccaagctgaccaggcctgcccaggacctgctgatgtctgtgtgcatgaactgcaacacccacggcagcgaggacatggatgtgatcagccacctgatcaagatccggctgaagcccaaggtgctgctgaaccacttcatgctgtgcatccgggagctgctgagcgcccacaaggacaacctgggcaccaccatcaagctggtgatcttcaatgagctgagcagcgccaggaaccccaacaacatgcaggtgctgtacacagccctgcagcacagcagcgagctggcccccaagttcctggccatggtgttccaggacctgctgaccaacaaggatgactacctgcgggccagccgggccctgctgcgggagatcatcaagcagaccaagcatgagatcaacttccaggccttctgcctgggcctgatgcaggagaggaaggagccccagtacctggagatggagttcaaggagagatttgtggtgcacatcacagatgtgctggccgtgtccatgatgctgggcatcacagcccaggtgaaggaggccggcatcgcctgggacaagggggagaagaggaacctggaggtgctgcgctccttccagaaccagattgctgccatccagagagatgctgtgtggtggctgcacacagtggtgcccagcatcagcaagctggcccccaaggactatgtgcactgcctgcacaaggtgctcttcacagagcagcctgagacctactacaagtgggacaactggcccccagagagtgacaggaacttcttcctgcggctgtgcagcgaggtgcccatcctggaggacaccctgatgaggatcctggtgattggcctgagccgggagctgcccctgggccctgcagatgccatggagctggccgaccacctggtgaagagagctgctgctgtgcaggctgatgatgtggaggtgctgaaggtgggccgcacccagctgattgatgctgtgctgaacctgtgcacctaccaccaccctgagaacatccagctgcccccaggctaccagccccccaacctggccatcagcaccctgtactggaaggcctggcccctgctgctggtggtggccgccttcaaccctgagaacatcggcctggccgcctgggaggagtaccccaccctgaagatgctgatggagatggtgatgaccaacaactacagctacccaccctgcaccctgacagatgaggagaccaggacagagatgctgaaccgggagctgcagacagcccagcgggagaagcaggagatcctggcctttgagggccacctggccgccgccagcaccaagcagaccatcacagagagcagcagcctgctgctgagccagctgaccagcctggacccccagggccccccaagaagacctccaccccacatcctggaccaggtgaagagcctgaaccagagcctgcggctgggccacctgctgtgccgcagcaggaacccagacttcctgctgcacatcatccagaggcaggccagcagccagagcatgccctggctggccgacctggtgcagagcagcgagggcagcctggatgtgctgcctgtgcagtgcctgtgtgagttcctgctgcatgatgctgtggatgatgctgccagcggggaggaggatgatgaaggagagagcaaggagcagaaggccaagaagaggcagaggcagcagaagcagaggcagctgctgggccgcctgcaggacctgctgctgggccccaaggcagatgagcagaccacctgtgaggtgctggactacttcctgcggcggctgggcagcagccaggtggccagccgggtgctggccatgaagggcctgagcctggtgctgtctgagggcagcctgagagatggagaggagaaggagccccccatggaggaggatgtgggggacacagatgtgctgcagggctaccagtggctgctgcgggacctgccccggctgcccctgtttgattctgtgcgcagcaccacagccctggccctgcagcaggccatccacatggagacagacccccagaccatcagcgcctacctgatctacctgagccagcacacccctgtggaggagcaggcccagcacagcgacctggccctggatgtggcccggctggtggtggagaggagcaccatcatgagccacctgttcagcaagctgagccccagcgctgccagtgatgctgtgctgagcgccctgctgagcatcttcagccgctacgtgcggaggatgaggcagagcaaggagggggaggaggtgtacagctggagcgagagccaggaccaggtgttcctgcgctggagcagcggggagacagccaccatgcacatcctggtggtgcacgccatggtgatcctgctgaccctgggcccccccagggcagatgacagcgagttccaggccctgctggacatctggttccctgaggagaagcccctgcccacagccttcctggtggacaccagcgaggaggccctgctgctgcctgactggctgaagctgaggatgatccgctctgaggtgctgcggctggtggatgctgccctgcaggacctggagccccagcagctgctgctgtttgtgcagagctttggcatccctgtgtcctccatgagcaagctgctgcagttcctggaccaggccgtggcccatgacccccagaccctggagcagaacatcatggacaagaactacatggcccacctggtggaggtgcagcacgagcggggggccagcggcggccagaccttccacagcctgctgacagccagcctgcccccaagaagagacagcacagaggcccccaagcccaagagcagccctgagcagcccatcggccagggccgcatccgggtgggcacccagctgcgggtgctgggcccagaagatgacctggccggcatgttcctgcagatcttccccctgagcccagacccccgctggcagagcagcagccccaggcctgtggccctggccctgcagcaggccctgggccaggagctggcccgggtggtgcagggcagccctgaggtgcccggcatcaccgtgcgggtgctgcaggccctggccaccctgctgagcagcccccatggaggagccctggtgatgtccatgcacaggagccacttcctggcctgccccctgctgcggcagctgtgccagtaccagagatgtgtgccccaggacaccggcttcagcagcctcttcctgaaggtgctgctgcagatgctgcagtggctggacagccctggggtggagggcggccccctgcgggcccagctgaggatgctggccagccaggccagcgctggccggcggctgagtgatgtgcggggcggcctgctgcggctggccgaggccctggccttccggcaggacctggaggtggtgagcagcacagtgcgggctgtgattgccaccctgcggagcggggagcagtgcagcgtggagccagacctgatcagcaaggtgctgcagggcctgattgaggtgcgcagcccccacctggaggagctgctgacagccttcttcagcgccacagcagatgctgccagccccttccctgcctgcaagcctgtggtggtggtgagcagcctgctgctgcaggaggaggagcccctggccggcggcaagccaggagcagatggcggcagcctggaggccgtgcggctgggccccagcagcggcctgctggtggactggctggagatgctggaccctgaggtggtgagcagctgcccagacctgcagctgcggctgctcttcagcaggaggaagggcaagggccaggcccaggtgcccagcttccggccctacctgctgaccctcttcacccaccagagctcctggcccaccctgcaccagtgcatccgggtgctgctgggcaagagccgggagcagagatttgaccccagcgccagcctggacttcctgtgggcctgcatccacgtgccccgcatctggcagggccgggaccagaggaccccccagaagagaagagaggagctggtgctgcgggtgcagggccctgagctgatcagcctggtggagctgatcctggccgaggccgagaccaggagccaggatggagacacagctgcctgcagcctcatccaggcccggctgcccctgctgctgagctgctgctgcggagatgatgaatctgtgaggaaggtgacagagcacctgagcggctgcatccagcagtggggagacagcgtgctgggccgccgctgccgggacctgctgctgcagctgtacctgcagaggcctgagctgcgggtgcctgtgcctgaggtgctgctgcacagcgagggcgccgccagcagctctgtgtgcaagctggatggcctcatccaccgcttcatcaccctgctggccgacaccagtgacagccgggccctggagaacagaggagcagatgcctccatggcctgcaggaagctggccgtggcccaccccctgctgctgctgcggcacctgcccatgattgctgccctgctgcacggccgcacccacctgaacttccaggagttccggcagcagaaccacctgagctgcttcctgcacgtgctgggcctgctggagctgctgcagccccacgtgttccgctctgagcaccagggcgccctgtgggactgcctgctgtccttcatccggctgctgctgaactacaggaagagcagccgccacctggccgccttcatcaacaagtttgtgcagttcatccacaagtacatcacctacaatgccccagctgccatctccttcctgcagaagcacgccgaccccctgcatgacctgagctttgacaacagcgacctggtgatgctgaagagcctgctggccggcctgagcctgcccagcagagatgacagaacagaccggggcctggatgaggagggggaggaggagagcagcgctggcagcctgcccctggtgtctgtgtccctcttcacccccctgacagctgctgagatggccccctacatgaagaggctgagccggggccagacagtggaggacctgctggaggtgctgagtgacattgatgagatgagcagaagaagacctgagatcctgtccttcttcagcaccaacctgcagaggctgatgagcagcgctgaggagtgctgcaggaacctggccttcagcctggccctgcgctccatgcagaacagccccagcattgctgctgccttcctgcccaccttcatgtactgcctgggcagccaggactttgaggtggtgcagacagccctgaggaacctgcctgaatatgccctgctgtgccaggagcacgccgctgtgctgctgcaccgggccttcctggtgggcatgtatggccagatggaccccagcgcccagatcagcgaggccctgcgcatcctgcacatggaggccgtgatgtag

SEQ ID NO: 36563 - DNA, 7185 bp, Artificial Sequence
  derived and/or modified sequence
atgtggctgagcggcaagagccaggtgcagaagcggggcgccgtgcgctatctgcaagcccccccagtgaatggggaagcctccgcttgcccggcccctcccactcaccttgatcgcacaacgtgtgcccgccggaggcccgcccgtctgcctccaccatggggggctgcaggaattagaccagcacctcgggcttcccgcgccagtttctgggcacgttttccgccacattgcttcccatctgggtgttctggatctagggtgctggaggggggcgagattggattccgctttagagggggccgggtggccgctgccgctctcagatcccgttgggcccggggcgatgccgcagccgccgggagtcgcgagggaagagggcggatgaaccgagctaagcccacaactgtccgccgaccttcagccgcggccaagccaagtggccacccaccaccaggtgattttatcgcgctaggcagtaaaggccaggcaaacgaatccaagactgcctcgaccctcctgaaacccgcccctagcggcctgccatcagaaaggaagcgggacgccgctgcggccctgtcttctgccagtgctctcactgggctgactaaaagacccaaactctcgtcgacaccaccactttccgccctgggccggctcgcagaagctgcagtcgcagaaaaaagagctatatcgccaagtatcaaagaaccatcagtggtgcccatcgaagttttgcctacagttcttctggatgagatcgaagcagctgaactggagggcaacgacgatcggatcgaaggtgtgctctgtggggccgttaaacagctgaaagtgaccagagccaagcctgattccacactatacctcagccttatgtatctggccaagatcaagccaaacatttttgcaactgaaggggtgatcgaagccctttgcagcctgcttcgccgggacgcttccataaactttaaggcaaaaggtaatagtttagtgtccgtgttagcctgcaaccttttgatggccgcttatgaagaggatgagaattggcctgagatcttcgttaaggtgtacatcgaagactcgctgggcgaacggatttgggttgatagcccccactgtaaaacttttgtggacaacattcaaacggcttttaacacgaggatgcctccaaggagcgtgttgctgcaaggggaagctggacgcgtcgctggcgacctgggggccgggagcagtcctcatccctccctgactgaagaggaagactcgcagaccgaactgctgatagcagaggagaaacttagccccgagcaggagggccagcttatgccgcgctatgaggaattagctgagagcgtcgaggagtacgtcttagatatgctgagagatcagttgaaccgtcgccaaccgatcgacaatgtgtctagaaatctgctgcgactgctcacatcgacctgcggctacaaggaggtgcgcctactggctgtacagaaactggaaatgtggcttcaaaatcccaaactgacccgtccagctcaggaccttctgatgagcgtgtgtatgaactgcaatacacacggaagcgaagacatggacgttatttctcacctgatcaaaatcagattgaagccaaaggtattgctcaaccacttcatgttatgtattagagaattgctgagtgctcataaagacaacctgggcactaccattaagctcgtgatttttaatgagctctctagtgcccgcaatccaaataacatgcaggtcctgtacaccgcactgcagcatagctccgaactggccccaaagttcctcgccatggtgttccaagatttgctcaccaacaaagacgactacctccgtgcctctcgcgctttgctgcgggaaatcattaaacagactaagcacgagatcaattttcaagctttctgtctgggtctgatgcaagagaggaaagaaccacagtatctcgagatggaattcaaggagagattcgtagtccatatcacagatgtgttagcagtatccatgatgctgggtatcacagcccaggtcaaagaggccggtatcgcatgggacaaaggagaaaaacgaaaccttgaggtgcttaggtcgtttcagaaccaaatcgctgccattcagagggacgccgtttggtggttacacaccgtggtcccatctatctcaaaactagcccctaaggattacgtgcactgtctgcataaggtgttgtttacggagcagccggagacatattataagtgggacaactggcctcccgaatctgatcgaaactttttcttgcgcctctgttctgaggtgccaatcttggaagatacattaatgcgaatcctggtgatcgggctttccagggagttgcccctcggcccggctgatgctatggagctggcagaccatctggtaaagagggccgccgcggtccaggcggacgacgtggaagttctcaaggtggggaggacacagcttatcgacgctgtgctgaatctatgcacgtatcatcatccagagaacatccagctacctcctggctaccagccccccaatctagccatcagcactctgtactggaaagcctggcccctgctgctcgtggtggccgcatttaatcccgagaacataggtttggccgcctgggaggagtatcccactctgaagatgctgatggagatggttatgaccaacaattattcctatccaccctgtaccctgaccgatgaagagacaagaacagaaatgctgaacagggaactgcagacagctcagagagaaaaacaggagattcttgcgtttgagggccaccttgctgccgctagcaccaaacagacgatcaccgagtcttcgagtctgttgctgagtcagctgacgtctctggaccctcagtacgcagcccatacagcgcccccatgtgcttgtcgacgtgatctgggacctcctcgacggcccccaccccacattctggatcaggttaagtccctgaatcagagcttgcgcctcggacacctcctctgccggagcaggaaccctgatttcttgctgcacatcattcaaaggcaggcctccagccaatctatgccatggttagcagacctcgtgcagtcctccgaaggatctctcgatgtcctcccagtgcagtgcctgtgtgaatttctgctgcacgatgctgtagacgatgccgccagtggggaagaggacgatgaaggggagtcaaaggaacagaaagccaagaaacgccaacggcagcagaagcagcggcagcttctagggcggttgcaggaccttctcctcggaccgaaggccgatgaacagactacatgcgaagtactggactacttccttagaaggcttggatcaagtcaggtggcttcacgggtgctcgctatgaaaggtgagactctgcctgctctgcctaaagcaggcccagcacacgaatgcttgccccagggtctgagcctggttctgtccgagggctctctaagagatggcgaggagaaagagccccccatggaggaggatgtgggcgacactgacgtgttgcagggctatcagtggttgctgcgagacctacccaggcttccactgttcgattccgtgcgctcaactacagccctggcactacagcaggccatacatatggaaacggatcctcagacaatctcagcctatctgatatacctgagccagcatacgccggtggaggagcaggctcagcattccgatttggcacttgatgtcgcacgcctcgtagttgagcggtccaccatcatgtcccatctcttctcaaagctctcaccatctgccgcctccgatgcagtgttaagcgcactgctgagcatcttttctaggtacgtacggaggatgagacaatcgaaagagggtgaggaagtgtactcttggagtgaatctcaggaccaagtttttttgcgctggtcttcaggggagaccgcaacgatgcacattttagtggttcacgcgatggtaatattactcacgctcggtcctcctcgtgccgatgactcagagtttcaagccctgctcgatatctggttcccagaggagaaaccgctgccaaccgctttccttgtcgacaccagtgaggaagccctgctcctgccagattggctgaagctgcgcatgattcggtccgaggtgctgcgtctggtcgatgccgctttgcaagatctcgagccacaacagttactcctgttcgtacagagttttggcattcctgttagcagtatgagtaagttgctgcagttcctggatcaggccgtggcccacgatccacagacattagagcagaacattatggataagagcaagatgcccggcacgtgtggagttggctctcatactttgactgagcctcagcctgggcaggcctttggagcctgggtccgcgccggagtgaccctcctccgcttcgccgattacatggctcatctcgtggaagtccagcacgaaagaggcgctagtggcggtcagaccttccacagcttgttgacagcttcgctcccaccacgcagagactcaaccgaagccccaaagccaaagtcaagtccagaacaaccgatcggacaaggacgaatccgggtagggacacaacttagggtattgggccccgaagacgacctcgcaggaatgtttctccagatctttccgctctctcccgatccacgttggcaatcctcatctccacgtcctgtggcactggcactgcagcaggcgcttggccaagaactggccagagtggtccagggttcaccagaggtgcctggaataacagtcagagtcctgcaggcccttgccacactgcttagctctccccacggcggggcattagttatgagcatgcacagaagtcactttctggcatgccccctgctccggcagctctgccaatatcagcgctgcgtcccccaggataccgggttcagctccctcttccttaaggtactgctccagatgttacagtggctcgactcgccaggggtcgagggcggccctctgcgcgcccagcttcgcatgctggctagccaggcttctgccggacgaaggttgtctgacgttcgcggaggcctcctccgcctggctgaagcattagcgttccgccaagacctggaagttgtgtcgtcaaccgtgagagctgttatagcaaccctgaggtccggggagcagtgctccgtggaaccggacctgattagcaaggttcttcagggtttaatcgaagtcagatctccccacctggaagagctactgactgcctttttctccgcgactgcggacgctgcgtccccgttccctgcctgcaaaccagtggtggttgtgtctagcttactcctgcaggaagaggaacctctggccggcgggaaacctggcgctgatggcggaagtttggaggcagttaggttgggacctagcagtgggcttttagtggattggctcgaaatgcttgatcctgaggtcgtttcctcctgtcctgacctccagctgaggcttctgttctcccgacgtaagggcaagggacaggctcaagttccatctttcaggccttatctgttgaccctgttcacacatcagtctagttggcccaccctgcatcagtgcataagagtgcttctgggaaagtcccgggaacagaggttcgatccatctgcatcgctagacttcttatgggcatgtattcatgtccctcgtatttggcaagggagagaccagaggactcctcaggcgggtttgggccggaagcgccgcgaggagcttgtattaagagtgcaaggtcccgaattgattagcctcgttgaactcatcttggcggaggctgaaacaagaagccaggacggtgacactgctgcctgttccctcatccaggcaaggctgccgttgctgctctcgtgttgctgcggggatgacgagtctgtaagaaaagttactgagcatctgtcgggctgcatccaacagtggggggattccgtcctcggacgccgttgtcgcgacctgctcctgcaactttaccttcagcgacctgagctgcgagttcccgtccctgaggtcttgttgcactccgagggcgcggcatcctcctcggtctgcaaattagatgggttgatccacagattcataactttactggccgacaccagcgattcaagagccctcgaaaacagaggggcagacgcgtctatggcctgtaggaaactggctgttgcccatcccctgttactcttgaggcacttgcccatgatcgctgcattgctccacgggaggacgcacctgaatttccaggaatttcgtcagcagaaccacttaagctgcttcctacacgtcctcggtctgttggagttactgcaacctcacgtgtttcgtagtgagcatcagggggcgctgtgggattgcctcctgagttttattagactgctcctgaactaccgcaagagttccagacatcttgctgctttcatcaataagttcgtgcagtttattcacaaatacattacctataacgcgccagctgcaattagtttcttgcagaaacacgcagatcctcttcatgacttgtcattcgacaactcagatctcgtgatgctgaaatcgctcttggctgggttaagcctgccgagccgtgatgatcgcacagaccggggactcgacgaagagggcgaggaagagagctccgctggaagtcttcctctcgtgagtgtgtctctgttcacccccttaaccgcggccgagatggctccctatatgaagcgcctctcacgcggtcaaaccgtggaggacctcttagaggttttgagtgacattgatgaaatgtcacgccggaggcctgagatactgagcttctttagcactaacctgcagcggctaatgagcagtgccgaggaatgctgtcgcaacttagcttttagcttggctttaagaagcatgcagaattccccttccatcgccgctgcttttcttcctactttcatgtattgcctggggtctcaggacttcgaggtggttcaaacagcactcaggaacttgccagagtatgcccttctttgccaggaacatgcagccgttctgctgcaccgagcattcctggtaggcatgtatggccagatggatccatcggctcaaatcagcgaggcactgagaattcttcatatggaagcagtgatgtag

SEQ ID NO: 36564 - DNA, 6573 bp, Artificial Sequence
  derived and/or modified sequence
atgaaccgggccaagcccaccaccgtgcggcggcccagcgccgccgctaaaccatctggccaccctcctcccggcgattttatcgcgttagggtccaaagggcaagcaaatgaaagcaaaacagcttcaactctgctgaaaccagctccgtctggcctcccatccgagcgtaaacgggacgctgcagcggcgctatcaagtgccagcgctctgaccggactgacaaagagacctaaactgtcttctacccctcctctgtccgctttgggacggctggccgaggctgccgttgccgaaaagcgtgcaatcagtcctagcattaaggagccctcagtggtacccattgaggtcctgcctactgtgttgttagacgaaattgaggcagctgaactggaaggaaacgatgaccggattgagggagtgctgtgcggggccgtaaagcagctgaaagtgacacgagctaagcctgattcaaccctgtacctctctctaatgtacctggctaaaatcaaaccgaatattttcgccacggagggggtgatcgaggctctctgctctcttctccgaagagacgcctctatcaactttaaggcgaaaggcaacagccttgtctctgtgctggcatgcaatctgctcatggccgcctatgaggaggacgagaactggccggagatcttcgtaaaagtgtacatagaggatagtctgggcgaacggatttgggtggattctccccactgcaaaacattcgtggacaacatccagactgcatttaatacccggatgccccctagatcagtgctgctgcagggggaggcgggacgcgtggctggggatctcggcgccggctcatccccccacccgtcgctgactgaggaggaagactctcagactgagttgctcattgccgaagaaaaactctctcctgaacaggagggacagctgatgccacgctatgaggagctggctgagtccgtcgaggaatacgtgttggacatgttgcgtgatcagctgaatcggcggcagccgattgacaatgtgtctcggaacttgctgcggttgttgacctctacgtgcggctataaagaggtccgcctgctggcggttcaaaaactagaaatgtggctgcaaaatccgaagctgaccaggcccgctcaggacctgcttatgagcgtgtgcatgaattgcaatacacacgggtccgaggatatggacgtgataagtcacttgatcaaaatccgcctgaaacctaaggtacttcttaatcactttatgctgtgcatccgcgagctgctgtccgcccacaaagacaatttgggcaccactatcaaactggttatcttcaatgaacttagctccgccagaaacccaaataacatgcaggtcttgtacaccgcactacaacattctagcgaactggcccccaagttccttgctatggtcttccaggacctcctgactaacaaagacgattatctgcgagccagcagggcccttctgagggagataattaagcagactaagcacgaaattaactttcaggccttttgtctgggacttatgcaggaacggaaagaaccccagtacctggagatggagtttaaagagcgatttgtcgtgcacatcacagatgtgctcgcagtgtcaatgatgttggggatcacagcacaggttaaggaagcgggcattgcatgggacaaaggtgagaagaggaatctggaagttctgcgaagttttcagaatcagatcgccgctatccagcgagacgccgtgtggtggctgcatactgtggtccccagcattagtaagctggctcctaaagactatgtgcattgtcttcacaaggtgcttttcaccgagcagcctgaaacatactacaaatgggacaattggccacctgagagcgatcggaacttcttcctgagactgtgcagcgaggtgccgatcctggaggatacgctgatgagaatcctggttatcggcctttcgagagaactgccactcggcccagcagatgccatggagcttgcagatcatctggttaagcgcgccgctgccgtgcaggcggacgatgtagaggtgctcaaggtgggaagaacccagttgattgacgctgttctcaacctgtgcacttatcaccaccctgagaacatccagttaccaccaggataccagcccccaaacttagccatttcaaccctgtactggaaagcgtggcccctgctgctggtggtggccgcttttaatcctgagaatatagggctcgccgcgtgggaagaataccctacccttaagatgctgatggagatggttatgacaaataattatagttaccccccctgtacattgaccgacgaggagaccaggaccgaaatgcttaaccgggaactgcagacagcacagagggagaagcaggaaatactcgcctttgaaggacacctagccgcagcatccactaagcagacaataaccgagagcagctccctcctcctgtcccagttgactagtctggacccacaagggcctcctagacgcccccctcctcacattttagatcaggtgaaaagtcttaaccagtcactcaggttgggccacctactatgtcggagcaggaatcccgattttctgctccacattattcagcgccaggcaagtagtcagtccatgccctggttggccgacctggttcaaagctccgagggcagcctagacgttctgcctgtgcagtgcctgtgcgagtttttgcttcatgatgccgtagacgacgctgcttctggggaggaagacgacgaaggtgagagcaaggaacagaaagccaaaaaacggcagaggcagcagaaacagaggcagttgcttggccgcctgcaagacctactgctggggccaaaggccgatgaacagactacctgcgaggtgctggactactttttacgtaggctgggtagctcgcaggtagccagccgtgtgctggccatgaaagggctgtcattagtgttgtctgaaggatcacttcgcgatggtgaggaaaaggagccaccaatggaggaggacgtcggcgacactgatgtcctgcagggctaccagtggttgctcagggacctgccacgcctccccctgttcgattccgtcaggtctaccaccgctctggccctgcaacaggcaatacacatggaaactgacccccaaacgatctccgcttacttgatttacctttcacaacatacacccgttgaggaacaagcccaacacagcgacctggctttggacgtggccagactggtagtcgagcgttctacaattatgtcacatctgttcagtaaactctcaccctcagccgcctctgatgctgtcctttccgcactcctgagcatattcagccgttacgtgcgtaggatgaggcagtcaaaggagggggaggaggtgtattcttggtcagagtcccaggatcaggttttcctccgttggtcatcaggcgaaaccgccactatgcacattttggtggttcacgcaatggtcattctcttgacactggggccccctcgcgctgacgattctgaatttcaggccctgctggatatttggtttcccgaagaaaagccccttccaaccgcctttttggttgacacttctgaggaggcactgctgttgcctgactggttaaaattacgcatgatccgctccgaagtgctcagattggttgatgctgccttacaggacctggagccccaacaacttctgctgtttgtgcagtcttttggcatccctgtgagtagtatgagcaagctgcttcagttcttagatcaggcagttgcccatgacccccagacactagaacagaatataatggataagaactacatggcccacctagtggaggtacaacacgagcgcggagccagtggcggccagacctttcactccctactgaccgctagtctccctcctcgccgtgacagtacagaagctcctaagcccaaaagctctcctgaacaacctattggccagggacgtatccgcgtcggaacccagcttcgggtgctgggtcctgaagatgacttagcaggcatgttcctgcagattttccccctgtctcccgatccgagatggcagtcaagctcacccaggcccgttgcactggccttacagcaggccctaggacaggagctcgcgagagtggtccaggggtctccggaagttcctgggatcacagtgagagtgctccaggctttggcaacactcctgagcagcccacacggcggcgcactggtgatgagcatgcacaggtcccatttccttgcatgtcctttgctacgccaactatgtcagtaccagcggtgtgtgccacaggacactggcttctccagcctgttcctaaaagttttgctgcagatgctacagtggctggatagccccggggtggagggtggaccactgagggcccaattacgaatgctggcatcacaggcctctgcgggcagacgcttaagcgacgtgagaggtggactactccgcctggcagaagccttagcgttcagacaggaccttgaagtggtctcatcaactgtaagggccgtcatcgcgacgttaaggtcgggagaacagtgtagcgttgagccagatctgatttccaaagtcctgcagggtctcatcgaagttaggagcccccacttagaggagcttctcacagcattcttctccgccacagcagatgccgcgagcccgtttcccgcttgtaagccagtcgtggtagtgtcttcattattgctacaggaggaggaacctctggccggcggaaaaccaggcgccgatgggggcagcctcgaagccgttcggttgggaccctctagcggtctcctggtggattggttggaaatgctggacccagaggtggtgtcttcttgccccgacttgcagcttcgacttttattttccaggcgcaaggggaagggccaagcccaggtgccatccttcaggccctatcttctgacgctgttcacgcatcagtcgtcctggccaactctccaccagtgtattcgagttctactaggcaaatccagagagcagaggttcgacccttctgccagtttggacttcctctgggcctgcatccatgtgccaagaatatggcagggcagagaccaaaggacaccccagaaaagacgcgaggaactcgttcttcgagtgcagggcccggagcttatttctctggtcgagctaatactggctgaagctgagacccgtagtcaggatggagacaccgctgcgtgcagcctcatccaggcacgcctgcctttgctgttgtcttgctgctgcggggacgacgagtccgttaggaaagttacggagcatctcagcgggtgcatccagcagtggggtgattctgtgctcggtcgcaggtgccgggacttgttgttgcagctgtaccttcagagacccgaactgcgtgtcccggtgccggaggtgctgctgcactctgagggtgccgcgagctcaagcgtgtgtaagctcgatggacttatacatagatttattactctattggccgatacttcggatagccgcgcactggagaaccgtggggccgacgctagcatggcatgcaggaagctggccgtggcccatccactgctgttactgcggcatctccctatgatcgcagctttactgcatggacgcacacacctcaattttcaggagtttcgccagcagaaccacctctcttgttttttacacgtcctgggcctgctcgagctactacaaccacacgtcttccgatctgaacaccagggagccctgtgggactgcctgctgtcatttatccgtctgcttttgaattatcggaagtctagtagacatctggctgcattcatcaacaaatttgtgcagttcatacataaatacattacctataatgcccctgccgccatcagttttctgcaaaagcacgctgatcctctgcacgacctgtcatttgacaattccgacctcgtcatgctgaaatccctcctggccggactaagcctccctagcagggatgaccgtaccgaccgaggacttgatgaggaaggagaggaagagtccagcgccggctcactaccgctggtaagcgtctccctgttcaccccgctcacagccgcggaaatggctccctacatgaagagactgagccgtggtcagaccgtggaggatctcctcgaggtgctatctgatatcgatgaaatgtccaggaggaggccagagatcctgtcctttttctccacaaacttacagcgcctgatgtcttcggctgaagaatgctgccgcaacttagcattttccctcgcgctaaggagcatgcaaaacagtcctagcatcgccgctgcattcttgcccaccttcatgtattgcctgggcagccaggacttcgaagtagtgcagacagctttacgcaacctgccagaatacgcactactttgtcaggaacacgccgcggtgctattgcacagagccttcctggtcgggatgtatgggcagatggaccctagcgcccaaatctcggaggcccttcggatcctgcacatggaggcagtgatgtag

SEQ ID NO: 36565 - DNA, 7184 bp, Artificial Sequence
  derived and/or modified sequence
atgtggctgtcgggaaagtcccaggtccaaaaaagaggagctgttcgatacttgcaagcaccaccggttaatggagaggctagtgcttgccccgcaccacccactcacttagacaggactacttgcgctaggcggaggcctgctcggctacctcctccttggggagcggctggcattcggccagcccctcgggcttcgcgagcttcattttgggctcggttcccccctcactgcttcccttcaggatgcagcgggtcccgcgtcctcgagggcggagagattggcttcagattccgaggaggcagagtcgcagccgcagccctgagaagcagatgggcgcgaggtgacgctgctgcagctggttcaagagaaggccgtggtcggatgaacagagcgaagccaaccacagtgcggcgaccttccgcggcagctaagcctagcggccatcctcctccaggtgattttatcgccctgggtagcaaggggcaagccaacgaatccaaaaccgcatctacattattaaaacccgcaccctcaggcctaccaagcgaaaggaaaagggacgcagccgctgccctgagcagcgctagcgcactgaccggtctcacgaagaggccgaagttgagctcaacccctccactctccgctctgggcagacttgccgaggcggctgtggctgagaaaagggcgatctctccttctatcaaggagccctctgtcgttccgatagaggtattgccaacagtgctgctagatgaaattgaggccgctgagctcgaaggaaacgacgaccggatcgagggagtgctgtgcggagccgtgaaacagctcaaggtaacacgagcaaagccagatagtactctctatctcagcctgatgtatctggccaaaattaaacccaacatatttgcaaccgaaggggtgatagaggccctgtgtagcttgctgcggagggacgcatctatcaatttcaaggcaaaaggtaactctctcgtgtctgtgttagcttgtaatctactcatggccgcatacgaagaggatgaaaattggcctgagatttttgtaaaggtgtacatcgaggatagtctgggagaacgtatttgggtggactcgcctcactgtaaaacatttgtcgacaatatccaaacagccttcaacacacgaatgccacccagatccgtgttgttacagggggaggcaggacgggtcgccggagatctgggagcaggctctagtccccatcccagccttaccgaggaagaggattcccagaccgagctcctcattgcagaagaaaagctaagcccagaacaggagggtcagctcatgcctaggtacgaggagctggccgaaagcgtagaagagtacgtgttggatatgctgcgtgatcagctaaaccgtagacagcctatcgacaacgtgtcaagaaacttgttgcgcctactgacaagcacatgtggatacaaagaggtacggctgctggccgtgcagaagcttgaaatgtggctgcagaatcctaagctgactaggcccgcacaagacttgcttatgagcgtgtgcatgaattgtaacacacacggatccgaggatatggatgtgattagccacctcattaagatcagactgaagccaaaggtgctcctcaatcactttatgctctgtattcgcgaactgctatccgcgcacaaagataacttagggaccacaattaaactggtgatatttaatgagctgagcagtgccaggaatccaaacaacatgcaggtcctgtacacagccctgcagcactcaagcgaactcgctcctaaattcctcgccatggtatttcaggacttgctcaccaataaggacgattacctgcgtgcttcccgtgccttgttgcgggagatcattaagcagaccaagcacgagatcaatttccaagccttttgtctgggcctcatgcaggaacggaaagaaccccagtacctggagatggaatttaaagaacgatttgtcgtgcacattacggacgtcttggcagtctccatgatgttggggataacagcacaggtcaaagaggctggaatcgcctgggataaaggagaaaaacgtaatttggaagtgttaagatctttccagaatcagatcgcagccatccagcgcgacgcggtgtggtggttgcacaccgtcgtgccaagcatcagtaaactcgctccaaaagattacgtacattgcctgcacaaggtgttgttcactgagcaaccagaaacttactataaatgggataattggccacctgaatctgatcgcaactttttcctacgcctgtgctccgaggtccctattctggaagatacacttatgcggattctcgtgattgggctgtccagggagttgcctctgggacccgcagatgccatggagctggcagaccatctcgtcaagagggccgcagccgtgcaggccgatgacgtagaagtccttaaggttgggaggactcagctgatcgatgccgtcctcaatctctgtacttaccatcacccggaaaacatacagctgcctccaggttaccagccacctaacctggctatatccactctgtattggaaggcatggcccctgttacttgtggtggcggctttcaaccctgagaacatcggcctggccgcatgggaggagtacccaacccttaaaatgctgatggaaatggtcatgacaaacaactactcttatcccccatgcacactgactgacgaggagaccaggacagaaatgcttaaccgggaactccagactgcacagagggaaaagcaggaaattttggcttttgaggggcacctggccgcagcaagtacgaaacaaaccatcacagaatcctccagcttactgttgtcccagctcaccagcctcgacccccaatatgcggcacacactgccccaccctgcgcttgtcgccgagatctcggacctccgagacggccaccaccgcatatactagaccaggttaagagtttgaaccaaagcctaaggttgggccacttgctgtgtaggtcccggaatccggactttctgcttcatatcattcagcgccaagcgtcgagccagtccatgccctggctggccgatctggtgcaatcctcggagggatccctggacgtcctgcctgtccagtgcctgtgtgagttcctcctacacgacgcagtagatgacgccgcaagtggggaggaagatgatgaaggtgaaagcaaggaacagaaggccaagaagaggcagcggcagcagaaacaacggcaactcctggggcgactgcaggacctgttgctcgggcctaaggccgatgaacagaccacttgtgaggtgctggactacttcctcaggcgacttggctcctctcaggtggcctcaagggtgttagctatgaagggcgaaaccttgcctgcgctcccaaaggctggccctgctcacgaatgcctgccccaggggctctccctcgtactgagcgaaggttctctgcgggatggcgaggagaaagaaccgccaatggaggaagatgttggcgataccgatgtattgcagggttatcagtggcttttgcgcgacttgcctcggctccccctattcgattcagtgcgctccaccactgccttggcactccagcaagctatccacatggagacggatccacaaacgatatctgcctatttgatttacctcagccagcacacacccgtggaagagcaggcacagcactccgacctggctctagacgtggcaagactcgtggtagagcgcagcacaatcatgagccatcttttttccaagttgtccccctcagctgctagtgatgcagtgctgagtgccctgctctccatcttctcccgctatgtacgacgaatgcgtcagtcaaaagagggagaggaagtttatagctggagcgaatcccaggaccaggtattcctgcgatggtcctctggcgagactgctacgatgcacattctggtggtgcacgcgatggttattctgttaacactgggccctccacgcgctgacgactctgaattccaagcccttctagacatatggtttcctgaggagaagcctctccctactgccttcctggtggacacaagcgaggaagctctgctgttgcccgactggctgaaattgcgaatgatcagatccgaggtgcttcgattggtggatgcagccctgcaagaccttgagcctcagcaactgctgctgtttgtgcaaagtttcggaattcccgtgtcttcaatgtctaagctgctgcagtttctggaccaagcagtggcgcacgacccccaaacacttgaacagaacattatggacaagtccaaaatgcctggaacatgcggcgtaggctcccacactctcacagaaccccaacctggtcaggcctttggagcttgggttcgcgctggagtcaccctcctgagattcgcggactatatggcccacttagtagaagttcagcatgagcgcggtgctagcgggggtcagaccttccatagcctgctaaccgctagtctgcctcccagaagggactcaactgaggctcccaagccaaagtcttcgccagagcaaccaatcggccagggtaggataagggtcggcactcagcttcgtgtactaggacctgaggatgatctggcgggaatgtttttacagatcttcccactttctccggatccgcgttggcagtcttccagcccgcgacctgtagcattggcgttgcaacaagccctgggacaggagttggcaagagtggtccaaggctcacccgaggtcccgggaattaccgtccgtgtcctccaggccttggctacccttttaagctcaccccacggcggagcactggttatgtctatgcaccgatcacacttcttggcttgtcctctgctgcgacagctctgtcagtaccagcgatgcgtcccacaagacacgggattctctagtctgtttctgaaggtgctcctgcagatgctgcaatggctggatagccctggagttgaaggcggtcctctgagggcacaacttcgcatgctggcctcacaggctagcgccggacgaaggttgtccgatgtgcggggaggactcttgcggctcgccgaggccctcgccttcagacaggacctcgaggtggtctcctccaccgtgagagcagtgattgcaacgctgcgtagcggagagcagtgctcagtggaacctgatctgatatccaaggttctgcaaggcctgatcgaagtaagaagtcctcatctggaggagctgttgacggcattctttagtgcaaccgcagacgccgctagccctttccctgcatgtaagcctgtggtggttgtcagctcactgctgctccaggaggaagagccactggcaggcggtaagcctggagccgatgggggttcactcgaagctgtgaggctgggcccttcatccggcttgttggtggactggctggaaatgctggacccggaggtggtgtctagctgccctgacctgcagttaagactgttattcagcagacgcaaggggaaaggtcaagcccaggtaccatcctttcgtccctacctgctcacattattcactcaccagagcagttggccaacactacatcagtgcatccgagttctcctgggcaaatcccgcgaacagcgtttcgaccctagcgcttcattggactttttgtgggcatgcatccacgtgccaagaatttggcagggtcgtgaccaacggaccccccaggccggattgggccgaaaacgaagagaggagctagtgttacgggttcaaggacccgagctcattagcctcgtcgagctgatactagccgaggcggaaacacgctcccaagacggagataccgcagcctgcagccttatccaggccagactgcccctccttctatcatgctgctgcggtgatgatgagagtgtgaggaaggtgaccgagcacctgtctgggtgcattcagcagtggggcgacagcgtgttgggcagaaggtgccgtgatctgctcctgcagctgtaccttcaaaggccagagctgagagtgccagtccccgaagtgctgcttcactccgaaggagccgcttcgtcatccgtctgcaagttggacgggttgattcataggttcattaccttgttggctgatacctccgacagccgagcactcgagaaccgcggagccgatgcttcaatggcctgcaggaaactggccgtggctcaccccttgctgcttctccgccatctgcccatgattgctgcattactgcatggacggacacatctgaatttccaagaattccgacagcaaaaccatttgagttgttttctccacgtgctggggcttttagaattgctgcagccccatgtcttccggagcgaacaccagggcgctctttgggactgtctactcagcttcatcagactactgcttaattatcgaaaatcgtcccgccatctcgccgcatttattaataagtttgtgcagttcatccacaagtatattacgtacaatgccccagctgcaatcagcttcctccaaaagcacgcggatcctctgcatgacctttccttcgataattcggatcttgtaatgctcaaatccctcctggcaggtctttccctgccaagtcgtgacgaccgtacggaccggggactcgacgaagaaggggaggaagagtcatctgccggatcgctgcctctagttagcgtcagcctgtttacaccacttactgcagcagaaatggccccttatatgaaaaggctgtcccgcggtcaaacagtggaggacctgctggaggtgctgtccgacattgacgaaatgtcccgccgaagacctgagatactatcctttttcagcaccaacctgcagaggcttatgtcttcagcggaggagtgttgccgcaacctagccttctccctcgcgctgcgaagcatgcagaattcaccatcgattgccgctgcctttctcccaacttttatgtactgtcttgggagccaggatttcgaggtcgtacagactgcgctccgtaatttgcctgagtatgcgttattatgtcaggaacacgccgctgtcttgctgcatagggcattcttggtgggcatgtacggacagatggacccaagcgcccaaatatccgaagcactcagaattctgcacatggaggctgtcatgta

SEQ ID NO: 36566 - DNA, 6572 bp, Artificial Sequence
  derived and/or modified sequence
atgaatagggccaagcctacaacagttagacgaccgtctgccgcagcgaaaccatctgggcacccaccccctggagacttcattgcactgggatcaaaaggacaggctaatgagtctaagacagcttccacactgttgaaaccagcgcctagcggccttccaagtgaacggaaaagagatgccgctgcagcactgagctcagcttcagccctgactgggttgactaagagacctaagctctcatcaaccccccctctgtccgctctagggaggctagccgaagctgctgtagccgaaaagcgcgcaatttccccgtctattaaggagcctagtgtcgtgccgatagaagtcctccctacagtgctgctggacgagattgaagctgcagagctggagggcaacgacgataggattgaaggggtcctgtgtggggcagtgaaacaacttaaggtgacccgagctaaaccagacagtactctgtaccttagtttgatgtatctggccaagatcaagcccaacatctttgctacagagggagtgattgaggccctgtgttctctcttgcgccgagacgcctcaatcaactttaaagcaaagggaaactcacttgttagtgtgctggcctgtaatctgctgatggccgcatatgaagaggatgagaactggccagagatattcgtcaaggtatacatcgaggactcactaggcgaacggatttgggtggattctccacactgcaagacctttgttgacaacatccagacggctttcaacacaagaatgccacctaggtcagtgctccttcagggggaagccggtagggtagctggggatctgggggcaggctcctccccacacccctcacttaccgaagaggaggattctcagactgaattattaatcgcagaggagaagctcagccctgagcaggagggccagttaatgcccaggtacgaagagctcgctgagtctgtcgaagaatatgttctggatatgctgcgggaccagttaaaccgcagacagccaattgacaacgtaagcagaaatctgttgcgtctgctcacctcgacttgcggctacaaagaggttagactcctggctgtccagaagctagaaatgtggctgcagaatcctaagctgacaagacccgctcaggatcttcttatgtccgtgtgtatgaattgcaacacgcatggctccgaagatatggacgtgatttcacacctaatcaagatcagactgaagcctaaggttctgctgaatcattttatgttgtgcattcgcgaattactgtccgcgcacaaagataatctgggcaccacaatcaaactcgttatctttaacgaactgagctctgcccgtaaccctaataacatgcaggtgctatacacggccctgcagcactcctcagagctcgccccaaagttcctagccatggtcttccaggatctccttactaataaggatgactaccttcgggcatccagagccttacttagagaaatcattaaacagactaagcacgagatcaatttccaggccttctgcctcgggctaatgcaggagcgtaaagagcctcagtatctggaaatggagttcaaagagcgcttcgtggtacatattactgacgtgcttgcggtgtctatgatgttgggcatcacggcccaggttaaggaagccggaatagcctgggacaagggagagaaaaggaaccttgaggtcctcagaagttttcaaaaccagatcgcggcaattcaacgggacgcagtgtggtggttacatacagtggtgccctcaattagcaagcttgccccaaaggactacgtccactgcctacataaggtgctgtttacggaacagccggagacatactataagtgggacaactggccccctgaatctgatagaaacttcttcctgcgcctgtgctctgaagtgcctattttggaggacacccttatgaggattcttgtgattggactgtctagagagctaccccttgggcctgcagatgccatggaattggcagatcacctggtcaaacgcgcagccgcagtgcaggcagatgacgtggaggtgctgaaagtgggtcggacacaacttatcgacgctgtcctcaatttgtgtacatatcatcaccccgagaacatccagctgcctcccggataccagcccccaaaccttgccattagcacattgtactggaaagcctggcctttattattggttgttgctgcattcaaccccgagaatatcggattagccgcatgggaggaataccccaccctgaaaatgctgatggagatggtgatgacaaataactattcatacccgccttgcacattgacagacgaggaaactcgtactgagatgttgaatagggaactccagactgctcagcgcgagaagcaggaaatcctggcctttgagggtcacctcgccgctgccagcacaaaacagaccatcacggagagcagctccctgttgctctctcaattgaccagcctggatcctcagggcccaccaagacgcccaccaccacatatcctggaccaggtgaagtcactcaatcagtcactgaggctgggtcatttgctttgcaggtctcggaatcccgatttcttgctccacatcatacagcgtcaggctagcagccaatcaatgccttggctggccgatttggtgcagtcctcagagggctcactagacgttctcccagtgcagtgcctgtgtgagtttctgttgcacgacgctgtcgatgacgccgcttccggggaggaggatgacgaaggagaatctaaggagcagaaggctaaaaagcgccagcggcaacagaagcaaaggcagctgttgggccgtctccaggacctgttgctcggcccaaaagccgatgagcagactacctgtgaagtgctcgattatttcttaagaaggctcgggagttcgcaggtagcgtctcgcgtgctagccatgaaggggctttcactagtcttaagcgaagggtcactgagggacggcgaggaaaaggagcctccgatggaggaggatgtaggggatactgacgttctacagggctaccagtggctgttgcgggatcttcctcgattacctctcttcgacagcgtacggagcacgacagcactcgcgttgcagcaggctatacacatggagaccgatcctcagacgatttcagcctacctgatttatttatcccagcacacaccagtggaggagcaggcgcagcactcagacctagcccttgatgttgctaggcttgtggtcgagaggtctaccattatgagtcacttgttcagcaagctctcccctagcgccgctagtgatgcggtgctgtctgcactgctcagcatttttagtaggtatgtccgcaggatgagacagtccaaggaaggagaagaggtgtattcatggagtgaatcccaagatcaggtttttctaagatggtctagcggtgaaacggcaacaatgcatattctcgtcgtccatgctatggtgattctcttgacgctggggccacctagagccgacgactcagagttccaagcactgctagacatctggtttccagaggaaaaacccctgcccaccgctttcctggtggatacaagcgaggaggcccttctgttacccgactggctaaaactgcgcatgattcgttctgaagtactgaggcttgtggatgctgccttgcaagacctcgagccccaacaactgcttttatttgttcagagttttggcatcccagttagtagcatgagcaaactgctccagttcctggatcaggccgttgcacacgaccctcagactctggagcagaacatcatggacaagaattacatggcccatctcgtggaagtccagcacgagcggggagctagtggaggccagactttccactccttattgacagcatccctgcccccaaggagggactcaactgaggccccaaaaccaaagtcaagtcccgagcagcccatcggacagggacggatccgcgtgggcacacagttgagggtgctcggacccgaggatgacttggctggtatgttccttcaaatttttcccttgagtcccgacccaaggtggcagtcaagtagccccagaccggttgctctcgccctgcaacaagctttaggccaggagctggcgagagtcgtacagggctctcctgaagtacccggaattaccgttcgggtgctgcaagcgctcgccacccttctttcaagcccacacggaggtgccttagtgatgtcaatgcaccggagccacttcctggcttgccccctcctgaggcagctatgccagtatcagaggtgtgttccacaggataccggcttcagctctctgttcctcaaagtgttgctgcagatgctgcagtggcttgacagcccgggagtggaaggagggcctcttcgtgcccagcttcgcatgctggcaagccaggcaagcgccggacgtaggcttagcgatgttagaggaggactgttgaggctagctgaggctctcgctttccgacaagacctggaagtggtttccagtaccgttcgagctgtgatagccacactcagaagtggagaacagtgcagcgtggagcctgatcttatatctaaggtgcttcagggtctgatcgaggttcgttcaccccatctggaggagctgctgaccgccttcttcagcgctactgcggacgctgcaagcccattccctgcctgcaagccagtagtggtggtcagttccctactcctccaggaagaggagcctctcgctggcggtaaacctggagctgatggcggatcactagaagccgtgagactgggaccctccagtggtctgctggtcgactggctggagatgctggaccctgaagtggtgtccagttgccccgatctgcagctgcgcctgctcttttcccgcagaaaggggaaggggcaagcccaggtcccaagctttcgtccgtacctgctgacattgtttacccaccagtctagctggccaactttgcaccagtgtatcagggtactgctcggcaagagccgtgagcaacggtttgacccatcagctagcctcgacttcctgtgggcctgcattcacgtgcctagaatctggcaggggagagaccagaggactcctcagaagcgtagggaagagctcgtcctgcgggtgcagggccctgaactgatcagtcttgtcgaactgattctggctgaagccgagacacgtagccaggacggtgatacagcagcgtgttcattaatacaagccagactgccgctgctcctctcatgctgctgcggggacgatgaaagcgtaagaaaagtgacagagcacctgtcaggatgtatccaacagtggggggattccgtcctgggacgacggtgcagggacttgctgctgcagctgtacctccagaggccagaactgcgggtccccgtcccagaagtgctcctgcattcggagggagcagccagcagtagtgtgtgcaaacttgatgggcttatacatcggtttattactctgttggccgacactagcgattccagggccctggagaatcggggtgccgatgcgtccatggcttgtaggaagctggccgttgctcatcccctcctgctgctgcgccaccttccgatgatagctgccctgctccacgggcgaacccatctgaatttccaggagttcagacagcaaaaccatctgtcttgctttctgcatgtactgggcctactggagctcctgcagccacacgtctttagatccgaacaccagggggcactgtgggactgcctgctcagcttcatccgtttattgttgaattaccggaagagttccagacatctggccgcttttatcaataaattcgtgcagtttatacacaagtatatcacctataacgcccctgccgctatttcctttctgcagaaacatgctgacccactgcatgacctgtcctttgataactctgatctagtgatgctcaagagcctgctcgcaggtctttcactgcccagccgagacgataggactgaccggggattggacgaagaaggggaggaggaatcgagtgccggatcactgcctctggtcagcgtaagcttatttacgcccctcaccgcggcagagatggctccttacatgaagagactgtcccgaggccaaactgtcgaggacttactcgaggtcctctcggatatagatgagatgtctagacgcagaccagaaatactctctttcttttctacgaacctgcagagactgatgtcgagtgccgaggaatgctgccgcaatttggccttctcactcgccctcagatccatgcagaattcaccctctatagctgctgcattccttccaacgttcatgtactgcctgggatctcaagattttgaagtcgtgcaaactgcactgcggaacctgcctgaatatgcgctgctgtgtcaggaacatgcggctgtgcttttgcaccgggcattcttggtcggaatgtacggccagatggaccccagcgcccagatatcggaggccttacgtatcttgcacatggaagctgtcatgta

SEQ ID NO: 36567 - protein, 4314 aa, Artificial Sequence
  derived and/or modified sequence
MANGTADVRKLFIFTTTQNYFGLMSELWDQPLLCNCLEINNFLDDGNQMLLRVQRSDAGISFSNTIEFGDTKDKVLVFFKLRPEVITDENLHDNILVSSMLESPISSLYQAVRQVFAPMLLKDQEWSRNFDPKLQNLLSELEAGLGIVLRRSDTNLTKLKFKEDDTRGILTPSDEFQFWIEQAHRGNKQISKERANYFKELFETIAREFYNLDSLSLLEVVDLVETTQDVVDDVWRQTEHDHYPESRMLHLLDIIGGSFGRFVQKKLGTLNLWEDPYYLVKESLKAGISICEQWVIVCNHLTGQVWQRYVPHPWKNEKYFPETLDKLGKRLEEVLAIRTIHEKFLYFLPASEEKIICLTRVFEPFTGLNPVQYNPYTEPLWKAAVSQYEKIIAPAEQKIAGKLKNYISEIQDSPQQLLQAFLKYKELVKRPTISKELMLERETLLARLVDSIKDFRLDFENRCRGIPGDASGPLSGKNLSEVVNSIVWVRQLELKVDDTIKIAEALLSDLPGFRCFHQSAKDLLDQLKLYEQEQFDDWSRDIQSGLSDSRSGLCIEASSRIMELDSNDGLLKVHYSDRLVILLREVRQLSALGFVIPAKIQQVANIAQKFCKQAIILKQVAHFYNSIDQQMIQSQRPMMLQSALAFEQIIKNSKAGSGGKSQITWDNPKELEGYIQKLQNAAERLATENRKLRKWHTTFCEKVVVLMNIDLLRQQQRWKDGLQELRTGLATVEAQGFQASDMHAWKQHWNHQLYKALEHQYQMGLEALNENLPEINIDLTYKQGRLQFRPPFEEIRAKYYREMKRFIGIPNQFKGVGEAGDESIFSIMIDRNASGFLTIFSKAEDLFRRLSAVLHQHKEWIVIGQVDMEALVEKHLFTVHDWEKNFKALKIKGKEVERLPSAVKVDCLNINCNPVKTVIDDLIQKLFDLLVLSLKKSIQAHLHEIDTFVTEAMEVLTIMPQSVEEIGDANLQYSKLQERKPEILPLFQEAEDKNRLLRTVAGGGLETISNLKAKWDKFELMMESHQLMIKDQIEVMKGNVKSRLQIYYQELEKFKARWDQLKPGDDVIETGQHNTLDKSAKLIKEKKIEFDDLEVTRKKLVDDCHHFRLEEPNFSLASSISKDIESCAQIWAFYEEFQQGFQEMANEDWITFRTKTYLFEEFLMNWHDRLRKVEEHSVMTVKLQSEVDKYKIVIPILKYVRGEHLSPDHWLDLFRLLGLPRGTSLEKLLFGDLLRVADTIVAKAADLKDLNSRAQGEVTIREALRELDLWGVGAVFTLIDYEDSQSRTMKLIKDWKDIVNQVGDNRCLLQSLKDSPYYKGFEDKVSIWERKLAELDEYLQNLNHIQRKWVYLEPIFGRGALPKEQTRFNRVDEDFRSIMTDIKKDNRVTTLTTHAGIRNSLLTILDQLQRCQKSLNEFLEEKRSAFPRFYFIGDDDLLEILGQSTNPSVIQSHLKKLFAGINSVCFDEKSKHITAMKSLEGEVVPFKNKVPLSNNVETWLNDLALEMKKTLEQLLKECVTTGRSSQGAVDPSLFPSQILCLAEQIKFTEDVENAIKDHSLHQIETQLVNKLEQYTNIDTSSEDPGNTESGILELKLKALILDIIHNIDVVKQLNQIQVHTTEDWAWKKQLRFYMKSDHTCCVQMVDSEFQYTYEYQGNASKLVYTPLTDKCYLTLTQAMKMGLGGNPYGPAGTGKTESVKALGGLLGRQVLVFNCDEGIDVKSMGRIFVGLVKCGAWGCFDEFNRLEESVLSAVSMQIQTIQDALKNHRTVCELLGKEVEVNSNSGIFITMNPAGKGYGGRQKLPDNLKQLFRPVAMSHPDNELIAEVILYSEGFKDAKVLSRKLVAIFNLSRELLTPQQHYDWGLRALKTVLRGSGNLLRQLNKSGTTQNANESHIVVQALRLNTMSKFTFTDCTRFDALIKDVFPGIELKEVEYDELSAALKQVFEEANYEIIPNQIKKALELYEQLCQRMGVVIVGPSGAGKSTLWRMLRAALCKTGKVVKQYTMNPKAMPRYQLLGHIDMDTREWSDGVLTNSARQVVREPQDVSSWIICDGDIDPEWIESLNSVLDDNRLLTMPSGERIQFGPNVNFVFETHDLSCASPATISRMGMIFLSDEETDLNSLIKSWLRNQPAEYRNNLENWIGDYFEKALQWVLKQNDYVVETSLVGTVMNGLSHLHGCRDHDEFIINLIRGLGGNLNMKSRLEFTKEVFHWARESPPDFHKPMDTYYDSTRGRLATYVLKKPEDLTADDFSNGLTLPVIQTPDMQRGLDYFKPWLSSDTKQPFILVGPEGCGKGMLLRYAFSQLRSTQIATVHCSAQTTSRHLLQKLSQTCMVISTNTGRVYRPKDCERLVLYLKDINLPKLDKWGTSTLVAFLQQVLTYQGFYDENLEWVGLENIQIVASMSAGGRLGRHKLTTRFTSIVRLCSIDYPEREQLQTIYGAYLEPVLHKNLKNHSIWGSSSKIYLLAGSMVQVYEQVRAKFTVDDYSHYFFTPCILTQWVLGLFRYDLEGGSSNHPLDYVLEIVAYEARRLFRDKIVGAKELHLFDIILTSVFQGDWGSDILDNMSDSFYVTWGARHNSGARAAPGQPLPPHGKPLGKLNSTDLKDVIKKGLIHYGRDNQNLDILLFHEVLEYMSRIDRVLSFPGGSLLLAGRSGVGRRTITSLVSHMHGAVLFSPKISRGYELKQFKNDLKHVLQLAGIEAQQVVLLLEDYQFVHPTFLEMINSLLSSGEVPGLYTLEELEPLLLPLKDQASQDGFFGPVFNYFTYRIQQNLHIVLIMDSANSNFMINCESNPALHKKCQVLWMEGWSNSSMKKIPEMLFSETGGGEKYNDKKRKEEKKKNSVDPDFLKSFLLIHESCKAYGATPSRYMTFLHVYSAISSSKKKELLKRQSHLQAGVSKLNEAKALVDELNRKAGEQSVLLKTKQDEADAALQMITVSMQDASEQKTELERLKHRIAEEVVKIEERKNKIDDELKEVQPLVNEAKLAVGNIKPESLSEIRSLRMPPDVIRDILEGVLRLMGIFDTSWVSMKSFLAKRGVREDIATFDARNISKEIRESVEELLFKNKGSFDPKNAKRASTAAAPLAAWVKANIQYSHVLERIHPLETEQAGLESNLKKTEDRKRKLEELLNSVGQKVSELKEKFQSRTSEAAKLEAEVSKAQETIKAAEVLINQLDREHKRWNAQVVEITEELATLPKRAQLAAAFITYLSAAPESLRKTCLEEWTKSAGLEKFDLRRFLCTESEQLIWKSEGLPSDDLSIENALVILQIIGLKSWSRVCPFLIDPSSQATEWLKTHLKDSRLEVINQQDSNFITALELAVRFGKTLIIQEMDGVEPVLYPLLRRDLVAQGPRYVVQIGDKIIDYNEEFRLFLSTRNPNPFIPPDAASIVTEVNFTTTRSGLRGQLLALTIQHEKPDLEEQKTKLLQQEEDKKIQLAKLEESLLETLATSQGNILENKDLIESLNQTKASSALIQESLKESYKLQISLDQERDAYLPLAESASKMYFIISDLSKINNMYRFSLAAFLRLFQRALQNKQDSENTEQRIQSLISSLQHMVYEYICRCLFKADQLMFALHFVRGMHPELFQENEWDTFTGVVVGDMLRKADSQQKIRDQLPSWIDQERSWAVATLKIALPSLYQTLCFEDAALWRTYYNNSMCEQEFPSILAKKVSLFQQILVVQALRPDRLQSAMALFACKTLGLKEVSPLPLNLKRLYKETLEIEPILIIISPGADPSQELQELANAERSGECYHQVAMGQGQADLAIQMLKECARNGDWLCLKNLHLVVSWLPVLEKELNTLQPKDTFRLWLTAEVHPNFTPILLQSSLKITYESPPGLKKNLMRTYESWTPEQISKKDNTHRAHALFSLAWFHAACQERRNYIPQGWTKFYEFSLSDLRAGYNIIDRLFDGAKDVQWEFVHGLLENAIYGGRIDNYFDLRVLQSYLKQFFNSSVIDVFNQRNKKSIFPYSVSLPQSCSILDYRAVIEKIPEDDKPSFFGLPANIARSSQRMISSQVISQLRILGRSITAGSKFDREIWSNELSPVLNLWKKLNQNSNLIHQKVPPPNDRQGSPILSFIILEQFNAIRLVQSVHQSLAALSKVIRGTTLLSSEVQKLASALLNQKCPLAWQSKWEGPEDPLQYLRGLVARALAIQNWVDKAEKQALLSETLDLSELFHPDTFLNALRQETARAVGRSVDSLKFVASWKGRLQEAKLQIKISGLLLEGCSFDGNQLSENQLDSPSVSSVLPCFMGWIPQDACGPYSPDECISLPVYTSAERDRVVTNIDVPCGGNQDQWIQCGAALFLKNQ

SEQ ID NO: 36568 - DNA, 12945 bp, Artificial Sequence
  derived and/or modified sequence
atggcgaatgggacagctgatgttagaaagctattcattttcacaaccacgcagaactactttggcctcatgtctgaactgtgggatcaacccctgctttgcaattgcctggaaattaataattttctggacgacgggaatcagatgttgttgcgagttcagcggagtgacgccggaatcagcttctctaataccatcgaattcggcgataccaaggataaggttttggtgtttttcaagctgagacctgaagtgataaccgatgaaaatctgcatgacaacatcctagtgtcaagcatgctggagagccccattagtagcttgtatcaggcagtgcggcaagttttcgctcctatgttgctgaaggaccaggaatggagtaggaattttgaccctaagctgcagaatctgctttcagaattagaagccgggttaggaatagtgctgaggagatctgataccaatctcacgaaacttaagttcaaagaagacgatactagaggaattttgactccctcagacgagtttcagttttggatcgagcaagcgcaccgtggaaacaaacagatcagcaaagagcgtgcaaattattttaaagagttgtttgagactatagcacgcgagttttacaatttggacagtctgtctctcctagaggtcgtggacctcgtggagactactcaggatgtggtggacgacgtttggagacagacagaacatgaccattaccctgagagccgcatgctgcaccttctcgacatcatcggtggcagcttcggccgctttgtccaaaagaagcttggcactctaaatctgtgggaggatccttactatcttgtgaaagagagccttaaggcaggaattagtatctgcgaacaatgggtgatcgtgtgcaaccacttgaccggccaagtgtggcagcgatacgttccacacccctggaaaaatgagaaatatttcccggagacattggataagctaggaaaacgactggaagaagttttggccatcaggacgattcacgagaaattcttgtattttctgccggcctctgaggagaagattatttgcctcacccgggtgtttgagccctttaccgggctgaatcctgtccaatataatccatatacggagcctctgtggaaggcagctgtgtcacagtacgaaaaaattattgcaccagctgagcaaaaaatagcagggaaactgaaaaattacattagcgagattcaggatagcccccaacagcttctgcaagccttcctgaagtataaagaactggtgaaacgcccaacgatttctaaagaactgatgctcgaaagagagaccttacttgctagactcgtggacagcatcaaagacttcaggctggacttcgagaatcggtgccgtgggattcccggggacgcctcaggacccttgagcggcaagaacctatccgaagtggtcaacagtatcgtgtgggtcaggcagctcgagctgaaagtggatgataccatcaaaatcgccgaggctctgctctccgatctgccaggatttaggtgcttccaccaaagtgccaaagatcttctggatcagctgaaactttacgagcaggagcaattcgacgactggtccagggacattcaaagcgggctgtcagactcccgcagtggtctgtgcatagaagctagctcgcgcattatggaactcgacagcaatgacggcctcctcaaggtgcactattctgacaggttggtcatcctgttgcgggaggtacgccagttgtctgccctgggcttcgtaattccagccaaaatccaacaggtggccaatattgcacagaaattttgcaagcaagctattatattaaaacaagttgcacacttctacaactcgatcgatcagcaaatgatccagagccagaggccaatgatgctgcagtcggccttggcgtttgagcagattattaagaattccaaggcaggttctggcgggaagagccagataacctgggacaatccgaaagaattagaaggttatatccaaaagctgcagaatgcggctgaaagactggcaaccgagaataggaagcttcgcaagtggcacactactttttgcgagaaggtggtcgtcctaatgaatatagacctgctccgccagcagcagcgatggaaagacgggctgcaagagctgaggaccggactcgctacagtggaggctcagggattccaggcatcagacatgcacgcctggaagcaacattggaaccaccagctctacaaagccttggagcaccagtatcagatgggcttggaagcgcttaacgagaacttgcccgagataaacatagacctgacctacaaacagggacgcctgcagtttcgtcccccgttcgaggagatccgggcgaaatattacagagaaatgaaacgcttcataggcatccctaatcagtttaaaggggtgggagaagctggagacgaatctatcttttctattatgattgatcggaatgcatctggctttttgactatcttctcgaaggcagaggacctgtttcgccgcctgtccgccgttctccaccaacacaaggagtggatagtgattggccaggtggacatggaggccctggttgagaaacacttattcactgtgcatgattgggagaaaaatttcaaagcgttgaaaatcaagggcaaagaagtcgaaaggttacctagtgcagttaaagtggattgtcttaatattaattgcaatcctgttaagacagtcattgacgacctgattcaaaagctgtttgatttgctggtactttccttgaagaagtctatccaagcacacctgcatgaaattgataccttcgtcacagaggcaatggaggtcctcacaatcatgccacaatctgttgaagagattggcgacgcaaatttacagtacagcaaactgcaggagcgcaagcctgaaattctgccgctgtttcaggaggccgaggataaaaatcgcctccttaggacggtggctggcggtggcttagagacgattagcaatctgaaggccaaatgggacaagtttgagctgatgatggaatctcaccagctcatgatcaaagatcaaatcgaggtcatgaagggcaacgtgaaatcccgactgcaaatttattaccaggaactggagaagtttaaggcacggtgggaccaacttaagccaggagatgacgtcatcgagacaggtcagcataacactctcgataaaagcgcaaagctgatcaaagaaaagaagatcgaattcgacgacctggaagtgacacgaaagaagctagtggacgattgtcaccattttcggcttgaggagccaaatttcagtcttgcgagcagcatctccaaggacatcgagtcttgtgcccagatttgggccttttacgaagaattccagcagggcttccaggaaatggccaacgaagattggatcactttcaggaccaaaacttacctttttgaggaatttctaatgaactggcatgatcgattacgcaaggtggaggagcattctgtaatgactgtgaagttacagagcgaggtcgataagtacaagattgtcatcccgatcctcaagtacgtgagaggagaacatctctctcccgaccactggctggacctgttccgcctgctcgggctgccacgcggtacgtctctggagaaactgctgtttggcgacctcctcagagtagccgatacaatagttgctaaggccgccgatctgaaagacctgaacagtcgcgcccagggcgaagtgactatccgtgaggcccttagggaactcgatttgtggggtgtcggggccgtgtttacactcatcgattatgaggactctcagagccgaaccatgaaactgatcaaagactggaaggacattgtgaaccaggtcggcgacaataggtgccttttgcagagcctcaaggatagcccctactacaagggatttgaagataaggtctccatttgggaaagaaaactggccgaattagacgaatacctgcaaaatcttaaccacatccaacggaagtgggtgtatctggagcccatcttcggccgaggagcgctccccaaggagcagacacggttcaatagggtggatgaagatttccggagcattatgacagatattaagaaagacaatcgtgtgaccacattgacaacccacgccggcatccgcaattccctgctgaccatcctggaccagctccagaggtgccagaaaagcctgaacgaatttctagaggaaaagcgcagtgcattcccaaggttttacttcataggagacgacgatctgcttgagatattgggacagagtactaaccctagtgtgattcagtcacaccttaagaaactattcgcaggtattaactctgtgtgtttcgatgagaagtcgaagcatattaccgctatgaagtcactcgagggggaggtggtcccctttaaaaataaggtgcccctttccaataatgttgaaacctggctcaatgacctggccttggaaatgaagaagacgttagagcaactgttaaaggagtgtgtcaccacgggccgcagttctcagggcgcagttgacccgtccctattcccgtcgcagattctgtgcctggcagagcagatcaagtttaccgaggatgtggagaacgccatcaaggatcatagtttgcatcagatcgagacccagcttgtaaataagctggaacagtataccaacatcgatacatcaagtgaggaccctgggaacaccgaaagcggaatccttgagctgaagctgaaggctttaattctagacataatccacaacatcgacgtagtgaagcaactgaatcagattcaggtgcacacaaccgaagattgggcctggaaaaagcagctgcggttttacatgaaatcagaccacacttgctgcgtacaaatggtggattcagagtttcagtacacatatgagtatcagggaaacgcctccaaacttgtgtatacgcccctcacagacaaatgctatttgaccttgactcaggctatgaaaatgggtttaggaggcaacccctacggaccagctggcacagggaaaacagaatctgtcaaggcactgggcggcttactcggacgacaggtgctggtcttcaactgcgatgagggcattgacgtgaagtctatgggtcgcatctttgttggtctcgttaaatgtggggcgtggggctgttttgacgaatttaataggttagaagaatccgtgcttagtgctgtgtcaatgcagatacaaactatacaggatgctctgaagaaccatcggacagtatgcgaactgctcgggaaggaagtggaagtgaatagtaactccgggatatttattaccatgaatcctgccggcaaagggtatgggggccgccagaaactccccgacaacctcaagcagctgttccggcccgtcgccatgagtcaccctgataatgaacttatagccgaggtgatcttgtacagcgagggctttaaggatgctaaagtgctgagcagaaaattggtggcaatctttaacctctcgcgcgagctgcttaccccacagcaacattacgattggggcttacgagccctcaagacggtgctcagggggtcaggaaatctgttacggcagttgaataagagcgggacaacccagaacgctaacgaatcacacatcgtagtccaggccctgcgcctcaacactatgtccaagttcacgttcacagactgcacccggtttgacgctctgataaaggacgtgttccctgggatcgaattgaaggaggtagagtacgacgagctgtccgccgctctgaagcaggtgtttgaggaggcaaactacgagattatccctaaccagatcaagaaggctttggagctgtatgaacagttatgtcagaggatgggcgtcgtcatcgttggccccagcggagccggcaagtcaacactgtggcggatgctgcgggccgctctctgcaagactggcaaagtggtcaagcaatacacaatgaacccaaaggctatgccccgttatcagcttctgggccacattgatatggatactcgcgagtggagcgacggagtcttgactaattcagcccggcaggttgtgcgggagcctcaggacgtgtcatcctggataatctgtgacggtgacatcgatcccgagtggatcgagagtttgaattctgtgttggacgacaatcgtctgctgactatgccgtccggagagagaattcagttcggacccaatgtcaacttcgtgttcgagactcatgacttgagttgtgccagcccggcaaccatctctcgcatggggatgattttcctatctgacgaagagactgacctgaatagcctaatcaagagctggctgcgaaaccagcccgcagagtaccgcaataatctggagaactggatcggcgactattttgaaaaggcattgcagtgggtgctcaaacaaaatgattatgtagtcgaaacctctcttgtggggacggtgatgaacggtctctcacatctacatgggtgcagggaccatgatgagtttatcataaacttgatcagggggcttggtggcaatcttaacatgaagtctcgcctggaattcacaaaggaggtgttccactgggctcgggaatcacctccagattttcacaaacccatggacacctattacgattcaaccaggggacgtctggccacctacgtgctgaagaagcccgaggatttgactgctgatgatttcagcaatggcctcacactcccagtgatccaaactcctgacatgcagcgcgggctggattattttaagccttggctctccagcgacaccaaacaacctttcattctcgtcggacccgagggctgtggcaaaggcatgcttttgagatatgctttttcccagttgcgatcaactcagattgccacggtccattgctccgcacagacaactagcagacaccttctgcagaaactcagccagacgtgcatggtcattagcacgaacactggtcgggtataccggccaaaagattgtgagaggcttgttttatacctcaaggacattaatttgcccaagcttgataaatggggtacgagcaccctggtggcgtttctacaacaggtcttgacctatcaggggttctacgatgagaacttggagtgggttgggttggaaaacatacaaattgtggcgtccatgagcgccggagggagattgggaaggcacaaactcacaacacgctttacttctatcgtgcgcttatgctcaatcgattaccctgaaagggagcagcttcagaccatctacggggcttacctcgaacccgtgctgcataagaatctaaaaaaccactcaatatgggggagtagcagtaaaatttacttgcttgcaggctctatggtgcaggtgtatgaacaggtacgggccaagttcaccgttgacgactatagtcattacttttttaccccatgtatactgactcagtgggtgctgggcctctttcgctatgatctggagggaggctcctccaatcatccactggattatgtgctggagattgtagcttacgaagccaggagactcttcagggataaaatagtcggcgctaaggaactgcaccttttcgacatcattctgacgtctgtgttccaaggcgactgggggtcagacattctagataacatgtccgacagcttctatgtgacctggggtgcccgccacaattcaggcgccagggccgctccagggcagccactacccccccatgggaagcctttgggaaagctcaactccaccgatctcaaagatgtaatcaaaaaagggctgattcactacgggagggacaatcagaatctggacattttactgtttcacgaagtgcttgaatatatgtccaggattgatcgcgtactcagcttccctggagggtctctgctgctggccgggaggtcgggggtggggagacgtactataacaagcctggtgtcacatatgcatggggccgtattgttcagtccgaaaatctcccgcggctacgagctgaagcagttcaagaacgacctgaagcacgtccttcagctggccggcatcgaagctcaacaagttgtgctcctgctggaggactaccagttcgtgcatcccaccttcctcgagatgattaactctcttctctcttccggggaagtccccggtctgtatacgctggaagagctcgaaccactgctgctcccacttaaggatcaagcctctcaggatggtttctttggcccagttttcaactatttcacctacaggatacaacagaatctccatattgtgctgatcatggacagtgctaactccaactttatgattaactgtgagtctaaccccgccctccataaaaaatgtcaagtgttatggatggaaggatggtccaactcctcaatgaagaagataccagagatgcttttctcggaaaccggaggaggggaaaagtacaacgataaaaaaagaaaggaggagaaaaaaaagaacagcgtagatcctgactttttaaagtctttccttctaattcatgagtcgtgtaaagcttacggagctactccaagccgatatatgactttcttacacgtctattcagcgatttctagctcaaaaaagaaggagctgctaaagcgtcagagtcacctacaggcaggagtgtctaaactcaacgaggcaaaggcattagttgacgaattaaacaggaaggccggggaacagagcgtgctgttgaagactaaacaggatgaagccgacgcagccttacagatgataacagtctcaatgcaagacgcatccgagcaaaagactgagctagaacggctcaaacaccgcatcgctgaggaggtagtgaagattgaagaacgcaagaataaaatcgacgacgaactgaaagaagtccagccactcgtgaatgaggcaaaactagcagtcggcaacatcaaacctgaaagcctgagcgagatacgcagtctcaggatgccacctgacgtgattcgagacatcctggagggggttctccgcctcatgggtatttttgatacttcctgggtgtctatgaagtcctttctcgccaagagaggagtacgtgaggatatcgctacttttgacgcaagaaatatcagtaaagaaatcagggagtccgtcgaagagcttctctttaaaaacaagggctcctttgacccaaagaatgccaagcgcgccagtacagcagctgccccgctcgctgcttgggtgaaggcgaatatccaatactcccatgtgcttgaaaggattcacccccttgaaactgagcaggccgggctcgagtcaaatctgaaaaaaaccgaagaccgtaaacggaagctggaagaactccttaatagcgtggggcagaaggtatcagaactgaaagagaagtttcaatctcgtaccagcgaggccgccaaattagaggccgaggtgtccaaggcccaggagaccatcaaggccgccgaggtgcttatcaatcagctagaccgcgaacacaagcggtggaatgcacaggttgtagaaatcactgaagagctggccactctgccgaagagagctcaactggctgctgcatttatcacatatctgagcgcagctccagagagcctgcgaaaaacgtgcttagaagaatggactaaaagtgctggcctggagaaatttgatttgaggagatttctctgtactgagtccgaacagctaatttggaaatctgaaggcctcccgtctgacgatctgtccatcgagaatgccttagtaatcttgcagattattggtctgaagagttggtcacgtgtgtgtcctttcctcatcgatccttccagtcaagcaaccgagtggcttaagacccacctcaaagacagcaggctcgaggtgatcaaccagcaggattccaacttcatcacagccttggagctagccgtcagattcggcaaaactctgatcatccaggagatggatggggttgagccggtcctttaccctctcctgaggagggacctggtagctcaagggcccagatatgttgttcagatcggtgacaagataattgactacaatgaagaattccgcttgttcctttctaccagaaatccgaacccttttatacccccagacgctgccagcatcgtcaccgaggttaacttcacaaccacccgatctggcctgcgagggcagttgttagctctcaccattcagcatgagaaacctgatctggaggaacaaaaaaccaaattgcttcaacaagaagaggataaaaagatacagctggcaaagctggaagagagtctgctcgaaacattggccacatctcaaggaaatatactggaaaacaaagatctaatagagtcccttaaccaaacgaaggcttctagtgctttaatccaggagtctttgaaagagtcctataagttgcaaatcagcctggaccaggaacgagatgcttacctacccctggcagaaagtgcttccaagatgtatttcataatctctgacctgtccaaaattaataatatgtatcggtttagtctcgccgctttccttaggctgttccagagagcactccagaataaacaggacagtgaaaacaccgaacaaagaatccagtcgcttatctcatccctgcagcatatggtgtatgagtacatctgcagatgtctgtttaaggctgaccagttaatgtttgcacttcattttgttcgaggcatgcaccctgagctgttccaagaaaacgagtgggacactttcaccggagtggtagtgggcgacatgcttagaaaggcagattcacagcaaaaaatcagagaccagctgcccagttggatcgatcaggaacgcagctgggcagtcgctacgctgaagattgcactcccctctctgtaccaaacattatgcttcgaggacgccgcactctggcgcacttattacaataacagtatgtgtgaacaggagttcccctcgattctggctaagaaggtttcgttgttccagcagattctcgttgtccaggcattgcgaccggataggttgcagagtgcaatggccctcttcgcatgcaagaccctgggcctcaaggaagtgtctcctttacccctaaatctaaaaagactgtataaggaaacactagagattgaacccatcttaatcatcatttctcctggcgctgaccctagccaggaacttcaagaattggcgaacgccgagaggtcgggcgagtgctatcaccaggtcgcaatgggacaaggccaggctgaccttgccatccagatgctaaaagaatgcgctagaaacggtgactggctctgccttaagaacctgcacctggtggtctcctggctacccgtgttggagaaagaactcaacacattgcagccaaaggacacctttcggctgtggctaacagcagaggtgcaccctaatttcacaccaattctacttcaatcgagcctgaagattacctacgagtcaccgccagggctgaaaaaaaatcttatgcgcacttatgaatcttggacgccagagcagatcagtaagaaggacaatactcatcgagcccacgctctcttttccctggcgtggttccatgctgcttgccaggaaagaaggaattatatccctcagggctggactaaattctatgagttctccttatctgacctgagggccgggtacaatattatagatcggctgttcgatggcgcaaaagatgtccagtgggagttcgtacacgggctgttagagaatgcaatttacggcggacgtattgacaattacttcgatcttcgggtgttacagtcctatcttaaacaattttttaattcgtctgttatcgacgtcttcaatcagagaaacaagaaatccatctttccctattcagttagtctgccacaaagctgctccatactcgattatagagccgttattgagaagattcctgaagatgataagccttcgtttttcggtttacccgccaacatcgctcgcagctcacagcgcatgatcagcagtcaagtaatcagccagctgaggattctcggcagatcaataaccgcaggctcaaagtttgatagggagatttggagcaatgaactgagcccagttctgaacctatggaaaaagcttaaccagaacagcaaccttatccaccagaaggtccctccccctaatgataggcagggatcccccattctgagtttcatcattttggagcagttcaacgccattcgattggtgcagagtgtgcaccagtctctggctgcgctgtcaaaggttatccgcgggacgactctcctgtcctctgaggtccagaagctcgcgtccgctctgctgaatcagaaatgccctttagcctggcagagcaagtgggagggcccagaggacccattgcagtacttgcggggactggtggcacgcgcactggcaatccagaattgggttgacaaagccgagaagcaagcccttctgagtgagaccttggacctctccgaactgtttcatcctgatacgttcctgaatgccttaagacaagagactgcacgcgcggtgggtcggtccgttgactctcttaagttcgttgcctcctggaagggtagactccaggaggcgaagctgcagatcaaaatctccggactgctgctggagggctgttcctttgacggcaaccagttatccgaaaaccaactagactctccgagcgtgagtagcgttctgccctgcttcatgggctggattccccaggacgcttgcggtccttattctccggatgagtgcatttccctacccgtgtatacctcggctgagcgcgacagggtcgtcacaaacattgatgtgccttgtggcggtaatcaagatcagtggatccaatgcggcgcggctttgttcctaaagaatcagtag

SEQ ID NO: 36569 - DNA, 12945 bp, Artificial Sequence
  derived and/or modified sequence
atggccaatggaacagcagatgtgaggaagctgttcatcttcaccaccacccagaactacttcggcctgatgtctgagctgtgggaccagcccctgctgtgcaactgcctggagatcaacaacttcctggatgatggcaaccagatgctgctgcgggtgcagaggagtgatgctggcatctccttcagcaacaccatcgagtttggagacaccaaggacaaggtgctggtgttcttcaagctgcggcctgaggtgatcacagatgagaacctgcatgacaacatcctggtgtcctccatgctggagagccccatcagcagcctgtaccaggccgtgcggcaggtgtttgcccccatgctgctgaaggaccaggagtggagcaggaactttgaccccaagctgcagaacctgctgtctgagctggaggccggcctgggcatcgtgctgcggcggagtgacaccaacctgaccaagctgaagttcaaggaggatgacacccggggcatcctgacccccagtgatgagttccagttctggattgagcaggcccaccggggcaacaagcagatcagcaaggagcgggccaactacttcaaggagctgtttgagaccatcgcccgggagttctacaacctggacagcctgagcctgctggaggtggtggacctggtggagaccacccaggatgtggtggatgatgtgtggaggcagacagaacatgaccactacccagagagcaggatgctgcacctgctggacatcattggaggcagctttggccgctttgtgcagaagaagctgggcaccctgaacctgtgggaggacccctactacctggtgaaggagagcctgaaggccggcatcagcatctgtgagcagtgggtgattgtgtgcaaccacctgaccggccaggtgtggcagagatatgtgccccacccctggaagaatgagaagtacttccctgagaccctggacaagctgggcaagaggctggaggaggtgctggccatccgcaccatccacgagaagttcctgtacttcctgcctgccagcgaggagaagatcatctgcctgaccagggtgtttgagcccttcaccggcctgaaccctgtgcagtacaacccctacacagagcccctgtggaaggctgctgtgtcccagtatgagaagatcatcgccccagctgagcagaagattgctgggaagctgaagaactacatcagcgagatccaggacagcccccagcagctgctgcaggccttcctgaagtacaaggagctggtgaagaggcccaccatcagcaaggagctgatgctggagcgggagaccctgctggcccggctggtggacagcatcaaggacttccggctggactttgagaaccgctgccggggcatccctggagatgccagcggccccctgagcggcaagaacctgtctgaggtggtgaacagcatcgtgtgggtgcggcagctggagctgaaggtggatgacaccatcaagattgctgaggccctgctgagtgacctgcccggcttccgctgcttccaccagagcgccaaggacctgctggaccagctgaagctgtatgagcaggagcagtttgatgactggagccgggacatccagagcggcctgagtgacagccgcagcggcctgtgcatcgaggccagcagccgcatcatggagctggacagcaatgatggcctgctgaaggtgcactacagcgaccggctggtgatcctgctgcgggaggtgcggcagctgagcgccctgggcttcgtcatcccagccaagatccagcaggtggccaacatcgcccagaagttctgcaagcaggccatcatcctgaagcaggtggcccacttctacaacagcattgaccagcagatgatccagagccagaggcccatgatgctgcagagcgccctggcctttgagcagatcatcaagaacagcaaggccggcagcggcggcaagagccagatcacctgggacaaccccaaggagctggagggctacatccagaagctgcagaatgctgctgagcggctggccacagagaacaggaagctgaggaagtggcacaccaccttctgtgagaaggtggtggtgctgatgaacatcgacctgctgcggcagcagcagcgctggaaggatggcctgcaggagctgaggacaggcctggccaccgtggaggcccagggcttccaggccagtgacatgcacgcctggaagcagcactggaaccaccagctgtacaaggccctggagcaccagtaccagatgggcctggaggccctgaatgaaaacctgcctgagatcaacatcgacctgacctacaagcagggccgcctgcagttccggcccccatttgaggagatccgggccaagtactaccgggagatgaagcgcttcatcggcatccccaaccagttcaagggcgtgggggaggccggagatgagagcatcttcagcatcatgattgacagaaatgccagcggcttcctgaccatcttcagcaaggccgaggacctcttccggcggctgtctgctgtgctgcaccagcacaaggagtggatcgtgattggccaggtggacatggaggccctggtggagaagcacctgttcaccgtgcatgactgggagaagaacttcaaggccctgaagatcaagggcaaggaggtggagcggctgcccagcgctgtgaaggtggactgcctgaacatcaactgcaaccctgtgaagacagtgattgatgacctgatccagaagctgtttgacctgctggtgctgagcctgaagaagagcatccaggcccacctgcatgaaattgacacctttgtgacagaggccatggaggtgctgaccatcatgccccagagcgtggaggagattggagatgccaacctgcagtacagcaagctgcaggagaggaagccagagatcctgcccctcttccaggaggccgaggacaagaaccggctgctgaggacagtggccggcggcggcctggagaccatcagcaacctgaaggccaagtgggacaagtttgagctgatgatggagagccaccagctgatgatcaaggaccagatcgaggtgatgaagggaaatgtgaagagccggctgcagatctactaccaggagctggagaagttcaaggcccgctgggaccagctgaagccaggagatgatgtgattgagaccggccagcacaacaccctggacaagagcgccaagctgatcaaggagaagaagattgaatttgatgacctggaggtgaccaggaagaagctggtggatgactgccaccacttccggctggaggagcccaacttcagcctggccagcagcatcagcaaggacatcgagagctgtgcccagatctgggccttctatgaggagttccagcagggcttccaggagatggccaatgaagactggatcaccttccgcaccaagacctacctgtttgaggagttcctgatgaactggcatgaccggctgaggaaggtggaggagcacagcgtgatgacagtgaagctgcagagcgaggtggacaagtacaagatcgtcatccccatcctgaagtatgtgcggggggagcacctgagcccagaccactggctggacctcttccggctgctgggcctgccccggggcaccagcctggagaagctgctgtttggagacctgctgcgggtggccgacaccatcgtggccaaggctgctgacctgaaggacctgaacagccgggcccagggcgaggtgaccatccgggaggccctgcgggagctggacctgtggggcgtgggcgctgtgttcaccctgattgattatgaggacagccagagcaggaccatgaagctgatcaaggactggaaggacatcgtgaaccaggtgggggacaaccgctgcctgctgcagagcctgaaggacagcccctactacaagggctttgaggacaaggtgtccatctgggagaggaagctggccgagctggatgagtacctgcagaacctgaaccacatccagaggaagtgggtgtacctggagcccatcttcggccgcggggccctgcccaaggagcagacccgcttcaacagagtggatgaggacttccgcagcatcatgacagacatcaagaaggacaacagagtgaccaccctgaccacccatgctggcatccggaacagcctgctgaccatcctggaccagctgcagcgctgccagaagagcctgaatgagttcctggaggagaagaggtctgccttcccccgcttctacttcatcggagatgatgacctgctggagatcctgggccagagcaccaaccccagcgtcatccagagccacctgaagaagctgtttgctggcatcaacagcgtgtgctttgatgagaagagcaagcacatcacagccatgaagagcctggagggggaggtggtgcccttcaagaacaaggtgcccctgagcaacaacgtggagacctggctgaatgacctggccctggagatgaagaagaccctggagcagctgctgaaggaatgtgtgaccaccggccgcagcagccagggcgctgtggaccccagcctcttccccagccagatcctgtgcctggccgagcagatcaagttcacagaagatgtggagaatgccatcaaggaccacagcctgcaccagatcgagacccagctggtgaacaagctggagcagtacaccaacatcgacaccagcagcgaggaccccggcaacacagaaagtggcatcctggagctgaagctgaaggccctgatcctggacatcatccacaacattgatgtggtgaagcagctgaaccagatccaggtgcacaccacagaggactgggcctggaagaagcagctgcgcttctacatgaagagtgaccacacctgctgcgtgcagatggtggacagcgagttccagtacacctatgagtaccagggcaatgccagcaagctggtgtacacccccctgacagacaagtgctacctgaccctgacccaggccatgaagatgggcctgggcggcaacccctacggccctgctggcaccgggaagacagagagcgtgaaggccctgggcggcctgctgggccggcaggtgctggtgttcaactgtgatgagggcattgatgtgaagtccatgggccgcatctttgtgggcctggtgaagtgtggggcctggggctgctttgatgagttcaaccggctggaggagagcgtgctgtctgctgtgtccatgcagatccagaccatccaggatgccctgaagaaccacaggacagtgtgtgagctgctgggcaaggaggtggaggtgaacagcaacagcggcatcttcatcaccatgaacccagctgggaagggctacggcggccggcagaagctgcctgacaacctgaagcagctgttccggcctgtggccatgagccacccagacaatgagctgattgctgaggtgatcctgtacagcgagggcttcaaggatgccaaggtgctgagcaggaagctggtggccatcttcaacctgagccgggagctgctgaccccccagcagcactatgactggggcctgcgggccctgaagacagtgctgcggggcagcggcaacctgctgcggcagctgaacaagagcggcaccacccagaatgccaatgaaagccacatcgtggtgcaggccctgcggctgaacaccatgagcaagttcaccttcacagactgcaccaggtttgatgccctgatcaaggatgtgtttcctggcatcgagctgaaggaggtggagtatgatgagctgtctgctgccctgaagcaggtgtttgaggaggccaactatgagatcatccccaaccagatcaagaaggccctggagctgtatgagcagctgtgccagaggatgggcgtggtgattgtgggccccagcggggccggcaagagcaccctgtggaggatgctgcgggccgccctgtgcaagacaggcaaggtggtgaagcagtacaccatgaaccccaaggccatgccccgctaccagctgctgggccacatcgacatggacacccgggagtggagcgatggagtgctgaccaacagcgcccggcaggtggtgcgggagccccaggatgtgtcctcctggatcatctgtgatggagacatcgaccctgagtggattgagagcctgaacagcgtgctggatgacaaccggctgctgaccatgcccagcggggagcgcatccagtttggccccaacgtgaactttgtgtttgagacccatgacctgagctgtgccagccctgccaccatcagcaggatgggcatgatcttcctgagtgatgaggagacagacctgaacagcctcatcaagtcctggctgaggaaccagcctgctgagtacagaaacaacctggagaactggattggagactactttgagaaggccctgcagtgggtgctgaagcagaatgactatgtggtggagaccagcctggtgggcaccgtgatgaatggcctgagccacctgcacggctgccgggaccatgatgagttcatcatcaacctgatccggggcctgggcggcaacctgaacatgaagagccggctggagttcaccaaggaggtgttccactgggcccgggagagccccccagacttccacaagcccatggacacctactatgacagcacccggggccgcctggccacctacgtgctgaagaagccagaggacctgacagcagatgacttcagcaatggcctgaccctgcctgtgatccagaccccagacatgcagaggggcctggactacttcaagccctggctgagcagtgacaccaagcagcccttcatcctggtgggccctgagggctgtgggaagggcatgctgctgcgctatgccttcagccagctgcggagcacccagatcgccaccgtgcactgcagcgcccagaccaccagccgccacctgctgcagaagctgagccagacctgcatggtgatcagcaccaacacaggccgggtgtaccggcccaaggactgtgagcggctggtgctgtacctgaaggacatcaacctgcccaagctggacaagtggggcaccagcaccctggtggccttcctgcagcaggtgctgacctaccagggcttctatgatgagaacctggagtgggtgggcctggagaacatccagatcgtggcctccatgtctgctgggggccgcctgggccgccacaagctgaccacccgcttcaccagcatcgtgcggctgtgcagcattgactacccagagcgggagcagctgcagaccatctacggggcctacctggagcctgtgctgcacaagaacctgaagaaccacagcatctggggcagcagcagcaagatctacctgctggccggctccatggtgcaggtgtatgagcaggtgcgggccaagttcaccgtggatgactacagccactacttcttcaccccctgcatcctgacccagtgggtgctgggcctcttccgctatgacctggagggcggcagcagcaaccaccccctggactatgtgctggagatcgtggcctatgaggcccggcggctcttccgggacaagatcgtgggcgccaaggagctgcacctgtttgacatcatcctgaccagcgtcttccagggcgactggggcagtgacatcctggacaacatgtctgacagcttctacgtgacctggggcgcccggcacaacagcggggcccgggccgcccctggccagcccctgccccctcatggcaagcccctgggcaagctgaacagcacagacctgaaggatgtgatcaagaagggcctcatccactacggccgggacaaccagaacctggacatcctgctcttccacgaggtgctggagtacatgagcagaattgacagagtgctgtccttccctgggggcagcctgctgctggccggccgctctggagtgggccgccgcaccatcaccagcctggtgagccacatgcacggggctgtgctcttcagccccaagatcagccggggctatgagctgaagcagttcaagaatgacctgaagcacgtgctgcagctggccggcatcgaggcccagcaggtggtgctgctgctggaggactaccagtttgtgcaccccaccttcctggagatgatcaacagcctgctgagcagcggggaggtgcccggcctgtacaccctggaggagctggagcccctgctgctgcccctgaaggaccaggccagccaggacggcttctttggacctgtgttcaactacttcacctaccgcatccagcagaacctgcacatcgtgctgatcatggacagcgccaacagcaacttcatgatcaactgtgagagcaacccagccctgcacaagaagtgccaggtgctgtggatggagggctggagcaacagctccatgaagaagatccctgagatgctgttcagcgagactggaggaggagagaagtacaatgacaagaagaggaaggaggagaagaagaagaacagcgtggaccctgacttcctgaagagcttcctgctgattcatgagagctgcaaggcctatggagccacccccagccgctacatgaccttcctgcacgtgtacagcgccatcagcagcagcaagaagaaggagctgctgaagaggcagagccacctgcaggccggcgtgtccaagctgaatgaggccaaggccctggtggatgagctgaacaggaaggccggggagcagagcgtgctgctgaagaccaagcaggatgaagcagatgctgccctgcagatgatcaccgtgtccatgcaggatgccagcgagcagaagacagagctggagcggctgaagcacagaattgctgaggaggtggtgaagattgaggagaggaagaacaagattgatgatgagctgaaggaggtgcagcccctggtgaatgaggccaagctggccgtgggcaacatcaagccagagagcctgtctgagatccgcagcctgaggatgcccccagatgtgatccgggacatcctggagggcgtgctgcggctgatgggcatctttgacacctcctgggtgtccatgaagagcttcctggccaagaggggcgtgagagaagatattgccacctttgatgccaggaacatcagcaaggagatccgggagagcgtggaggagctgctcttcaagaacaagggcagctttgaccccaagaatgccaagagggccagcacagctgctgcccccctggccgcctgggtgaaggccaacatccagtacagccacgtgctggagcgcatccaccccctggagacagagcaggccggcctggagagcaacctgaagaagacagaggacaggaagaggaagctggaggagctgctgaacagcgtgggccagaaggtgtctgagctgaaggagaagttccagagcaggaccagcgaggccgccaagctggaggccgaggtgtccaaggcccaggagaccatcaaggctgctgaggtgctgatcaaccagctggaccgggagcacaagcgctggaatgcccaggtggtggagatcacagaggagctggccaccctgcccaagagggcccagctggccgccgccttcatcacctacctgtctgctgcccctgagagcctgaggaagacctgcctggaggagtggaccaagtctgctggcctggagaagtttgacctgcggcgcttcctgtgcacagagagcgagcagctgatctggaagtctgagggcctgcccagtgatgacctgagcattgaaaatgccctggtgatcctgcagatcatcggcctgaagtcctggagccgggtgtgccccttcctgattgaccccagcagccaggccacagagtggctgaagacccacctgaaggacagccggctggaggtgatcaaccagcaggacagcaacttcatcacagccctggagctggccgtgcgctttgggaagaccctcatcatccaggagatggatggagtggagcctgtgctgtaccccctgctgcggcgggacctggtggcccagggcccccgctacgtggtgcagatcggggacaagatcatcgactacaatgaggagttccgcctcttcctgagcaccaggaaccccaaccccttcatccccccagatgctgccagcatcgtgacagaggtgaacttcaccaccaccaggagcggcctgcggggccagctgctggccctgaccatccagcacgagaagccagacctggaggagcagaagaccaagctgctgcagcaggaggaggacaagaagatccagctggccaagctggaggagagcctgctggagaccctggccaccagccagggcaacatcctggagaacaaggacctgattgagagcctgaaccagaccaaggccagcagcgccctgatccaggagagcctgaaggagagctacaagctgcagatcagcctggaccaggagagagatgcctacctgcccctggccgagagcgccagcaagatgtacttcatcatcagtgacctgagcaagatcaacaacatgtaccgcttcagcctggccgccttcctgcggctcttccagagggccctgcagaacaagcaggacagtgaaaatacagagcagaggatccagagcctcatcagcagcctgcagcacatggtgtatgagtacatctgccgctgcctcttcaaggctgaccagctgatgtttgccctgcactttgtgcggggcatgcaccctgagctgttccaggagaatgagtgggacaccttcaccggggtggtggtgggggacatgctgaggaaggctgacagccagcagaagatccgggaccagctgcccagctggattgaccaggagaggtcctgggccgtggccaccctgaagatcgccctgcccagcctgtaccagaccctgtgctttgaagatgctgccctgtggaggacctactacaacaacagcatgtgtgagcaggagttccccagcatcctggccaagaaggtgtccctcttccagcagatcctggtggtgcaggccctgcggccagaccggctgcagagcgccatggccctgtttgcctgcaagaccctgggcctgaaggaggtgagccccctgcccctgaacctgaagaggctgtacaaggagaccctggagattgagcccatcctgatcatcatcagccctggagctgaccccagccaggagctgcaggagctggccaatgctgagaggtctggagagtgctaccaccaggtggccatgggccagggccaggccgacctggccatccagatgctgaaggaatgtgccagaaatggagactggctgtgcctgaagaacctgcacctggtggtgtcctggctgcctgtgctggagaaggagctgaacaccctgcagcccaaggacaccttccggctgtggctgacagctgaggtgcaccccaacttcacccccatcctgctgcagagcagcctgaagatcacctatgagagccccccaggcctgaagaagaacctgatgaggacctatgaatcctggaccccagagcagatcagcaagaaggacaacacccaccgggcccacgccctcttcagcctggcctggttccacgccgcctgccaggagaggaggaactacatcccccagggctggaccaagttctatgagttcagcctgagtgacctgcgggccggctacaacatcatcgaccggctgtttgatggagccaaggatgtgcagtgggagtttgtgcacggcctgctggagaatgccatctacggcggcagaattgacaactactttgacctgcgggtgctgcagagctacctgaagcagttcttcaacagctctgtgattgatgtgttcaaccagaggaacaagaagagcatcttcccctacagcgtgtccctgccccagagctgcagcatcctggactacagagctgtgattgagaagatcccagaagatgacaagcccagcttcttcggcctgcctgccaacatcgcccggagcagccagaggatgatcagcagccaggtgatcagccagctgcgcatcctgggccgcagcatcacagctggcagcaagtttgaccgggagatctggagcaatgagctgagccctgtgctgaacctgtggaagaagctgaaccagaacagcaacctgatccaccagaaggtgcccccaccaaatgaccggcagggcagccccatcctgtccttcatcatcctggagcagttcaatgccatccggctggtgcagagcgtgcaccagagcctggccgccctgagcaaggtgatccggggcaccaccctgctgagcagcgaggtgcagaagctggccagcgccctgctgaaccagaagtgccccctggcctggcagagcaagtgggagggccctgaggaccccctgcagtacctgcggggcctggtggcccgggccctggccatccagaactgggtggacaaggccgagaagcaggccctgctgtctgagaccctggacctgtctgagctgttccacccagacaccttcctgaatgccctgcggcaggagacagcccgggctgtgggccgctctgtggacagcctgaagtttgtggcctcctggaagggccgcctgcaggaggccaagctgcagatcaagatcagcggcctgctgctggagggctgcagctttgatggcaaccagctgtctgagaaccagctggacagccccagcgtgtcctctgtgctgccctgcttcatgggctggatcccccaggatgcctgtggcccctacagcccagatgagtgcatcagcctgcctgtgtacaccagcgctgagcgggacagagtggtgaccaacattgatgtgccctgtggcggcaaccaggaccagtggatccagtgtggggccgccctcttcctgaagaaccagtag

SEQ ID NO: 36570 - DNA, 12945 bp, Artificial Sequence
  derived and/or modified sequence
atggccaacggcaccgccgacgtgcggaagctgttcatcttcaccacaacccagaactacttcggactaatgtccgaattatgggaccagccattgctgtgcaactgcttagagattaacaatttcctggatgatggaaatcaaatgttgctgcgcgttcagcggtccgatgcgggcatctcgtttagcaatactatcgagttcggagacactaaagataaggtgctggttttcttcaagttgcgccccgaggtcatcaccgatgagaacctgcacgacaacatcctggtttcatccatgcttgagtctcccatctcttcactgtaccaggccgtgaggcaggtgtttgctccgatgctcctcaaagatcaggagtggagcagaaactttgaccctaaacttcagaatttgctttccgagctcgaagccggactgggaatcgtgctcaggaggtccgacacgaatctgactaagctgaagtttaaggaggatgatacgaggggaatactcacgccgtcagatgagttccagttttggattgagcaagctcacagagggaataagcaaattagtaaggagagagctaactattttaaagaattgtttgaaacaattgcccgcgaattctataatcttgactctctctctttgctggaagtggtggatttggtggagactactcaggatgtggtagatgatgtctggaggcagactgagcacgaccattaccctgagtcgcgcatgctgcacctgctggacatcatcgggggctcgttcggacgttttgtgcaaaaaaaactgggtacactaaacttgtgggaggacccatattacctcgtaaaggagagccttaaggctggaatcagtatctgcgagcaatgggttattgtttgtaaccacctgactggacaagtatggcaaaggtatgtgcctcacccatggaagaacgagaagtatttccccgaaacattggataagctcgggaagcgactggaggaggttctcgcgatccgcaccatacatgagaagtttctgtacttcctgccagccagcgaggaaaaaataatttgtttgacacgagttttcgaaccttttacgggcctcaaccccgtgcaatacaatccatatactgaaccattgtggaaagccgcagtgagccagtacgaaaaaatcatcgccccagctgagcaaaagatcgccggcaagctgaagaactatatttccgagatccaggattccccgcagcagttactgcaggccttcctgaagtacaaagagctggtgaaacggcctaccatctcaaaagagctgatgctcgagagggaaacactacttgctagattagtggacagcattaaggacttccgacttgactttgaaaatcgttgcaggggaatccctggggacgcctctgggcccctcagtggtaaaaacctttctgaagtggttaacagcatagtctgggtgcggcagctcgagctgaaagttgacgacacaatcaaaatcgccgaagccctcctctctgaccttccaggatttcgctgttttcaccagtccgccaaggaccttctggaccagcttaagctttatgagcaggaacagtttgacgactggtctcgagacattcagagcgggctgtccgatagcaggagcgggttatgtattgaggcctcatcccgcatcatggaactagactcgaatgacgggttgctcaaggtgcattatagtgaccgacttgtcattttactccgcgaagtccggcagctttcagcactgggatttgttatccccgcaaagatccagcaagttgccaacatagcccagaaattttgtaagcaggccattatcctcaagcaggtggcccacttctataacagtattgaccaacagatgatccagagtcagcgcccaatgatgctccaatctgctttggcattcgaacagattatcaagaacagcaaggccggaagtggcggaaagtctcagataacttgggataatccgaaggagttggaaggctatatccaaaaattgcagaatgcagccgaacgcctcgctacagagaaccggaaactgagaaagtggcataccacattttgcgaaaaggtggtcgtgctgatgaacattgatctgctgcgtcagcagcaacgatggaaagacggactacaggagctgcgcacgggcttagccactgtggaggcgcaaggttttcaagctagcgatatgcatgcgtggaagcagcactggaaccatcagctttataaggccctggaacatcagtaccagatgggcctggaggcgctgaacgagaacttgccagaaattaatatcgatctgacctacaaacagggtcggctgcagttcagacctccattcgaggagatacgcgcaaagtattaccgggaaatgaaaaggttcatcggcataccaaatcaatttaaaggcgtgggcgaggccggagacgagtccatcttctctatcatgattgaccggaatgcctctggatttctgacaatcttctcaaaggccgaggacttgttccggaggctctccgccgtgctccaccagcataaggagtggatagtgattggtcaggtcgacatggaggcactggtcgaaaaacacctgttcaccgtgcacgattgggaaaagaattttaaggcactgaagattaagggcaaggaagtggagagactgccttcagccgtgaaggtcgactgcctcaatatcaattgcaatccggtcaagacggtgatagatgatctcatccagaaactgttcgatctgctagtcttgtcactgaagaaatccatccaggcgcatctgcatgagattgatacatttgtgaccgaggcaatggaggtgctgaccataatgccacagagcgtagaggagataggcgacgccaatctccaatacagcaagttgcaagaacgcaaaccggagatcctgcctctcttccaagaagccgaggacaagaaccgcctgctgcgaaccgttgctggtggcggcctcgagacaatcagcaatttgaaggctaagtgggacaagtttgagctgatgatggagtcacaccagttaatgattaaagaccagatagaggtcatgaagggaaatgttaaatctcgcttgcaaatttactaccaggaattagaaaaattcaaggcccgctgggaccagctgaagccaggagacgatgtcattgagaccgggcagcacaataccctagataaatctgcgaaactgatcaaagaaaagaagatagagttcgacgatctcgaagtaacgcgaaagaagctggtggatgattgccaccacttccggctcgaggagccaaatttcagcctcgcctcctcgatttccaaggatatcgagagctgcgcccagatctgggccttctatgaggagttccagcaggggtttcaggagatggcaaacgaagactggatcacattccgtaccaaaacctatttgtttgaagaatttttgatgaattggcacgataggctgcgtaaggtcgaggaacactccgtgatgacagttaaacttcagagcgaggtggacaagtacaaaatcgtgatcccgattcttaaatatgttcggggagagcacctgtcccccgaccattggctggatctttttcgactgctcggactcccacggggtacctctctcgagaaactcttgttcggtgatctccttagggttgccgatacaatagtggccaaagcagctgatttgaaggacctgaactctagggcccagggggaggttacaattcgcgaggccctgcgagaactggacctatggggcgttggtgcagtgttcacgctgatcgattatgaggatagccagtcaaggacaatgaaactaataaaggattggaaggatatcgtgaaccaagtcggcgacaaccggtgccttcttcagtctctcaaagacagtccttactataaaggattcgaggacaaagttagcatctgggagcgcaaacttgccgaactagacgaatatctgcaaaacttaaaccatattcaacgcaaatgggtctacctggaaccaatctttggcagaggtgccctgccgaaggaacagacgcggttcaacagggttgatgaagatttccggtcaatcatgacagacattaagaaggacaacagggtcacaaccttaacaacacatgctgggatccggaacagtcttctgacaattctcgaccagctccaaaggtgccagaaaagcttgaacgaatttttggaggaaaagagaagcgcattccctagattctacttcatcggcgacgacgatttgctagagattctgggacagtccacaaacccaagcgttattcaaagtcaccttaagaagctgtttgccgggatcaattcagtatgttttgatgagaagtcaaagcacattacagcgatgaagagccttgagggagaagtagtcccctttaaaaacaaggtgcctctttctaacaacgtggagacttggctgaacgaccttgcgctcgagatgaagaagacgcttgagcagctgcttaaagaatgtgtgactacagggaggtcctcacagggagctgtcgacccttctctgttccccagccagatcctttgcctggccgaacaaatcaagtttaccgaagatgttgaaaatgctatcaaggatcatagcctccatcagattgaaacccagctagttaacaagttggaacagtacacgaatatagatacgagttcagaggaccctgggaatacagaatctgggattcttgaactcaaactcaaagctctcatcctggacatcattcataatattgatgtcgtgaagcagctgaaccagatccaagtgcataccacggaagactgggcttggaaaaaacagctccgcttttacatgaaaagcgatcacacctgctgcgtgcagatggtggactcagagtttcaatacacatatgagtaccagggcaacgcctcaaagcttgtgtacactcctctcacggacaaatgttacctcactctcacccaggcaatgaaaatgggattaggcggaaacccttatggacctgccgggactggcaaaacggagagcgtcaaggcacttggtggcctactcgggcggcaggtcctggtcttcaattgcgatgaggggatcgatgtgaagagcatgggcagaatcttcgtgggactggtgaaatgtggagcctgggggtgttttgatgagtttaatcggctggaggagagcgttctgtccgccgtgtcaatgcagatccagactatccaggacgccctgaaaaaccatcggacagtttgcgaattgctgggtaaagaggtggaggtaaacagtaacagcggtatctttatcaccatgaaccctgctgggaagggctatgggggccgccagaagttgcccgataacctgaaacagctgttcaggcctgtggcaatgagtcacccggacaatgaattgattgcagaagtaattctatattctgagggattcaaggatgccaaagtgctgagtagaaagctggtggcaatctttaatctgagccgggagctgctcacaccccaacaacactatgattggggactcagggcccttaagaccgtactgcgcggttctggcaatctgctgcgccagttaaataaatctggcacaactcagaacgccaatgagtcacacatcgttgtgcaggcactcaggctgaatacaatgagtaagttcacttttactgattgcactagattcgacgcgctgatcaaggacgtatttcctggcatcgaactcaaagaagtcgaatatgatgagctcagcgccgctctgaaacaggtcttcgaggaagcaaactacgagatcatcccaaaccagattaaaaaagcacttgagttgtatgaacaattgtgtcagcggatgggggttgtgatcgtgggcccttcaggagctggcaagtcaactctatggaggatgctgcgtgcagctctgtgcaagacgggcaaggtggtgaaacaatataccatgaatccaaaggcgatgcctaggtaccagcttctgggccatatcgatatggacactcgggagtggagcgacggggtcctgacaaacagcgctcgtcaggttgtgcgggaaccacaagatgtaagttcttggataatctgcgacggcgacatcgatccagagtggatcgaaagtttgaacagcgtgctggacgacaacaggcttctcactatgccatctggggaacgtattcagttcggcccgaacgtcaacttcgtgttcgaaacccatgatctcagctgcgcctcccctgctactatatccagaatgggaatgatcttccttagcgatgaagagaccgatttgaactcactcatcaagtcttggctccgcaaccagcctgccgagtacagaaataatctcgaaaactggatcggagactattttgaaaaagcactgcagtgggtcttgaagcagaatgactacgtggttgagacctctctggtgggcactgtcatgaacggtctgtcgcatctccatggatgtcgggaccacgacgagtttatcatcaatctgatccgcggactgggtggcaacctgaatatgaagtccagattggaattcaccaaagaagttttccactgggcccgcgagagccctcctgatttccataagcccatggacacctattacgacagcacccgcggtcgcttggcaacctacgtactgaagaagcctgaggatctcactgctgatgactttagtaacggactgaccctccccgtaatacagaccccggacatgcagcgcgggcttgattattttaagccttggctgtcttccgacaccaagcagcccttcatcctggtaggtccggagggttgtggcaaggggatgctgttgcgctacgctttctcgcagctcaggagtacccagatagctaccgtgcactgctcagcgcaaactacctcacggcatctgttgcaaaaacttagccaaacatgcatggtgataagtaccaacacaggacgtgtgtaccgccctaaggactgcgagcggctcgtgctctatttgaaggatatcaatctgccgaagctggacaagtggggcacctctacactggtggctttccttcagcaagtcctcacttatcaggggttttatgacgagaacctggaatgggtggggttagagaatatacagatagtagcttccatgtcggccggaggccggctcggccgtcacaaactcacaactagattcacgagcatcgtacgactttgtagcatcgattatccagagagagagcagctgcaaacaatctacggtgcttacctggaacccgtccttcacaagaatctcaagaatcattccatctggggcagcagtagcaagatttacctgctcgccggcagcatggtccaggtgtacgagcaagtcagagctaagtttacggtggacgattatagtcactatttcttcaccccgtgcattcttacgcagtgggtcctggggttgtttcgctacgatctcgaagggggctctagcaaccaccccttagactacgttcttgaaattgttgcttacgaggcccgccgcctgttccgagacaaaatagtaggtgctaaggaactgcacctgttcgatatcattctaaccagcgtatttcagggtgattgggggtccgatattctggataatatgagcgactccttttacgtgacttggggcgctcgtcacaacagtggcgcccgggccgcccccgggcaaccactcccaccccatgggaagccgttaggaaaactcaactcaacggacctcaaggacgtgattaagaagggcctaatccactacggaagggataaccagaatttggatattcttctgttccatgaggtccttgaatatatgagccgtatagatagagtgctgtcctttccgggcggcagtttactgctcgccgggcgaagcggcgtcgggcggaggacgattacatccctggtctcccacatgcatggggctgtgttattctctccaaagataagcaggggttatgaactgaaacagtttaaaaacgacctgaagcatgtgttgcagctggcggggatcgaggctcagcaggttgtcctccttctcgaagactaccagttcgtgcatccaacatttctggagatgatcaactccctccttagtagcggggaagtcccaggactctatacgctggaggagttagagcccttgcttctcccattgaaggatcaggctagtcaggatgggttttttggaccggtgttcaactacttcacctaccggattcaacagaatctgcatatcgtactgatcatggatagtgctaattccaatttcatgatcaattgtgagtcaaatccagccctgcataagaagtgtcaagttctttggatggaaggctggtctaacagctctatgaagaaaattcctgaaatgctgttctccgagacgggcggcggcgagaaatataatgataaaaagagaaaggaggagaaaaaaaagaactcagtggacccagatttccttaagtcgtttttgctcattcatgaatcatgcaaggcctacggcgcgaccccttctaggtacatgaccttcctgcatgtatattccgccatttctagttctaagaagaaggagctcctgaagcgacagtcacacttgcaggccggtgtgtcaaagctgaacgaagctaaagccctcgtagatgagctgaatagaaaagcaggcgagcaatcagttctcctcaagactaagcaggatgaggccgatgctgcattacaaatgattactgtttcaatgcaggacgcctctgagcagaaaactgagctggaacggctaaaacaccgtattgcggaggaggttgttaaaatcgaggagcgcaaaaacaaaatcgatgatgagcttaaggaagtacagcccctggtgaatgaagccaaactcgctgttgggaatataaagcccgagagcctgtctgagattaggagtcttcggatgcctccagacgtgattagagacattctcgagggcgtcctgaggttgatgggaatttttgatacatcgtgggtgtccatgaaatccttcttggcaaagcgaggggttagagaagatatcgccacctttgatgcaagaaatatttccaaagaaattcgagagtctgttgaggagctgcttttcaagaacaagggaagttttgatcccaaaaacgcaaaacgcgcttcaacagcggccgctccactcgccgcttgggtcaaagcaaatatccagtatagtcacgtgcttgagcggatccatccactagaaactgagcaggccggattggagagtaatctgaaaaaaacagaagatcggaagcgcaaactcgaagaactgttaaactccgtgggccagaaagtttccgagctgaaggagaaattccagtctaggactagtgaggccgctaagcttgaggccgaagtttctaaggctcaggaaacgattaaagcggccgaagtgttaattaatcaattggatcgggaacacaagaggtggaatgcgcaggttgttgaaatcacggaggagctggccaccctgccaaagagggcccaactcgcagcagccttcataacatatctgtctgccgccccagaatcactccgcaagacttgtctggaggaatggacaaaatcggccggcttagaaaaattcgaccttcgccgcttcctgtgcacagaatcagaacaattaatttggaagagcgaaggactgcccagcgacgacttgagcatagagaatgccctggttatcctgcagatcatcggattgaaaagttggtcacgggtgtgtcccttcttgatcgatccttcaagtcaggcaacggagtggcttaaaactcacctgaaggactcgcggctagaagtgatcaaccagcaagactccaatttcatcaccgcactcgagcttgcagtgcgctttggcaagactctcattattcaggaaatggacggggtggagcctgtactctaccccctgctccggcgcgaccttgtggcccagggccctcggtacgtggtgcagattggagataaaattattgattacaacgaagagtttcgtctgtttctgtcaacgcgaaacccaaacccattcatcccaccagacgcagcgagcattgttacagaggtgaatttcactactacacgctcaggcctgaggggacagctcctcgccctgaccattcagcacgaaaaacctgaccttgaagagcagaaaactaagctccttcagcaggaagaagataagaagattcagttagcaaagctggaagagtctctgttggagacattggcaaccagccaggggaacatcctggagaataaagatctcatcgaatccctgaaccagacaaaagctagcagcgctttaattcaggaatctttgaaggagtcctacaagctgcaaatcagcctggatcaggagcgtgatgcatacttgcctctggctgagagtgcctccaaaatgtactttatcatcagcgacctctcaaagattaataatatgtacaggttctccctggccgccttcttacggctgtttcagagagccttgcagaacaagcaggattccgagaacactgaacagcgcatccaatccttgatctcttcacttcagcatatggtgtacgagtatatttgtcggtgcttattcaaggccgaccagctgatgttcgctttgcacttcgttagaggaatgcaccccgagctctttcaggaaaatgagtgggacactttcacaggcgtggtggttggcgacatgctgcggaaggccgactcccagcagaagatacgggaccagttgccctcatggatcgaccaggaacggtcctgggccgtcgcaacccttaagatcgccctgccgagtctgtatcagactctgtgtttcgaggacgcggcactctggcgcacgtactacaacaattctatgtgcgaacaggagttcccatctattctggcaaagaaggtttccctcttccagcaaattctagtcgtgcaggccctgcggcccgaccgacttcagtcggccatggccctgttcgcctgtaaaactctgggcctgaaggaggtgtcccctcttcccctaaacttgaagcgactgtacaaggagaccctcgagatcgagcccattttgatcattatctcacccggcgctgacccctcgcaggagctccaggaattggctaacgccgaaagaagcggagaatgttaccaccaggttgctatggggcaggggcaggcagatctggccattcagatgctgaaagaatgtgcccggaacggagactggttgtgtctgaagaacctgcacttagtggtcagttggttacctgtgctcgaaaaggagttgaatacgctgcagcccaaggacactttcagactttggctgactgccgaagtacatccaaactttacaccgatactcttacaaagctccctcaaaattacctatgagagcccaccaggcctgaaaaagaacctgatgagaacttacgaatcttggacccctgagcagatcagcaagaaggacaatactcatagagctcatgcactgttcagcttggcctggttccatgcagcttgccaagaacgcaggaactacatcccacagggctggacaaagttttacgagttttcactgtccgatctacgggcaggctacaacataattgaccgactctttgacggggcaaaggacgtgcaatgggagtttgtgcatggcctactggagaatgcaatatacggaggcaggatcgataactattttgacctcagagtcctgcagtcatacctcaaacaatttttcaactcaagtgtgatcgatgtctttaatcagcggaataaaaaaagtatttttccttattctgtgtcgctgccgcagagctgcagtatactggattaccgcgccgtcattgaaaagataccagaagatgacaagccgagctttttcggtctgcccgcaaatatcgcccgaagttcccagcgtatgatcagtagtcaggtgattagtcagctgcgaattctggggcgatctatcactgccgggtccaagttcgatcgggagatctggtcaaatgaactctcgcctgtgctgaatctctggaaaaagttgaaccagaatagtaatctcattcaccaaaaagtcccaccccctaacgaccggcaggggtcccctatcctgtcttttattatactggaacagtttaatgctataagactggttcagagtgtgcatcagtccctggctgccctgagtaaggtaattagggggaccaccctcttgagtagtgaggtgcagaagctggcaagcgcattgctgaatcagaaatgcccgctcgcctggcagtccaagtgggaaggccccgaagaccctctccaatatctccggggcctggtggctcgtgccctggctatccagaattgggtagacaaggctgagaagcaggctttgctgagcgagacactcgacctaagcgagctattccatcctgacaccttcctgaatgctctgaggcaggaaactgctagggcggtaggcaggtccgtcgatagcctgaagttcgttgctagttggaaaggaagattacaagaagccaagctgcagataaagatctctggtctgctgctcgaagggtgtagcttcgacggcaatcaattgagcgaaaatcagctggacagcccctcagtcagctcagtgctcccctgtttcatgggctggatccctcaggatgcctgtggaccctacagcccggatgagtgcatctcgctgcctgtgtatacaagcgcggagagggaccgggtggtgactaatattgatgttccatgtgggggcaatcaggaccaatggatccagtgcggcgccgctttgtttttaaagaaccagtag

SEQ ID NO: 36571 - DNA, 12945 bp, Artificial Sequence
  derived and/or modified sequence
atggctaacggtactgccgacgtacgaaaacttttcattttcaccaccacacaaaattacttcggtctaatgtcagaactatgggatcagcccttactctgcaattgcctagagatcaataatttcctggatgacggaaatcaaatgctcctccgtgtccagaggtctgacgctgggatttcattttctaatactatcgagtttggagatactaaggataaagtgctagtttttttcaaactgagacctgaggtgattactgatgagaacttacacgacaacattttagtctccagtatgctcgagtctcccatcagcagcctatatcaggccgtgcgacaggtcttcgcccctatgcttcttaaagatcaggagtggtcccggaatttcgatccgaagctgcaaaacctattgagcgaactggaggctgggttggggatcgtcctacgccgatctgatactaatctgactaagttgaagtttaaggaagatgacacgcgagggatcctaacaccaagcgacgaatttcaattctggatcgagcaagcccaccgaggaaacaaacagatctctaaggagcgcgctaactattttaaagagttatttgaaacaatcgctcgggagttctacaacctggactcactgagccttctggaagtagttgacttggtggagacaacccaagacgtcgtggatgacgtctggaggcagactgaacacgaccactatcccgaatcccggatgctgcacctgctcgacattattggcggaagcttcggccgtttcgtgcaaaagaagctggggactttaaatctttgggaggatccttactatctggtcaaggagagcctgaaggccggtatctccatatgtgagcagtgggtgattgtatgcaaccacctgaccggacaagtgtggcagcgctatgtgcctcatccgtggaagaacgagaaatattttccagagactctcgataagctgggcaaaaggctggaggaagtgcttgcaatccgcaccatccacgaaaagttcctctatttcctgcccgcttcagaagagaagattatttgtctgacccgggtgtttgagccgtttactggcctgaaccctgtgcagtataacccctacaccgagcctctgtggaaggcagcagtctcacaatatgagaagattatcgcgcctgccgagcagaaaatcgcaggaaaactgaagaactacatcagtgagattcaagacagccctcagcagttacttcaggcctttctcaagtataaggagctcgtgaaaaggcccaccatcagcaaagaactcatgctcgaacgagagaccttactggctaggctggtggattccattaaggatttccgacttgactttgaaaatagatgtcggggtatacctggagatgcttctgggccactctctggcaaaaatctgagtgaggtggtgaattccatcgtgtgggttaggcagctggagctgaaggttgacgacacaatcaaaattgctgaagcactcctgtccgaccttcccggtttccggtgttttcaccagtcagccaaagacttgctggatcagttaaagctttatgaacaagagcagtttgacgactggagtcgtgatatccagagcggcctctccgattccaggagcggtctgtgtatcgaggcatctagtagaattatggagctggatagcaatgacggactgctgaaggtccactactccgaccgcttagtgatcctgctgcgggaggttcggcagctatcggctctaggctttgtcatcccagcgaaaattcaacaagtagctaacattgcccagaaattttgtaagcaggctattatcctcaaacaggtggctcacttctataacagtatcgaccaacagatgattcagagccagaggcctatgatgctgcagtctgcgctcgcgttcgaacagatcatcaaaaacagtaaagccggatccggagggaaatctcagatcacatgggataaccccaaggagctggagggatatatccagaaattacagaatgctgccgagcgactggccactgaaaaccggaagttgcgcaagtggcacacaacattctgcgagaaagttgttgtgctgatgaatatcgatttgctccggcagcaacaaaggtggaaggatgggcttcaggaactgagaactggtctggccactgtggaggcccagggatttcaagccagtgatatgcatgcatggaagcagcactggaatcatcagttatacaaagcactggaacatcaatatcagatgggcttggaagccctcaatgaaaaccttccagagatcaatattgacctgacctataagcaaggacggctccagttcagacccccatttgaggagattcgggctaaatattatcgggaaatgaagcgattcatcgggattcctaatcagttcaaaggtgtcggggaggccggagatgagtccatcttcagcatcatgatagacaggaacgccagtgggtttttgacaatcttctctaaggcagaggacctgttccgacgcctgagtgctgtcttacaccaacacaaagagtggattgtgattgggcaggtcgacatggaagctctggtcgagaagcatctgttcactgttcacgattgggaaaaaaacttcaaagctctcaagattaaggggaaggaggtggaaagactgccctccgccgtcaaggtagactgccttaacatcaattgtaatccagtgaaaaccgtgatcgacgatctcatccagaagttgtttgacctcctggtgctgtcattgaagaagagcattcaggcacacttgcacgagattgatacatttgtgacagaagccatggaggtgttgacgattatgcctcagagcgtggaagaaatcggcgatgcaaatctgcagtactccaaactccaggagagaaagcccgaaatcctcccattatttcaggaggcggaggacaagaatcgcctcctgcggacagtggcaggagggggactggagaccatcagcaacctcaaggcaaagtgggataaatttgaactgatgatggagagtcaccagctgatgatcaaggaccagatcgaggtcatgaaaggcaatgtgaagtctcggttgcaaatttattaccaggaattagaaaagtttaaagctcgatgggaccagctgaaaccaggcgatgacgtgattgagaccggacagcacaatactcttgacaagtccgcaaaacttatcaaggaaaaaaaaattgagtttgacgacttagaagtcacaagaaagaagctggtggatgattgtcatcactttagactcgaagaacctaacttctcactcgcctcgtcaatcagtaaagatattgaatcttgcgcccagatatgggccttttatgaagagtttcaacaggggttccaagaaatggctaatgaggattggattacgtttcgtaccaagacttacctttttgaggagtttttgatgaattggcatgatcgactccgaaaagtggaggagcattcggtgatgactgttaagctccagtcagaagtcgacaagtataagatcgtgattccgatcctgaaatatgttcggggtgagcatctgtctccagaccactggctggatcttttcaggctgctggggctgcctcgaggtaccagtttggagaagcttctgttcggagacctcctgcgcgtggcagacacgatcgtggcaaaggcagctgatctcaaagatctcaacagcagggcccaaggggaagtgacaatcagggaggcactgagggagctggacctgtggggggtgggagcagttttcacgctgatagattacgaagactcacagtcacgcaccatgaagctcatcaaggattggaaagacatagtgaatcaggtcggcgacaaccgttgtctcctccagtctctcaaggactcgccatactataaggggttcgaggataaggtgagcatctgggagagaaagctggccgagttggacgaatacctgcagaaccttaatcacattcagcgcaaatgggtatacttagaacctattttcggcagaggcgctctgcctaaagaacaaacacgatttaatagggtggatgaggactttcgatctatcatgactgacattaagaaggataaccgcgtgaccactctgaccacgcacgctgggattcgcaactcgctgctgaccatcttggaccagctgcagcgttgccagaagtccctcaacgaattcttagaagaaaagaggtcagccttccctagattttactttattggcgacgacgacctcctggaaatattaggacaaagcacaaatccatctgtcatccagtcccacctgaaaaagctattcgccggaattaacagcgtctgcttcgacgaaaagagcaagcatattacagcgatgaaatcactggaaggagaggtcgtacctttcaaaaacaaggttccgctgtcaaataacgtggagacctggctgaacgaccttgcattagaaatgaagaagactctggaacagctgctgaaggagtgtgtaaccaccggtcggagctcccagggcgctgttgaccccagtttatttccttctcagatcctctgcctcgcggagcagattaagtttactgaggacgtggagaatgctatcaaggaccatagcctgcatcagatcgagacacagctggtcaataagttggagcagtacacgaatatcgacacatcatctgaggaccccggtaatacagaatcaggcatcctggagctgaagctcaaggccttgattctcgatatcatccataacattgatgtcgtcaaacagttaaatcagatccaggtgcacaccactgaggattgggcttggaaaaagcagctcaggttctatatgaagtccgaccatacttgttgcgtgcaaatggttgactcagaattccaatacacatacgaataccaaggcaacgccagtaagctcgtctatacgcccctaacagataagtgctatctgaccctgacccaagctatgaagatggggctgggagggaacccctatggccctgccggtaccggtaagaccgagtcggtgaaagcactcggcggactgctgggacggcaggtgctagtcttcaattgcgacgaggggatcgacgtaaagagtatgggcaggatcttcgttggcctggttaaatgtggggcatggggctgttttgatgagtttaatagacttgaagaatctgtgttaagcgctgtaagcatgcaaatccaaacaattcaagatgctcttaaaaaccacaggactgtctgtgaactgctggggaaggaggtggaggtgaatagcaactcgggtatctttatcaccatgaaccctgcaggaaagggctacggcggaagacaaaagctccctgacaatttgaagcagctttttcgaccagtggcgatgagtcaccccgacaacgaactcatcgcagaggttattctgtactctgagggcttcaaagacgccaaagtgttatcgcgcaaattggtagccatctttaacttgagtcgtgaattgttgactccgcagcagcactacgattggggacttcgcgctctgaagacggttctgagaggttccgggaacctgctgcgacaattgaacaaatccggtactactcagaacgcaaacgagagtcacattgtcgtccaggccctgcggttaaacacgatgtctaaattcacattcaccgactgcacgagatttgatgccttgatcaaggatgtttttcccggtattgagctgaaggaggtggaatatgacgagctctccgccgctctgaagcaggtgtttgaggaggccaattacgagataatacccaatcagattaaaaaggccttggagctgtacgaacagctgtgccagaggatgggtgttgtgattgtgggacctagcggagcgggaaaaagtaccttatggaggatgctcagggcggctctgtgcaaaactgggaaggtggtgaaacagtacacaatgaatccaaaggccatgccgagataccagttgttgggccatattgacatggatactagggagtggagcgacggagtgttgactaactccgccaggcaggtagtcagggagcctcaggatgtgagttcctggatcatttgcgacggagatatagacccagaatggattgagagcctaaactcagtgctggacgacaatcgtctcttaacaatgcctagcggagaacggatccaatttggaccaaacgtgaatttcgtgtttgaaacccacgatctgtcttgcgcttcacccgctacaatttctcggatgggtatgatcttcttgagcgacgaagaaaccgacctgaatagtctgattaagagttggctgcggaatcagcccgctgaatatcggaataacctggaaaactggataggcgattattttgaaaaggccctacagtgggtactcaagcagaacgattacgttgttgaaacaagcctggttggaacagttatgaatggcctgtcacacctccacggttgtagggatcatgatgaattcatcatcaatttgatccgaggcttggggggtaacctcaacatgaaaagtagattggagttcacaaaagaagtctttcactgggccagggagagccccccagacttccataaacctatggacacatactacgattccacacgcggaaggctggcaacttatgtcttaaaaaaacctgaagatcttactgcagacgatttctccaatggccttacactgcccgtaatccagacacctgacatgcagaggggattggattatttcaagccttggttgtcttctgacactaagcagccctttatcttggttggcccagaaggatgcgggaaaggcatgctgcttaggtacgccttttctcagctgcgttcaacccaaattgccaccgtgcattgttcagcgcagacgaccagccgtcatcttcttcaaaagttatcccagacctgtatggtcatcagcaccaatactgggagggtctacaggccaaaagattgtgaaaggcttgttctgtatctcaaagatattaatctgccaaagctggacaagtggggcacaagtaccctagtggccttcctccaacaagtccttacctaccaggggttttacgatgaaaatctggagtgggtgggcctggagaatatacagatagtggcaagcatgtccgccggaggccgactaggacgccataagctaaccactagattcacttcaatcgtacggctctgcagcattgactatcccgagagagaacagctgcagactatctatggtgcttacttggagcctgtgctgcataaaaatctgaaaaatcacagcatctggggcagcagctctaagatctatctgctggccggatcgatggtccaggtgtacgagcaagtgcgggctaaattcaccgtggacgattactcacactactttttcacaccctgtatcctgacacagtgggtactcggcctgttccgctacgacttggagggcggaagtagtaaccacccgctggattacgtgttggaaattgtggcatacgaagcgcgacggctgttccgcgacaagatcgtgggggcaaaagagctgcatctctttgatatcatcctgaccagtgtctttcagggagattggggatccgacattttagacaatatgtcagacagcttttatgtcacttggggcgctaggcacaactcaggcgcaagagccgctcccggacagccccttccaccccatggcaagccactggggaaactcaattcaacagacctgaaggacgtcatcaagaaagggctgatacactacggcagggacaatcagaatctcgacatcttactattccatgaagtgctcgaatacatgtccagaattgatagggtgttgtcttttccgggtgggagcttgctgcttgcagggagatccggcgtagggaggcgaaccattaccagcctcgtaagccatatgcatggcgctgtcttgttctctcccaagattagccgcggttatgaactaaaacaatttaagaacgacctcaagcatgtgttgcagctggccggaatagaagcccagcaggtcgtgctcctcctcgaagactatcaattcgttcatccaacatttctcgagatgattaattctctgttaagttcaggagaggtgccaggcctctatacgttggaggaactagaaccgctgctccttcctttgaaggatcaggcctctcaggatggctttttcgggccagtgtttaactacttcacttatagaattcagcagaacctgcacattgtcctgatcatggatagcgctaactcgaatttcatgataaattgcgaaagtaatcctgccttgcacaaaaaatgtcaagtgctgtggatggaaggttggtccaattcctccatgaagaagatccctgagatgctcttttctgaaacaggcggaggtgagaaatacaacgataaaaagagaaaagaggaaaaaaagaaaaactccgtggatcccgacttcctgaaatcctttctgcttattcatgagagttgcaaggcttatggggcaaccccaagccggtacatgacctttctgcatgtgtactctgccattagcagttctaagaagaaggaactgctcaaaagacagagccacttgcaggctggcgtcagcaagctgaatgaagctaaagcactagttgacgagttgaaccgcaaggcgggtgagcagtctgtgcttttaaaaacaaagcaggatgaagccgatgccgcactgcagatgattacggtgagcatgcaagatgcgtctgaacagaagaccgaactcgaacgcctgaaacaccgaattgcagaagaagtggtgaaaattgaagagagaaagaacaaaattgatgacgaactgaaagaagttcagcctctcgtcaacgaggccaaacttgctgtgggcaatattaaacctgagtccctaagtgaaattcgcagtctacgtatgccacccgacgtcataagagatatcctggagggagttctccggctgatgggaatttttgacacctcttgggtgtccatgaagtcctttctggccaagcggggagtgagggaagacattgccaccttcgacgcaagaaacatcagcaaagaaatccgagaaagtgtggaagaactccttttcaaaaataaaggatcgttcgaccccaaaaacgccaaacgggcttctaccgctgcagctcccctcgcggcatgggtgaaagccaatatccaatattcgcatgttctggagcgcattcaccccctggaaacagaacaagcgggtctggagagtaatttaaaaaaaaccgaggaccgcaagcgcaagctcgaagaacttcttaatagcgtgggacagaaagttagcgagctaaaggagaaattccagtccaggacctctgaggccgctaagcttgaggccgaggtcagcaaagcccaggagaccatcaaagcagccgaggtgctgattaaccagttggaccgcgagcataaaaggtggaatgctcaagtggtcgaaattactgaggaactggccacgttacccaagcgcgctcagttagctgctgcgtttataacgtatcttagtgccgcacctgaaagccttcggaagacttgtctggaggagtggactaagagcgccggactagagaagtttgaccttcgtcgatttttgtgcacggaatctgagcaattgatttggaagagcgagggcttgccctccgacgatttatcgatcgaaaatgctcttgtaatattacagataataggacttaagagctggtcgcgtgtgtgtccgtttttgattgaccctagcagccaggccacggagtggctgaaaacccacttgaaagattcccgtttggaggtgattaaccagcaggactccaacttcatcaccgccctggaactggcagtacgttttgggaagacccttatcattcaggagatggacggcgtggaaccagtcttatatcccctgctgagacgggacttggtcgctcagggccctcgatatgtcgtacagattggcgacaaaatcatcgactacaacgaggaatttcggctgttcctgtctacccgtaaccctaatccgttcataccgccagatgcagccagcatcgtgactgaggtcaatttcacgaccacaaggtcggggctgcgtggacagctacttgctttaacgattcagcacgaaaagccagacctggaagaacagaaaactaaactgctgcagcaggaggaggataagaaaatccagcttgcgaaactggaagaatctctgctagagactctagccacttcccaggggaacatcctggagaacaaagatttgattgaaagtctgaatcagacaaaagcgagttccgcgctgatccaggagagtctaaaggaatcctacaagctccaaatttcgctggaccaggagcgcgacgcctatctgcctcttgcagaaagcgcctctaagatgtacttcatcatcagcgatctgtccaagatcaacaatatgtatcggtttagtctggccgcattcctgcggctcttccagcgggcactccagaacaaacaggactcagaaaatacggagcagcgtatccagtcactgatctcatcgctgcagcatatggtgtatgagtatatctgccgctgtctctttaaggctgatcagttgatgttcgccctgcactttgtgagaggcatgcatccagagttatttcaggagaacgaatgggatacctttactggagtcgtcgttggagacatgctgcggaaggcagactcccagcagaagattcgagatcagctcccaagctggatcgaccaggagaggtcatgggcagtggctactttgaagatcgccctccctagcctgtatcagaccctttgctttgaagatgccgctctctggcggacttattataataatagcatgtgtgaacaggagtttccttctattctcgcaaaaaaagtttctttgttccagcagatcctcgtggtgcaggccctgcggcctgaccggctgcaatctgccatggccctgttcgcctgcaagaccttgggcctgaaagaggtgtccccattgcctctgaacctgaagcgcctctacaaggaaacacttgagatcgagccgatcctcatcataatttctcctggggcagatccttcacaggagctacaggagctggcaaatgcagagcgcagtggtgaatgctatcaccaggtcgcaatgggccagggacaggccgatctcgctatacagatgctgaaagaatgtgcgagaaatggggattggctgtgtctgaagaacctgcatctggtggtatcgtggctgccagtgctagagaaggagctgaatacattgcagcctaaggatacgtttcggctgtggttaacagctgaggtgcatcctaactttacccccatcttgctccagtcttcactgaagatcacctatgagtcccctcctggtctcaagaaaaacttaatgagaacgtacgaaagttggaccccagagcagatatctaaaaaagacaatacacacagagctcacgctcttttctcacttgcatggttccacgcagcctgtcaggagaggaggaattatatcccacagggttggaccaagttttatgagttctcattgtccgacctcagggccggatataatatcatcgatagactatttgacggagccaaggatgttcagtgggaattcgttcacggcctgctcgagaacgctatatatggtggacgaatcgataactattttgacttacgagtgttgcagagttatctgaagcagtttttcaactcttcagtcattgatgtcttcaaccagcgaaacaaaaagagcatctttccctactcggttagtctccctcagtcctgttctattctggactacagagccgtgattgaaaagatacctgaggatgacaagccaagtttttttggactcccagcgaatattgccagatcctctcaaagaatgataagttctcaggttatttctcagttaaggattttaggtaggtcgattactgcaggctccaagtttgacagagaaatttggagtaacgaactctctcctgtgctaaatttatggaagaagctcaaccagaactcaaaccttatccaccagaaagtgccccctcccaatgatagacaagggtcccccatcctctctttcattatcctggaacagtttaatgctattaggctcgtccaatccgtgcatcaatctctggccgctttaagtaaagtgattcgcggaactacgctgctcagcagcgaggtccaaaaactggcatctgctcttttgaaccagaaatgcccgctggcatggcagtccaaatgggaaggccctgaagatccattacaatacttgcgcggactggtagccagggcacttgcaatccagaactgggtcgacaaagccgagaaacaggccctgctcagcgagaccctggatctgagcgaattgttccaccccgacacttttttaaatgcccttaggcaggagacggcgcgagcagtcggtaggtccgttgatagcttgaagtttgtggcttcttggaaaggcagactccaggaagccaaactgcaaattaagatttcaggacttctgcttgaaggatgctcctttgacggcaaccagcttagtgagaatcaattggattccccttccgtgtcatcggttctgccctgtttcatgggctggatcccccaagacgcttgcggaccttactcacccgacgaatgcatttctctgcctgtgtacacctccgccgagcgagatagggttgttaccaacatcgacgtcccctgtgggggaaaccaggaccagtggatccaatgtggggcagctctgtttcttaaaaatcagtaa

SEQ ID NO: 36572 - DNA, 12945 bp, Artificial Sequence
  derived and/or modified sequence
atggccaacggcaccgccgacgtgagaaagctgttcatcttcaccaccacccagaactacttcggcctgatgagcgagctgtgggaccagcccctgctgtgcaactgcctggagatcaacaacttcctggacgacggcaaccagatgctgctgagagtgcagagaagcgacgccggcatcagcttcagcaacaccatcgagttcggcgacaccaaggacaaggtgctggtgttcttcaagctgagacccgaggtgatcaccgacgagaacctgcacgacaacatcctggtgagcagcatgctggagagccccatcagcagcctgtaccaggccgtgagacaggtgttcgcccccatgctgctgaaggaccaggagtggagcagaaacttcgaccccaagctgcagaacctgctgagcgagctggaggccggcctgggcatcgtgctgagaagaagcgacaccaacctgaccaagctgaagttcaaggaggacgacaccagaggcatcctgacccccagcgacgagttccagttctggatcgagcaggcccacagaggcaacaagcagatcagcaaggagagagccaactacttcaaggagctgttcgagaccatcgccagagagttctacaacctggacagcctgagcctgctggaggtggtggacctggtggagaccacccaggacgtggtggacgacgtgtggagacagaccgagcacgaccactaccccgagagcagaatgctgcacctgctggacatcatcggcggcagcttcggcagattcgtgcagaagaagctgggcaccctgaacctgtgggaggacccctactacctggtgaaggagagcctgaaggccggcatcagcatctgcgagcagtgggtgatcgtgtgcaaccacctgaccggccaggtgtggcagagatacgtgccccacccctggaagaacgagaagtacttccccgagaccctggacaagctgggcaagagactggaggaggtgctggccatcagaaccatccacgagaagttcctgtacttcctgcccgccagcgaggagaagatcatctgcctgaccagagtgttcgagcccttcaccggcctgaaccccgtgcagtacaacccctacaccgagcccctgtggaaggccgccgtgagccagtacgagaagatcatcgcccccgccgagcagaagatcgccggcaagctgaagaactacatcagcgagatccaggacagcccccagcagctgctgcaggccttcctgaagtacaaggagctggtgaagagacccaccatcagcaaggagctgatgctggagagagagaccctgctggccagactggtggacagcatcaaggacttcagactggacttcgagaacagatgcagaggcatccccggcgacgccagcggccccctgagcggcaagaacctgagcgaggtggtgaacagcatcgtgtgggtgagacagctggagctgaaggtggacgacaccatcaagatcgccgaggccctgctgagcgacctgcccggcttcagatgcttccaccagagcgccaaggacctgctggaccagctgaagctgtacgagcaggagcagttcgacgactggagcagagacatccagagcggcctgagcgacagcagaagcggcctgtgcatcgaggccagcagcagaatcatggagctggacagcaacgacggcctgctgaaggtgcactacagcgacagactggtgatcctgctgagagaggtgagacagctgagcgccctgggcttcgtgatccccgccaagatccagcaggtggccaacatcgcccagaagttctgcaagcaggccatcatcctgaagcaggtggcccacttctacaacagcatcgaccagcagatgatccagagccagagacccatgatgctgcagagcgccctggccttcgagcagatcatcaagaacagcaaggccggcagcggcggcaagagccagatcacctgggacaaccccaaggagctggagggctacatccagaagctgcagaacgccgccgagagactggccaccgagaacagaaagctgagaaagtggcacaccaccttctgcgagaaggtggtggtgctgatgaacatcgacctgctgagacagcagcagagatggaaggacggcctgcaggagctgagaaccggcctggccaccgtggaggcccagggcttccaggccagcgacatgcacgcctggaagcagcactggaaccaccagctgtacaaggccctggagcaccagtaccagatgggcctggaggccctgaacgagaacctgcccgagatcaacatcgacctgacctacaagcagggcagactgcagttcagaccccccttcgaggagatcagagccaagtactacagagagatgaagagattcatcggcatccccaaccagttcaagggcgtgggcgaggccggcgacgagagcatcttcagcatcatgatcgacagaaacgccagcggcttcctgaccatcttcagcaaggccgaggacctgttcagaagactgagcgccgtgctgcaccagcacaaggagtggatcgtgatcggccaggtggacatggaggccctggtggagaagcacctgttcaccgtgcacgactgggagaagaacttcaaggccctgaagatcaagggcaaggaggtggagagactgcccagcgccgtgaaggtggactgcctgaacatcaactgcaaccccgtgaagaccgtgatcgacgacctgatccagaagctgttcgacctgctggtgctgagcctgaagaagagcatccaggcccacctgcacgagatcgacaccttcgtgaccgaggccatggaggtgctgaccatcatgccccagagcgtggaggagatcggcgacgccaacctgcagtacagcaagctgcaggagagaaagcccgagatcctgcccctgttccaggaggccgaggacaagaacagactgctgagaaccgtggccggcggcggcctggagaccatcagcaacctgaaggccaagtgggacaagttcgagctgatgatggagagccaccagctgatgatcaaggaccagatcgaggtgatgaagggcaacgtgaagagcagactgcagatctactaccaggagctggagaagttcaaggccagatgggaccagctgaagcccggcgacgacgtgatcgagaccggccagcacaacaccctggacaagagcgccaagctgatcaaggagaagaagatcgagttcgacgacctggaggtgaccagaaagaagctggtggacgactgccaccacttcagactggaggagcccaacttcagcctggccagcagcatcagcaaggacatcgagagctgcgcccagatctgggccttctacgaggagttccagcagggcttccaggagatggccaacgaggactggatcaccttcagaaccaagacctacctgttcgaggagttcctgatgaactggcacgacagactgagaaaggtggaggagcacagcgtgatgaccgtgaagctgcagagcgaggtggacaagtacaagatcgtgatccccatcctgaagtacgtgagaggcgagcacctgagccccgaccactggctggacctgttcagactgctgggcctgcccagaggcaccagcctggagaagctgctgttcggcgacctgctgagagtggccgacaccatcgtggccaaggccgccgacctgaaggacctgaacagcagagcccagggcgaggtgaccatcagagaggccctgagagagctggacctgtggggcgtgggcgccgtgttcaccctgatcgactacgaggacagccagagcagaaccatgaagctgatcaaggactggaaggacatcgtgaaccaggtgggcgacaacagatgcctgctgcagagcctgaaggacagcccctactacaagggcttcgaggacaaggtgagcatctgggagagaaagctggccgagctggacgagtacctgcagaacctgaaccacatccagagaaagtgggtgtacctggagcccatcttcggcagaggcgccctgcccaaggagcagaccagattcaacagagtggacgaggacttcagaagcatcatgaccgacatcaagaaggacaacagagtgaccaccctgaccacccacgccggcatcagaaacagcctgctgaccatcctggaccagctgcagagatgccagaagagcctgaacgagttcctggaggagaagagaagcgccttccccagattctacttcatcggcgacgacgacctgctggagatcctgggccagagcaccaaccccagcgtgatccagagccacctgaagaagctgttcgccggcatcaacagcgtgtgcttcgacgagaagagcaagcacatcaccgccatgaagagcctggagggcgaggtggtgcccttcaagaacaaggtgcccctgagcaacaacgtggagacctggctgaacgacctggccctggagatgaagaagaccctggagcagctgctgaaggagtgcgtgaccaccggcagaagcagccagggcgccgtggaccccagcctgttccccagccagatcctgtgcctggccgagcagatcaagttcaccgaggacgtggagaacgccatcaaggaccacagcctgcaccagatcgagacccagctggtgaacaagctggagcagtacaccaacatcgacaccagcagcgaggaccccggcaacaccgagagcggcatcctggagctgaagctgaaggccctgatcctggacatcatccacaacatcgacgtggtgaagcagctgaaccagatccaggtgcacaccaccgaggactgggcctggaagaagcagctgagattctacatgaagagcgaccacacctgctgcgtgcagatggtggacagcgagttccagtacacctacgagtaccagggcaacgccagcaagctggtgtacacccccctgaccgacaagtgctacctgaccctgacccaggccatgaagatgggcctgggcggcaacccctacggccccgccggcaccggcaagaccgagagcgtgaaggccctgggcggcctgctgggcagacaggtgctggtgttcaactgcgacgagggcatcgacgtgaagagcatgggcagaatcttcgtgggcctggtgaagtgcggcgcctggggctgcttcgacgagttcaacagactggaggagagcgtgctgagcgccgtgagcatgcagatccagaccatccaggacgccctgaagaaccacagaaccgtgtgcgagctgctgggcaaggaggtggaggtgaacagcaacagcggcatcttcatcaccatgaaccccgccggcaagggctacggcggcagacagaagctgcccgacaacctgaagcagctgttcagacccgtggccatgagccaccccgacaacgagctgatcgccgaggtgatcctgtacagcgagggcttcaaggacgccaaggtgctgagcagaaagctggtggccatcttcaacctgagcagagagctgctgaccccccagcagcactacgactggggcctgagagccctgaagaccgtgctgagaggcagcggcaacctgctgagacagctgaacaagagcggcaccacccagaacgccaacgagagccacatcgtggtgcaggccctgagactgaacaccatgagcaagttcaccttcaccgactgcaccagattcgacgccctgatcaaggacgtgttccccggcatcgagctgaaggaggtggagtacgacgagctgagcgccgccctgaagcaggtgttcgaggaggccaactacgagatcatccccaaccagatcaagaaggccctggagctgtacgagcagctgtgccagagaatgggcgtggtgatcgtgggccccagcggcgccggcaagagcaccctgtggagaatgctgagagccgccctgtgcaagaccggcaaggtggtgaagcagtacaccatgaaccccaaggccatgcccagataccagctgctgggccacatcgacatggacaccagagagtggagcgacggcgtgctgaccaacagcgccagacaggtggtgagagagccccaggacgtgagcagctggatcatctgcgacggcgacatcgaccccgagtggatcgagagcctgaacagcgtgctggacgacaacagactgctgaccatgcccagcggcgagagaatccagttcggccccaacgtgaacttcgtgttcgagacccacgacctgagctgcgccagccccgccaccatcagcagaatgggcatgatcttcctgagcgacgaggagaccgacctgaacagcctgatcaagagctggctgagaaaccagcccgccgagtacagaaacaacctggagaactggatcggcgactacttcgagaaggccctgcagtgggtgctgaagcagaacgactacgtggtggagaccagcctggtgggcaccgtgatgaacggcctgagccacctgcacggctgcagagaccacgacgagttcatcatcaacctgatcagaggcctgggcggcaacctgaacatgaagagcagactggagttcaccaaggaggtgttccactgggccagagagagcccccccgacttccacaagcccatggacacctactacgacagcaccagaggcagactggccacctacgtgctgaagaagcccgaggacctgaccgccgacgacttcagcaacggcctgaccctgcccgtgatccagacccccgacatgcagagaggcctggactacttcaagccctggctgagcagcgacaccaagcagcccttcatcctggtgggccccgagggctgcggcaagggcatgctgctgagatacgccttcagccagctgagaagcacccagatcgccaccgtgcactgcagcgcccagaccaccagcagacacctgctgcagaagctgagccagacctgcatggtgatcagcaccaacaccggcagagtgtacagacccaaggactgcgagagactggtgctgtacctgaaggacatcaacctgcccaagctggacaagtggggcaccagcaccctggtggccttcctgcagcaggtgctgacctaccagggcttctacgacgagaacctggagtgggtgggcctggagaacatccagatcgtggccagcatgagcgccggcggcagactgggcagacacaagctgaccaccagattcaccagcatcgtgagactgtgcagcatcgactaccccgagagagagcagctgcagaccatctacggcgcctacctggagcccgtgctgcacaagaacctgaagaaccacagcatctggggcagcagcagcaagatctacctgctggccggcagcatggtgcaggtgtacgagcaggtgagagccaagttcaccgtggacgactacagccactacttcttcaccccctgcatcctgacccagtgggtgctgggcctgttcagatacgacctggagggcggcagcagcaaccaccccctggactacgtgctggagatcgtggcctacgaggccagaagactgttcagagacaagatcgtgggcgccaaggagctgcacctgttcgacatcatcctgaccagcgtgttccagggcgactggggcagcgacatcctggacaacatgagcgacagcttctacgtgacctggggcgccagacacaacagcggcgccagagccgcccccggccagcccctgcccccccacggcaagcccctgggcaagctgaacagcaccgacctgaaggacgtgatcaagaagggcctgatccactacggcagagacaaccagaacctggacatcctgctgttccacgaggtgctggagtacatgagcagaatcgacagagtgctgagcttccccggcggcagcctgctgctggccggcagaagcggcgtgggcagaagaaccatcaccagcctggtgagccacatgcacggcgccgtgctgttcagccccaagatcagcagaggctacgagctgaagcagttcaagaacgacctgaagcacgtgctgcagctggccggcatcgaggcccagcaggtggtgctgctgctggaggactaccagttcgtgcaccccaccttcctggagatgatcaacagcctgctgagcagcggcgaggtgcccggcctgtacaccctggaggagctggagcccctgctgctgcccctgaaggaccaggccagccaggacggcttcttcggccccgtgttcaactacttcacctacagaatccagcagaacctgcacatcgtgctgatcatggacagcgccaacagcaacttcatgatcaactgcgagagcaaccccgccctgcacaagaagtgccaggtgctgtggatggagggctggagcaacagcagcatgaagaagatccccgagatgctgttcagcgagaccggcggcggcgagaagtacaacgacaagaagagaaaggaggagaagaagaagaacagcgtggaccccgacttcctgaagagcttcctgctgatccacgagagctgcaaggcctacggcgccacccccagcagatacatgaccttcctgcacgtgtacagcgccatcagcagcagcaagaagaaggagctgctgaagagacagagccacctgcaggccggcgtgagcaagctgaacgaggccaaggccctggtggacgagctgaacagaaaggccggcgagcagagcgtgctgctgaagaccaagcaggacgaggccgacgccgccctgcagatgatcaccgtgagcatgcaggacgccagcgagcagaagaccgagctggagagactgaagcacagaatcgccgaggaggtggtgaagatcgaggagagaaagaacaagatcgacgacgagctgaaggaggtgcagcccctggtgaacgaggccaagctggccgtgggcaacatcaagcccgagagcctgagcgagatcagaagcctgagaatgccccccgacgtgatcagagacatcctggagggcgtgctgagactgatgggcatcttcgacaccagctgggtgagcatgaagagcttcctggccaagagaggcgtgagagaggacatcgccaccttcgacgccagaaacatcagcaaggagatcagagagagcgtggaggagctgctgttcaagaacaagggcagcttcgaccccaagaacgccaagagagccagcaccgccgccgcccccctggccgcctgggtgaaggccaacatccagtacagccacgtgctggagagaatccaccccctggagaccgagcaggccggcctggagagcaacctgaagaagaccgaggacagaaagagaaagctggaggagctgctgaacagcgtgggccagaaggtgagcgagctgaaggagaagttccagagcagaaccagcgaggccgccaagctggaggccgaggtgagcaaggcccaggagaccatcaaggccgccgaggtgctgatcaaccagctggacagagagcacaagagatggaacgcccaggtggtggagatcaccgaggagctggccaccctgcccaagagagcccagctggccgccgccttcatcacctacctgagcgccgcccccgagagcctgagaaagacctgcctggaggagtggaccaagagcgccggcctggagaagttcgacctgagaagattcctgtgcaccgagagcgagcagctgatctggaagagcgagggcctgcccagcgacgacctgagcatcgagaacgccctggtgatcctgcagatcatcggcctgaagagctggagcagagtgtgccccttcctgatcgaccccagcagccaggccaccgagtggctgaagacccacctgaaggacagcagactggaggtgatcaaccagcaggacagcaacttcatcaccgccctggagctggccgtgagattcggcaagaccctgatcatccaggagatggacggcgtggagcccgtgctgtaccccctgctgagaagagacctggtggcccagggccccagatacgtggtgcagatcggcgacaagatcatcgactacaacgaggagttcagactgttcctgagcaccagaaaccccaaccccttcatcccccccgacgccgccagcatcgtgaccgaggtgaacttcaccaccaccagaagcggcctgagaggccagctgctggccctgaccatccagcacgagaagcccgacctggaggagcagaagaccaagctgctgcagcaggaggaggacaagaagatccagctggccaagctggaggagagcctgctggagaccctggccaccagccagggcaacatcctggagaacaaggacctgatcgagagcctgaaccagaccaaggccagcagcgccctgatccaggagagcctgaaggagagctacaagctgcagatcagcctggaccaggagagagacgcctacctgcccctggccgagagcgccagcaagatgtacttcatcatcagcgacctgagcaagatcaacaacatgtacagattcagcctggccgccttcctgagactgttccagagagccctgcagaacaagcaggacagcgagaacaccgagcagagaatccagagcctgatcagcagcctgcagcacatggtgtacgagtacatctgcagatgcctgttcaaggccgaccagctgatgttcgccctgcacttcgtgagaggcatgcaccccgagctgttccaggagaacgagtgggacaccttcaccggcgtggtggtgggcgacatgctgagaaaggccgacagccagcagaagatcagagaccagctgcccagctggatcgaccaggagagaagctgggccgtggccaccctgaagatcgccctgcccagcctgtaccagaccctgtgcttcgaggacgccgccctgtggagaacctactacaacaacagcatgtgcgagcaggagttccccagcatcctggccaagaaggtgagcctgttccagcagatcctggtggtgcaggccctgagacccgacagactgcagagcgccatggccctgttcgcctgcaagaccctgggcctgaaggaggtgagccccctgcccctgaacctgaagagactgtacaaggagaccctggagatcgagcccatcctgatcatcatcagccccggcgccgaccccagccaggagctgcaggagctggccaacgccgagagaagcggcgagtgctaccaccaggtggccatgggccagggccaggccgacctggccatccagatgctgaaggagtgcgccagaaacggcgactggctgtgcctgaagaacctgcacctggtggtgagctggctgcccgtgctggagaaggagctgaacaccctgcagcccaaggacaccttcagactgtggctgaccgccgaggtgcaccccaacttcacccccatcctgctgcagagcagcctgaagatcacctacgagagcccccccggcctgaagaagaacctgatgagaacctacgagagctggacccccgagcagatcagcaagaaggacaacacccacagagcccacgccctgttcagcctggcctggttccacgccgcctgccaggagagaagaaactacatcccccagggctggaccaagttctacgagttcagcctgagcgacctgagagccggctacaacatcatcgacagactgttcgacggcgccaaggacgtgcagtgggagttcgtgcacggcctgctggagaacgccatctacggcggcagaatcgacaactacttcgacctgagagtgctgcagagctacctgaagcagttcttcaacagcagcgtgatcgacgtgttcaaccagagaaacaagaagagcatcttcccctacagcgtgagcctgccccagagctgcagcatcctggactacagagccgtgatcgagaagatccccgaggacgacaagcccagcttcttcggcctgcccgccaacatcgccagaagcagccagagaatgatcagcagccaggtgatcagccagctgagaatcctgggcagaagcatcaccgccggcagcaagttcgacagagagatctggagcaacgagctgagccccgtgctgaacctgtggaagaagctgaaccagaacagcaacctgatccaccagaaggtgcccccccccaacgacagacagggcagccccatcctgagcttcatcatcctggagcagttcaacgccatcagactggtgcagagcgtgcaccagagcctggccgccctgagcaaggtgatcagaggcaccaccctgctgagcagcgaggtgcagaagctggccagcgccctgctgaaccagaagtgccccctggcctggcagagcaagtgggagggccccgaggaccccctgcagtacctgagaggcctggtggccagagccctggccatccagaactgggtggacaaggccgagaagcaggccctgctgagcgagaccctggacctgagcgagctgttccaccccgacaccttcctgaacgccctgagacaggagaccgccagagccgtgggcagaagcgtggacagcctgaagttcgtggccagctggaagggcagactgcaggaggccaagctgcagatcaagatcagcggcctgctgctggagggctgcagcttcgacggcaaccagctgagcgagaaccagctggacagccccagcgtgagcagcgtgctgccctgcttcatgggctggatcccccaggacgcctgcggcccctacagccccgacgagtgcatcagcctgcccgtgtacaccagcgccgagagagacagagtggtgaccaacatcgacgtgccctgcggcggcaaccaggaccagtggatccagtgcggcgccgccctgttcctgaagaaccagtag

SEQ ID NO: 36573 - DNA, 12945 bp, Artificial Sequence
  derived and/or modified sequence
atggcgaacgggactgcggacgttcggaagctcttcatcttcactactacccagaattacttcgggttgatgtctgaactctgggatcagccactgttgtgcaactgtcttgaaatcaacaacttcttggatgacggcaaccagatgctcctcagggtgcagcgatccgacgcaggaatctccttttccaacacgattgagtttggtgacacaaaagataaagtgctggtgtttttcaagctgcgacctgaagtaattactgatgagaatctacatgataacattcttgtttcatctatgttagagtcacctattagttctctttaccaagcagtacggcaagtattcgcaccaatgttgttaaaggatcaggaatggagcagaaactttgatcccaaacttcagaatcttttgagtgaactagaagctgggttgggtatagttctacgaagatcagacactaacttaacaaaattgaaatttaaggaagatgacacacgaggtatccttacaccaagcgatgagttccagttttggatagaacaagctcaccgtggaaataaacagattagtaaagaaagagccaattattttaaagaattatttgaaacaattgcaagagagttttataacttggacagtctatccttactagaagttgttgacttggtggagactactcaggatgttgtagatgatgtgtggagacaaacagaacatgatcattatcctgagtcacgaatgttgcatctcttagacatcataggtggttcatttggaaggtttgttcagaaaaagttgggaactttgaacctgtgggaagatccttattatcttgtgaaagaaagtctgaaagctggtatttcaatttgtgaacagtgggtgatagtctgtaatcatctaacaggtcaggtgtggcagcgctatgttcctcatccatggaaaaatgaaaaatattttccagaaacacttgacaaacttggcaaacgccttgaagaggtcttggctattagaacaattcatgagaagtttctctattttctacctgccagtgaagagaaaatcatatgcctcactcgagtatttgaaccttttactggcctgaatcctgtgcaatataatccatatactgagcccttgtggaaagctgcggtgtctcaatatgaaaagattattgcacctgcggaacaaaaaatagcaggaaaattgaaaaattatatttcagaaattcaagacagtccacagcagcttcttcaagcattcctgaaatataaagagttggtaaagcgtccaactataagcaaagaattgatgttagaaagagaaactttactggcaagacttgtggactcaattaaagattttcgattagactttgagaatcggtgccgaggaattcctggtgatgcatctggaccactttctggcaaaaatctttcagaagttgtcaacagtatagtttgggttcgccagttggaattgaaggtagatgatactatcaagattgcagaggctcttttatctgacttgccaggatttcgatgtttccatcaaagtgccaaagatctcttagaccagcttaaactatatgaacaggaacaatttgatgattggtccagggatattcaatcaggtttatctgattccagatctggtttgtgtattgaggctagtagtcgaattatggaattggattctaatgatggattactaaaagtgcattattcagatcgtttggtgattcttctgagagaagttcgtcagctctctgcacttggctttgttattcctgccaaaatacagcaagttgcaaacattgcacagaaattctgcaagcaagcaattattcttaaacaagtggcacatttttataattctattgatcaacaaatgattcaaagtcagaggccaatgatgttacaatctgccttagcatttgaacagataattaagaattcaaaagcaggaagtggagggaaatcacagataacttgggataatcctaaagaattagaaggctatatccaaaaactccaaaatgctgctgaacggcttgccactgaaaatagaaaactgagaaaatggcacactacattttgtgaaaaggtggttgttcttatgaatattgatctgcttcggcagcaacagcgctggaaagatggattacaagaattgagaactggcttagcaactgtagaagcacagggattccaagcaagtgacatgcatgcatggaaacaacactggaatcatcaactgtacaaagctctggagcatcagtaccagatgggcttagaagcacttaatgagaatttgccagaaataaatatagacttaacttacaaacagggacgattacaattcaggcccccttttgaagaaatccgggctaaatattatagagaaatgaagagattcatcggcattccaaatcagtttaagggagtgggtgaggcaggagatgaatctattttttctattatgattgatagaaatgcaagtggatttttgacgattttcagcaaagcagaagatctgtttagaagattgtcagctgttttacaccaacataaggaatggattgtaattgggcaagttgatatggaagctctggtggaaaagcatctttttactgtacatgattgggagaaaaattttaaagcattaaaaataaaggggaaagaagtagaacgacttccaagtgctgtcaaggtagattgtttaaatattaattgcaaccctgtgaagactgtgattgatgatctcatccagaagttatttgatctgcttgttctttctttgaagaagtccatacaggctcatttacatgaaattgatacatttgttactgaggctatggaagtcttaacaattatgccccagtctgtggaagaaattggtgatgcaaatctacaatatagtaagttacaagaacggaagccagagattttgcccttatttcaagaagctgaagacaaaaacagacttttacgaactgtggctggtggaggtttagaaacaattagtaatttgaaagccaagtgggataaatttgagttaatgatggaaagtcaccaacttatgattaaagaccagattgaagtgatgaaaggaaatgtgaaatcacgtcttcagatctattatcaagaactggaaaaatttaaagctcgttgggaccaactaaagcctggtgatgatgttattgaaactggccaacataatactcttgataaaagtgcaaagttaataaaagagaaaaaaattgagtttgatgatcttgaagtcacaagaaaaaagctggttgatgattgccatcattttagactggaagagcctaatttctccctggcaagtagtatctctaaagatatcgagagctgtgcccaaatttgggccttttatgaagagtttcaacaaggatttcaggaaatggccaatgaagactggatcacttttcggactaagacatacctgtttgaggaatttttgatgaactggcatgacagattaaggaaggttgaagaacattcagtgatgacagtgaaattacaatcagaggttgacaaatataaaatcgtaattcctatcttgaaatatgtgagaggggagcatctttctccagatcactggcttgacctttttcgtctccttggacttcctagggggactagtctagagaaactactgtttggtgatttgctcagagtagctgatacaattgtagccaaagctgccgaccttaaagatttaaatagtcgggcacaaggtgaagttacaatcagagaagctttacgtgaacttgatctttggggagttggagcagtgtttacattaattgattatgaagacagccaaagtcgaactatgaagctgattaaagactggaaagatatagtaaatcaggttggagataatagatgccttctccaatccttaaaggattctccttattataaaggatttgaagataaagtatcaatttgggaaagaaaacttgcagagttagatgaatacctgcagaatttaaatcatattcagagaaagtgggtgtatttggaacccattttcggccgtggagcattgccaaaagaacagacacgcttcaacagagttgatgaagattttagatcaataatgactgatatcaagaaagacaatagagtcacaacattaactactcatgctggaataagaaattctctactaacaatacttgatcagcttcaaagatgtcagaaatcattaaatgaatttttggaggaaaaacgctcagcattcccaagattttattttattggtgatgatgacttattagaaatattgggccagtctaccaacccatcagtgattcagtctcacctgaagaagctttttgctggtattaacagtgtttgctttgatgagaaatcaaaacatataactgcaatgaaatctttagagggagaagttgtaccttttaaaaataaagttcctctatcaaataatgtagagacatggttgaatgatttggccttagaaatgaagaaaactttggaacagttgttgaaggaatgtgttactactgggcgaagttctcaaggtgcagttgacccatctctgttcccttcacagattttatgcttggcggagcagattaaattcactgaagatgtagaaaatgctattaaagatcatagtcttcatcagattgaaacacaactggtgaataagttagagcaatatactaacattgatacaagttctgaggatccagggaatactgaatcgggcatcctggagcttaaacttaaagccctaattcttgacattatccataatattgatgtggtaaagcagttaaaccaaattcaggttcatacaactgaagactgggcttggaaaaaacaacttagattctatatgaaaagtgatcatacatgttgtgttcaaatggtggattctgaatttcagtatacttatgaatatcagggtaatgcttccaaactggtttatactccactgacagacaagtgctacttaactctcactcaagccatgaagatgggacttggaggaaatccttatggaccagctggaactgggaaaacggaatcagtaaaggctttaggtggacttcttggaagacaagttttagtctttaattgtgatgagggcatcgatgtgaagtcaatgggacgaatatttgttggtttggtgaagtgtggggcctggggttgttttgatgaatttaataggctggaagaatctgtactgtcagcagtttctatgcaaatccagacaattcaagatgctttgaagaatcatagaactgtatgtgaactgcttggcaaggaggtagaagtaaattctaattctggaatttttatcactatgaatcctgctggaaaaggttatggaggaagacaaaaactgcctgataatcttaaacagcttttcaggcccgtagctatgtctcatccagacaatgagcttattgcagaagttattctctattcggaaggctttaaagacgctaaagtattgagcagaaaattggtagctattttcaatctatctagggaacttttgacacctcagcaacattatgattggggtttgagagctttgaagacagttctgagaggaagtggaaatctccttagacagctaaacaaaagtggcactacacagaatgctaatgaaagtcatattgtggtacaagcactgaggcttaataccatgtcaaagtttacgtttactgattgcacccggtttgatgcactgataaaagatgtctttccgggaattgaattgaaagaagtggaatatgatgaactaagtgctgcattaaagcaggtctttgaagaggccaattatgaaattatacccaatcagatcaaaaaggctttagaattgtatgaacagttatgccagaggatgggagttgttattgttggtccaagtggtgctggaaaatcaacgctttggagaatgttaagggctgcgctttgtaaaactggcaaagtagtgaaacaatatactatgaatcccaaagctatgcctcgatatcaattattaggccatattgacatggacacaagagaatggtctgatggtgttttgacaaatagtgctcgtcaagtggttcgggaacctcaagatgtcagctcatggataatctgtgatggtgatattgaccctgaatggatagaatctctgaattctgttctggatgataatcgactgctgactatgcccagtggagaaaggattcagtttggcccaaatgttaactttgtatttgaaactcatgatttaagttgtgcatcaccagccacaatatctagaatgggaatgatctttcttagtgatgaagagacagatcttaattctctgataaaatcttggttgaggaatcagcctgctgaatatagaaataatcttgaaaattggattggagattattttgaaaaggctttacaatgggttctaaagcagaatgactatgtggtagaaacaagtttggttgggactgtgatgaatggtttgtcacatctacatggttgcagagatcatgacgaattcattattaatctcataaggggacttggtggaaatctgaatatgaagtcacgtttggaatttaccaaagaggtttttcattgggcacgagaatctcctccagactttcacaaacctatggatacctactatgactctactaggggtcgattagcaacatatgtgcttaagaagccagaagacttgactgctgatgatttcagtaacggcttaactcttccagtcattcagactcctgacatgcaacgaggtctagattatttcaaaccatggttaagttctgatactaaacagccctttattctggtaggaccagaaggatgtggcaaagggatgctgctcaggtacgcattttcacaactccggtccactcaaattgctacagttcactgtagtgcacaaaccacttctcgacatctcctgcagaaactgagccagacttgcatggtaatcagtactaatactggtcgtgtatacagaccaaaagactgtgaaagacttgttctgtacttaaaagatatcaacctacctaaacttgataaatgggggaccagtactttggtagcattcctacaacaggtattgacgtatcaaggattttatgatgaaaatttggaatgggttggtctagaaaatattcaaattgtggcttctatgtcagctggaggaagactgggaagacataaacttactaccagatttacttccatcgttcgtctttgttctatagattacccagaaagagagcagttacaaacgatttatggagcatatttggaaccagttctacataaaaatctgaagaatcattctatttggggttcttcatcaaaaatttatcttttagcaggatctatggtacaagtgtatgaacaggtgcgagccaaatttacagttgatgattatagtcactatttctttactccttgcattcttacccaatgggttcttggcttatttagatatgatttagaaggaggatcctcaaaccatccactagattatgtgttagaaattgtagcatatgaggcacggcgcttatttcgtgacaaaattgttggtgcaaaggaacttcatttatttgacatcattttaacatcagtgtttcaaggagattggggctcagacatattagacaatatgtcagatagtttctacgttacatggggagctcggcataattcaggagcaagggcagccccaggacaaccattacctccacatggaaaaccacttggaaaactaaactctactgatctcaaggatgttattaaaaagggtcttattcattatggacgagataaccagaatttagacattttacttttccacgaagtcttggagtatatgtctaggatagatagagtgctgagtttccctggaggttcacttctattagcaggacgcagtggtgtaggtcgtcggaccatcacttctttagtcagtcacatgcatggagcggtcctgttttctccaaagatttccagaggatatgaactgaagcagttcaaaaatgatctcaaacatgtgctgcaacttgcaggaattgaagcacaacaggtagttttacttcttgaggattaccagtttgtacatcctacatttttggagatgatcaatagccttttgtcttcaggtgaagttcctggactctatactcttgaagaattagagcccttgctgttaccacttaaggatcaagcttcacaagatggtttttttggaccagtcttcaattacttcacatatagaattcagcaaaacttgcatattgtcttgataatggattctgcaaattcaaacttcatgataaactgtgagagtaatccagctttgcataagaaatgccaggtgttgtggatggagggttggtccaatagcagtatgaagaaaatacctgaaatgttattcagtgaaacaggtggtggagaaaaatacaatgataaaaaacgaaaagaagaaaagaaaaaaaattcagttgatcctgattttctaaaatcatttttattaatccatgaatcttgtaaagcatatggtgctacaccaagccgatacatgacctttttacatgtgtattctgccattagtagtagcaagaaaaaggaattattaaaaagacaaagtcatttgcaggctggtgtatctaaactaaatgaagctaaagctcttgtggatgaactgaacagaaaagctggagaacaaagtgtgttacttaaaacgaagcaagatgaagcagatgctgcccttcaaatgatcacagtgtcaatgcaggatgctagtgagcaaaaaacagaacttgaaagactgaagcacagaatagcagaagaagttgttaaaattgaagaaagaaaaaataaaattgatgatgaattaaaagaagtacaacctttagtcaatgaagctaaactagcagttggaaacattaagcccgaatcactttcagaaattcgctcactacgcatgccacctgatgtaattagagatattcttgaaggagttttaaggttgatgggtatctttgatacatcttgggtgagcatgaaaagtttccttgcaaaaagaggtgtaagagaagacatagcaacctttgatgcccgaaatatttcaaaggaaataagagagagtgttgaagaacttctttttaaaaataaaggctcttttgatccaaagaatgctaagcgtgccagtactgcagctgcacctttggctgcctgggtgaaagccaatattcagtattcccatgtcttggaacgaattcatcctttggaaactgaacaggcaggattagaatcgaatctgaagaaaactgaagacagaaaaaggaaactagaggagcttcttaattctgttggtcaaaaggtatcagaactcaaagaaaaatttcagagcaggacttcagaagctgccaaacttgaggctgaagtaagcaaggcacaagaaacaatcaaagctgcagaagtcttaattaatcagcttgacagagaacataagagatggaatgcacaggttgtagagataacagaggaattagctactcttcctaaaagagctcaacttgctgctgcatttattacatatctttctgctgctcctgaatctctgagaaaaacctgtttggaagaatggaccaagtcagctggtcttgagaaatttgatctgaggagatttctttgtactgaaagtgagcagttaatttggaaaagtgaaggcctaccatcagatgacctttccatagaaaatgctcttgtaatattacagatcattggtttgaaatcatggagtcgagtgtgcccatttcttatagatccttcttcccaagctacagagtggttaaaaacacatttgaaagactcacgtttagaagttatcaatcagcaggatagtaactttatcacagctcttgaattagcagtacgttttgggaaaacccttattatacaagagatggatggtgtagaacctgttctttatccattattgagacgagatctggttgctcaaggaccacgttatgtggtacaaataggtgacaaaattattgactacaatgaagaattccgcctctttttgtcaacaagaaacccaaatccttttattccaccggatgcagcttccattgttactgaggttaactttactacaacaagaagtggattacgagggcagcttttagctttaaccattcagcatgagaaacctgatttagaagaacagaaaacaaaactattacaacaggaagaagataagaaaatacagctagccaagctcgaagaatctcttctagagacacttgccacatctcaaggcaatattttggaaaataaggatttgattgagtctttgaatcagacaaaagcaagcagtgcacttattcaagagtcacttaaagaatcttacaaactccaaatttcccttgatcaagaacgggatgcctatctccccctggctgagagtgccagcaagatgtacttcattatttctgatttgtccaaaattaataacatgtaccgttttagtttggctgcttttctccgacttttccaacgagctctacaaaacaaacaggattctgaaaatacagaacagagaatccagtcacttatcagctcattacaacatatggtatatgaatatatatgtcgttgtctatttaaggctgatcagttgatgttcgctttgcattttgttcgaggcatgcatcctgaactttttcaagaaaatgaatgggatacgtttacaggtgtggttgttggagacatgttacggaaagctgactctcaacaaaaaatacgtgatcagcttccgtcttggatagatcaggaacgaagctgggccgtggcaacattaaagattgctctccccagtctttatcagaccctctgctttgaagatgcagctctgtggcgtacttattataataattcaatgtgtgagcaagagtttccatctatccttgcaaagaaagtttccttatttcagcagattcttgtagtacaggcgctaagaccggacagattgcaaagtgccatggctctttttgcatgtaaaactctgggactgaaagaggtgtccccactgcctctaaatctcaaacgtttatacaaagagacactggaaattgaacccatcttgataattatttctccgggtgctgatccttctcaggaacttcaagaactagctaatgctgaaagaagcggagagtgttatcaccaggttgccatgggtcaaggtcaagctgatttagcaattcaaatgctaaaagaatgtgcccgcaatggagactggctctgtttgaagaacttacatcttgtggtatcttggctgccagttctggaaaaggaattgaatactcttcaacctaaagatacctttcgtctttggctcactgcagaagttcatcccaactttactcctattttactacagtcaagtctgaagataacatatgagtcacctccaggtttaaagaagaatttaatgcgtacttatgagtcttggactcctgagcaaattagcaaaaaagataatacacatcgagctcatgctctcttcagtcttgcatggtttcatgctgcatgtcaagaaagaagaaactatattcctcagggttggacaaagttttatgaattttctttatcagatcttcgggctgggtacaacattattgacagactttttgatggtgccaaagatgtacaatgggaatttgtacatggtttacttgaaaatgctatttatggaggacgtatagacaactattttgaccttagagttcttcagtcatacctgaagcagttttttaattcttcagttattgatgtattcaaccaaaggaacaagaaaagcatttttccatattccgtatctctaccacaatcctgcagcattttggactatcgtgctgtcattgagaaaattccagaggacgacaaacctagtttctttggtctgcctgccaatatcgctcgctcatctcagcgcatgatcagttctcaggttatttcacagttgaggattttgggcagatccataacagctggttccaaatttgatagagaaatctggtctaatgaactttctcctgtcctcaatctctggaagaaactaaaccagaattcaaacctaatacatcagaaagtgcctcctcctaacgatcgacaaggatctccaatactgtcattcatcattcttgaacaatttaatgctattcgtttagtacaaagtgtccaccagtctcttgctgctctcagcaaagtcatcagaggaactactttactgagttcagaagtacaaaaattggcaagtgctttattaaaccaaaagtgtcctctcgcatggcagagcaagtgggaaggcccagaagatcccttacaatacctgagaggtcttgttgcccgtgcccttgcaatacagaactgggtagataaagctgaaaaacaggctcttctctctgaaacacttgacctatcagaacttttccatccagacacatttcttaatgctcttcgccaggaaactgcaagggcagtgggtcgttctgtggatagccttaaatttgtagcctcatggaaaggtcgactgcaagaagcaaagctacaaattaagatcagtggcttgttactagaaggatgtagttttgatggaaatcaactttctgaaaatcagcttgattctcccagcgtgtcatcagtgctcccttgttttatgggctggattccacaggatgcatgtggtccatattctccggatgagtgcatctctttgcctgtttacacaagtgctgaaagggatcgtgtggttaccaatattgatgttccatgtgggggcaaccaagaccagtggattcagtgtggagcagctctattcctaaaaaatcagtag

SEQ ID NO: 36574 - protein, 595 aa, Artificial Sequence
  derived and/or modified sequence
MAGPSPPLRAGVGRRLLGVAHPDLRPCLCGELQVEGGPGPVPGMLRTCYVRSPWRRGPSSARGEQSGSGHLEQEEVQSGSLLFRLLLFLSRSPASRNQRILYTVLECQPLFDSSDMTIAEWVCLAQTIKRHYEQYHGFVVIHGTDTMAFAASMLSFMLENLQKTVILTGAQVPIHALWSDGRENLLGALLMAGQYVIPEVCLFFQNQLFRGNRATKVDARRFAAFCSPNLLPLATVGADITINRELVRKVDGKAGLVVHSSMEQDVGLLRLYPGIPAALVRAFLQPPLKGVVMETFGSGNGPTKPDLLQELRVATERGLVIVNCTHCLQGAVTTDYAAGMAMAGAGVISGFDMTSEAALAKLSYVLGQPGLSLDVRKELLTKDLRGEMTPPSVEERRPSLQGNTLGGGVSWLLSLSGSQEADALRNALVPSLACAAAHAGDVEALQALVELGSDLGLVDFNGQTPLHAAARGGHTEAVTMLLQRGVDVNTRDTDGFSPLLLAVRGRHPGVIGLLREAGASLSTQELEEAGTELCRLAYRADLEGLQVWWQAGADLGQPGYDGHSALHVAEAAGNLAVVAFLQSLEGAVGAQAPCP

SEQ ID NO: 36575 - protein, 573 aa, Artificial Sequence
  derived and/or modified sequence
MARAVGPERRLLAVYTGGTIGMRSELGVLVPGTGLAAILRTLPMFHDEEHARARGLSEDTLVLPPASRNQRILYTVLECQPLFDSSDMTIAEWVCLAQTIKRHYEQYHGFVVIHGTDTMAFAASMLSFMLENLQKTVILTGAQVPIHALWSDGRENLLGALLMAGQYVIPEVCLFFQNQLFRGNRATKVDARRFAAFCSPNLLPLATVGADITINRELVRKVDGKAGLVVHSSMEQDVGLLRLYPGIPAALVRAFLQPPLKGVVMETFGSGNGPTKPDLLQELRVATERGLVIVNCTHCLQGAVTTDYAAGMAMAGAGVISGFDMTSEAALAKLSYVLGQPGLSLDVRKELLTKDLRGEMTPPSVEERRPSLQGNTLGGGVSWLLSLSGSQEADALRNALVPSLACAAAHAGDVEALQALVELGSDLGLVDFNGQTPLHAAARGGHTEAVTMLLQRGVDVNTRDTDGFSPLLLAVRGRHPGVIGLLREAGASLSTQELEEAGTELCRLAYRADLEGLQVWWQAGADLGQPGYDGHSALHVAEAAGNLAVVAFLQSLEGAVGAQAPCPEVLPGV

SEQ ID NO: 36576 - DNA, 1788 bp, Artificial Sequence
  derived and/or modified sequence
atggccggccccagcccccccctgagagccggcgtgggcagaagactgctgggcgtggcccaccccgacctgagaccctgcctgtgcggcgagctgcaggtggagggcggccccggccccgtgcccggcatgctgagaacctgctacgtgagaagcccctggagaagaggccccagcagcgccagaggcgagcagagcggcagcggccacctggagcaggaggaggtgcagagcggcagcctgctgttcagactgctgctgttcctgagcagaagccccgccagcagaaaccagagaatcctgtacaccgtgctggagtgccagcccctgttcgacagcagcgacatgaccatcgccgagtgggtgtgcctggcccagaccatcaagagacactacgagcagtaccacggcttcgtggtgatccacggcaccgacaccatggccttcgccgccagcatgctgagcttcatgctggagaacctgcagaagaccgtgatcctgaccggcgcccaggtgcccatccacgccctgtggagcgacggcagagagaacctgctgggcgccctgctgatggccggccagtacgtgatccccgaggtgtgcctgttcttccagaaccagctgttcagaggcaacagagccaccaaggtggacgccagaagattcgccgccttctgcagccccaacctgctgcccctggccaccgtgggcgccgacatcaccatcaacagagagctggtgagaaaggtggacggcaaggccggcctggtggtgcacagcagcatggagcaggacgtgggcctgctgagactgtaccccggcatccccgccgccctggtgagagccttcctgcagccccccctgaagggcgtggtgatggagaccttcggcagcggcaacggccccaccaagcccgacctgctgcaggagctgagagtggccaccgagagaggcctggtgatcgtgaactgcacccactgcctgcagggcgccgtgaccaccgactacgccgccggcatggccatggccggcgccggcgtgatcagcggcttcgacatgaccagcgaggccgccctggccaagctgagctacgtgctgggccagcccggcctgagcctggacgtgagaaaggagctgctgaccaaggacctgagaggcgagatgaccccccccagcgtggaggagagaagacccagcctgcagggcaacaccctgggcggcggcgtgagctggctgctgagcctgagcggcagccaggaggccgacgccctgagaaacgccctggtgcccagcctggcctgcgccgccgcccacgccggcgacgtggaggccctgcaggccctggtggagctgggcagcgacctgggcctggtggacttcaacggccagacccccctgcacgccgccgccagaggcggccacaccgaggccgtgaccatgctgctgcagagaggcgtggacgtgaacaccagagacaccgacggcttcagccccctgctgctggccgtgagaggcagacaccccggcgtgatcggcctgctgagagaggccggcgccagcctgagcacccaggagctggaggaggccggcaccgagctgtgcagactggcctacagagccgacctggagggcctgcaggtgtggtggcaggccggcgccgacctgggccagcccggctacgacggccacagcgccctgcacgtggccgaggccgccggcaacctggccgtggtggccttcctgcagagcctggagggcgccgtgggcgcccaggccccctgcccctag

SEQ ID NO: 36577 - DNA, 1722 bp, Artificial Sequence
  derived and/or modified sequence
atggccagagccgtgggccccgagagaagactgctggccgtgtacaccggcggcaccatcggcatgagaagcgagctgggcgtgctggtgcccggcaccggcctggccgccatcctgagaaccctgcccatgttccacgacgaggagcacgccagagccagaggcctgagcgaggacaccctggtgctgccccccgccagcagaaaccagagaatcctgtacaccgtgctggagtgccagcccctgttcgacagcagcgacatgaccatcgccgagtgggtgtgcctggcccagaccatcaagagacactacgagcagtaccacggcttcgtggtgatccacggcaccgacaccatggccttcgccgccagcatgctgagcttcatgctggagaacctgcagaagaccgtgatcctgaccggcgcccaggtgcccatccacgccctgtggagcgacggcagagagaacctgctgggcgccctgctgatggccggccagtacgtgatccccgaggtgtgcctgttcttccagaaccagctgttcagaggcaacagagccaccaaggtggacgccagaagattcgccgccttctgcagccccaacctgctgcccctggccaccgtgggcgccgacatcaccatcaacagagagctggtgagaaaggtggacggcaaggccggcctggtggtgcacagcagcatggagcaggacgtgggcctgctgagactgtaccccggcatccccgccgccctggtgagagccttcctgcagccccccctgaagggcgtggtgatggagaccttcggcagcggcaacggccccaccaagcccgacctgctgcaggagctgagagtggccaccgagagaggcctggtgatcgtgaactgcacccactgcctgcagggcgccgtgaccaccgactacgccgccggcatggccatggccggcgccggcgtgatcagcggcttcgacatgaccagcgaggccgccctggccaagctgagctacgtgctgggccagcccggcctgagcctggacgtgagaaaggagctgctgaccaaggacctgagaggcgagatgaccccccccagcgtggaggagagaagacccagcctgcagggcaacaccctgggcggcggcgtgagctggctgctgagcctgagcggcagccaggaggccgacgccctgagaaacgccctggtgcccagcctggcctgcgccgccgcccacgccggcgacgtggaggccctgcaggccctggtggagctgggcagcgacctgggcctggtggacttcaacggccagacccccctgcacgccgccgccagaggcggccacaccgaggccgtgaccatgctgctgcagagaggcgtggacgtgaacaccagagacaccgacggcttcagccccctgctgctggccgtgagaggcagacaccccggcgtgatcggcctgctgagagaggccggcgccagcctgagcacccaggagctggaggaggccggcaccgagctgtgcagactggcctacagagccgacctggagggcctgcaggtgtggtggcaggccggcgccgacctgggccagcccggctacgacggccacagcgccctgcacgtggccgaggccgccggcaacctggccgtggtggccttcctgcagagcctggagggcgccgtgggcgcccaggccccctgccccgaggtgctgcccggcgtgtag

SEQ ID NO: 36578 - DNA, 2535 bp, Artificial Sequence
  derived and/or modified sequence
ggcctcctccgcgcagtccctgagtcccgcaggccctgcgtccccgctgcacacccccgtccactcccgtggtccccggtccggcatggcgcgcgcggtggggcccgagcggaggctgctggccgtctacaccggcggcaccattggcatgcggagtgagctcggcgtgcttgtgcccgggacgggcctggctgccatcctgaggacactgcccatgttccatgacgaggagcacgcccgagcccgcggcctctctgaggacaccctggtgctaccgtgagtgtgggctcctcccagtcccggacagggcatggctgctgaggggcaccgatcctgaggctgggcactgctggccaggcccacgtgagccatttgctcacccctgtctctaacatcccctcagcttacagggctttaggactgaccagcagtcgccttccaccagagcctgaacctctgagggtgccccgtgcctggtcccaccttccctccccaccctcctcccacacccccagccaggctgcttcggcaagtgtgatgagggcgccccgtctagggatcctgtatatcaggagccagctggcccaggtggccttgcccccagcatagaggtccttccatttctcagctctgggcccagctccctgatgtcccccacagctgggggtgagctgggagttgccctcgtggtggctgaccaccacagccgccacaggcgagcctcctgcaagcatcctctcctgcctggggatggctggtcccagcccccctcttcgagctggtgtgggaagaagactgctgggagtggcccatcctgacctacgtccttgcctctgtggggagctccaggtggaaggggggccgggccccgtacctgggatgctgagaacttgctatgtgcggagcccttggcgtaggggccccagctctgccagaggggaacagagcgggtcagggcatttagagcaggaggaggtgcagagcgggagcctgctgttccgcctcctgctgtttctgtcccgcagcccggccagccgcaaccagaggattctctacaccgtgctggagtgccagcccctcttcgactccagtgacatgaccatcgctgagtgggtttgccttgcccagaccatcaagaggcactacgagcagtaccacggctttgtggtcatccacggcaccgacaccatggcctttgctgcctcgatgctgtccttcatgctggagaacctgcagaagactgtcatcctcactggggcccaggtgcccatccatgccctgtggagcgacggccgtgagaacctgctgggggcactgctcatggctggccagtatgtgatcccagaggtctgccttttcttccagaatcagctgtttcggggcaaccgggcaaccaaggtagacgctcggaggttcgcagctttctgctccccgaacctgctgcctctggccacagtgggtgctgacatcacaatcaacagggagctggtgcggaaggtggacgggaaggctgggctggtggtgcacagcagcatggagcaggacgtgggcctgctgcgcctctaccctgggatccctgccgccctggttcgggccttcttgcagcctcccctgaagggcgtggtcatggagaccttcggttcagggaacggacccaccaagcccgacctgctgcaggagctgcgggtggccaccgagcgcggcctggtcatcgtcaactgtacccactgcctccagggggctgtgaccacagactatgcagctggcatggccatggcgggagccggcgtcatctcaggcttcgacatgacatcggaggccgccctggccaagctatcgtatgtgctgggccagccagggctgagcctggatgtcaggaaggagctgctgaccaaggaccttcggggggagatgacgccaccctcggtggaagagcgccggccctcactgcagggcaacacgctgggcggtggggtctcctggctcctcagtctgagcggcagccaggaggcagatgccctgcggaatgccctggtgcccagcctggcctgtgctgctgcccacgccggtgacgtggaggcgctgcaggcgcttgtggagctgggcagtgacctgggcctggtggactttaacggccaaaccccactgcacgcggccgcccggggaggccacacagaggcagtcaccatgctgctgcagagaggtgtggacgtgaacacccgggacacggatggcttcagcccgctgctgctggccgtgcggggcaggcatccgggtgtcattgggttgctgcgggaagccggggcctccctgtccacccaggagctggaggaagcagggacggagctgtgcaggctggcatacagggccgacctcgaaggcctgcaggtgtggtggcaggcaggggctgacctggggcagccgggctatgacgggcacagcgccctgcacgtcgcagaggcagccgggaacctggcagtggtggcctttctacagagcctggagggtgcggttggtgcccaggccccatgccca

SEQ ID NO: 36579 - DNA, 1788 bp, Artificial Sequence
  derived and/or modified sequence
atggcaggcccaagtccccctcttcgagctggcgtggggagacgacttctaggggttgcacatccggatctgaggccatgtttatgcggcgaattacaggtggagggaggcccaggccccgtgcccggaatgttacggacttgctacgtcaggtctccctggagacgtggaccctcatcagccaggggtgagcagtccggaagcggtcacctcgaacaagaggaggtgcagtcaggcagcctgttgtttcgcttgctcctttttttgtccagatctccagccagtagaaatcagaggatcttgtatacagtgctggaatgtcagccactattcgattcaagtgatatgacaattgcagaatgggtgtgtctggcacagaccattaagcgacactacgagcagtaccacggcttcgttgtgatacacggcacagacaccatggcattcgctgcatccatgttaagctttatgttagagaatttgcagaagacagtaatactcacaggcgcccaggtgcccattcacgccttatggagcgacggccgcgagaacctgctgggtgcactgttgatggctggtcaatatgtgatcccagaagtatgcttgttcttccaaaaccagttatttagaggcaaccgagccacaaaggttgatgcaagaaggtttgccgccttttgtagtccgaacctgctgcccctggctacagtgggcgcggacataaccataaacagagaactggtccgaaaggtcgacggaaaggcaggactagtagtgcatagcagtatggagcaagacgtcggcctcctaagactttacccaggaataccggcagccttggtgagagcttttttgcagcctccattgaagggagtcgtcatggaaacatttgggtcgggaaacgggcccaccaagcctgatctattacaggaactgagggtcgcaacagagagggggctcgtgatcgtgaattgcacccattgcctgcagggagctgtgaccaccgactacgcagccggtatggcgatggcgggagccggggtaataagcggcttcgatatgacctccgaggccgcgcttgcgaaactgtcctacgtcctcgggcaacccggtctgagcctggatgtgcggaaagagctgctcacaaaggatctgcggggtgagatgacccccccatctgtggaggagcggaggccttctctccagggaaacactctggggggcggagtgagctggctgctcagcctgagcggctcacaggaagctgatgccctgcgcaatgctctggttccttcgttggcttgtgccgcagcccatgctggtgacgtggaagccttgcaagccctcgtcgagcttgggtctgatctcggtttagtggattttaacggccaaacacctctgcatgcagcagcgcgcggtgggcatacagaagctgttacaatgctccttcagaggggcgtcgatgtgaacacaagagataccgatggcttctcccctctgcttctggctgtcagaggccgtcaccctggcgtcattggcttgctcagggaggccggcgcaagtctaagcacgcaggagctggaagaagcgggtaccgagctttgccgactcgcctacagagccgatttggaaggcttacaggtgtggtggcaggcgggagcggacttgggccagcctggctacgacgggcactcagctctgcacgttgccgaggctgctgggaatctcgcggtggttgcgttcctgcagtcattggagggagcagtgggagctcaggcgccttgtccctag

SEQ ID NO: 36580 - DNA, 1722 bp, Artificial Sequence
  derived and/or modified sequence
atggcccgggccgtgggcccagaacggcggctcctagcagtgtatactgggggtaccatcgggatgcgctctgagcttggagtgctggtccctggtacagggctcgctgctatactccggaccctgcccatgtttcatgacgaggaacacgctagggcccgaggcctgtctgaagatactcttgtcctcccaccagcgagcaggaaccaaaggattttatacacagtcctcgaatgccagcccctgtttgacagcagtgacatgacaatcgctgagtgggtgtgtctggcgcaaactattaagcggcattatgaacagtatcatggctttgtggtgattcacggtacagatacaatggcatttgccgctagcatgttgtccttcatgcttgaaaacctgcaaaaaactgtgattctaaccggagcgcaggtccccattcacgccttatggagtgatgggcgggagaacctgttgggggcactgcttatggcagggcaatacgttattcctgaggtgtgtctgtttttccagaatcaactcttccgcggaaatagggcaacaaaggtggacgcccgtcgtttcgccgctttttgttctcctaatctactgcctttggcaaccgtcggggccgacattacgatcaaccgagaattggtgagaaaggtggacgggaaggccggactggtagtccacagcagtatggagcaggacgtagggcttctgcgcctctaccccggcatccccgctgcgctagtgcgcgcctttctgcaacccccccttaagggagtggtgatggaaacctttggctccggcaacggacccacaaagccagacctcttacaggaactccgggttgccactgagcgtggcctggtgatcgtcaactgcacccattgtttgcagggggctgtgactaccgattacgcagccgggatggccatggcaggagctggtgtgataagcggatttgacatgacaagcgaggccgctctggctaaactctcctacgttctggggcagcccgggctcagtctagacgtacggaaggaactgctcactaaagacctccgtggtgagatgacccctccatcagttgaggagcggagaccaagtcttcaaggcaatacacttggcgggggcgtgtcttggcttctttctctcagcggttctcaagaggccgacgcactgaggaatgccctggtgccttctcttgcttgcgccgcggcccacgcgggtgacgtcgaagccttacaagctctggtggaactcggttcagacctgggccttgtggactttaatggccagacccccctgcacgccgccgcgcgtgggggacacactgaagcagttacgatgctgctacaaaggggcgtcgacgtaaatacacgcgacacagacggattttcgccgctgctcctcgcagtcaggggtcgtcatcccggcgttatcggactgctccgggaggctggcgcatcactgtcaacacaggaactcgaggaagccggtacagaactctgtcgcctggcttatagagctgacctggaaggcctgcaggtatggtggcaggccggtgcagatctcggccagcctggttacgacggccacagcgctctgcacgtcgccgaagctgcgggcaatctagctgtcgtggctttcctccaatccctcgagggagcagttggggcccaggcgccctgcccagaagttctgcccggggtatag

SEQ ID NO: 36581 - DNA, 2031 bp, Artificial Sequence
  derived and/or modified sequence
cgccccgggcctcctccgcgcagtccctgagtcccgcaggccctgcgtccccgctgcacacccccgtccactcccgtggtccccggtccggcatggcgcgcgcggtggggcccgagcggaggctgctggccgtctacaccggcggcaccattggcatgcggagtgagctcggcgtgcttgtgcccgggacgggcctggctgccatcctgaggacactgcccatgttccatgacgaggagcacgcccgagcccgcggcctctctgaggacaccctggtgctacccccggccagccgcaaccagaggattctctacaccgtgctggagtgccagcccctcttcgactccagtgacatgaccatcgctgagtgggtttgccttgcccagaccatcaagaggcactacgagcagtaccacggctttgtggtcatccacggcaccgacaccatggcctttgctgcctcgatgctgtccttcatgctggagaacctgcagaagactgtcatcctcactggggcccaggtgcccatccatgccctgtggagcgacggccgtgagaacctgctgggggcactgctcatggctggccagtatgtgatcccagaggtctgccttttcttccagaatcagctgtttcggggcaaccgggcaaccaaggtagacgctcggaggttcgcagctttctgctccccgaacctgctgcctctggccacagtgggtgctgacatcacaatcaacagggagctggtgcggaaggtggacgggaaggctgggctggtggtgcacagcagcatggagcaggacgtgggcctgctgcgcctctaccctgggatccctgccgccctggttcgggccttcttgcagcctcccctgaagggcgtggtcatggagaccttcggttcagggaacggacccaccaagcccgacctgctgcaggagctgcgggtggccaccgagcgcggcctggtcatcgtcaactgtacccactgcctccagggggctgtgaccacagactatgcagctggcatggccatggcgggagccggcgtcatctcaggcttcgacatgacatcggaggccgccctggccaagctatcgtatgtgctgggccagccagggctgagcctggatgtcaggaaggagctgctgaccaaggaccttcggggggagatgacgccaccctcggtggaagagcgccggccctcactgcagggcaacacgctgggcggtggggtctcctggctcctcagtctgagcggcagccaggaggcagatgccctgcggaatgccctggtgcccagcctggcctgtgctgctgcccacgccggtgacgtggaggcgctgcaggcgcttgtggagctgggcagtgacctgggcctggtggactttaacggccaaaccccactgcacgcggccgcccggggaggccacacagaggcagtcaccatgctgctgcagagaggtgtggacgtgaacacccgggacacggatggcttcagcccgctgctgctggccgtgcggggcaggcatccgggtgtcattgggttgctgcgggaagccggggcctccctgtccacccaggagctggaggaagcagggacggagctgtgcaggctggcatacagggccgacctcgaaggcctgcaggtgtggtggcaggcaggggctgacctggggcagccgggctatgacgggcacagcgccctgcacgtcgcagaggcagccgggaacctggcagtggtggcctttctacagagcctggagggtgcggttggtgcccaggccccatgcccagaagtgctgcctggtgtctaacctgaaggcgtcctgctgcagtataagccattccttcctcccatgacctgctggaggggtctcaggcatgaccccactgctggggctgcttcccagcctgctctcatgtaaagcctgaaggcctttgttgggcaggacggcaataaagtctctgacatcccctcaccaggtctgtacagcctggctctgagaggctctgtctgggtccgggactgtg

SEQ ID NO: 36582 - DNA, 1788 bp, Artificial Sequence
  derived and/or modified sequence
atggccggccccagcccccccctgcgggccggcgtgggccggcggctgctgggcgtggcccacccagacctgcggccctgcctgtgtggggagctgcaggtggagggcggccctggccctgtgcccggcatgctgcggacctgctacgtgcgcagcccctggaggcggggccccagcagcgcccggggggagcagagcggcagcggccacctggagcaggaggaggtgcagagcggcagcctgctcttccggctgctgctcttcctgagccgcagccctgccagcaggaaccagaggatcctgtacacagtgctggagtgccagcccctgtttgacagcagtgacatgaccatcgccgagtgggtgtgcctggcccagaccatcaagaggcactatgagcagtaccacggctttgtggtgatccacggcacagacaccatggcctttgctgcctccatgctgtccttcatgctggagaacctgcagaagacagtcatcctgaccggggcccaggtgcccatccacgccctgtggagcgatggaagagagaacctgctgggcgccctgctgatggccggccagtatgtgattcctgaggtgtgcctcttcttccagaaccagctgttccggggcaacagagccaccaaggtggatgccaggagatttgctgccttctgcagccccaacctgctgcccctggccaccgtgggcgctgacatcaccatcaaccgggagctggtgaggaaggtggatggcaaggccggcctggtggtgcacagctccatggagcaggatgtgggcctgctgcggctgtacccaggcatcccagctgccctggtgcgggccttcctgcagccccccctgaagggcgtggtgatggagaccttcggcagcggaaatggccccaccaagccagacctgctgcaggagctgcgggtggccacagagcggggcctggtgattgtgaactgcacccactgcctgcagggcgctgtgaccacagattatgctgctggcatggccatggccggggccggggtcatcagcggctttgacatgaccagcgaggccgccctggccaagctgtcctatgtgctgggccagcccggcctgagcctggatgtgaggaaggagctgctgaccaaggacctgcggggggagatgaccccacccagcgtggaggagcggcggcccagcctgcagggcaacaccctgggcggcggcgtgtcctggctgctgagcctgagcggcagccaggaggctgatgccctgagaaatgccctggtgcccagcctggcctgtgccgccgcccatgctggagatgtggaggccctgcaggccctggtggagctgggcagtgacctgggcctggtggacttcaacggccagacccccctgcacgccgccgcccggggcggccacacagaagctgtgaccatgctgctgcagaggggcgtggatgtgaacacccgggacacagatggcttcagccccctgctgctggccgtgcggggccgccaccctggggtgattggcctgctgcgggaggccggggccagcctgagcacccaggagctggaggaggccggcacagagctgtgccgcctggcctacagagctgacctggagggcctgcaggtgtggtggcaggccggggctgacctgggccagcccggctatgatggccacagcgccctgcacgtggccgaggccgccggcaacctggccgtggtggccttcctgcagagcctggagggcgctgtgggcgcccaggccccctgcccctag

SEQ ID NO: 36583 - DNA, 1722 bp, Artificial Sequence
  derived and/or modified sequence
atggcccgggctgtgggccctgagcggcggctgctggccgtgtacacaggaggcaccatcggcatgaggtctgagctgggcgtgctggtgcccggcaccggcctggccgccatcctgcggaccctgcccatgtttcatgatgaggagcacgcccgggcccggggcctgtctgaggacaccctggtgctgcccccagccagcaggaaccagaggatcctgtacacagtgctggagtgccagcccctgtttgacagcagtgacatgaccatcgccgagtgggtgtgcctggcccagaccatcaagaggcactatgagcagtaccacggctttgtggtgatccacggcacagacaccatggcctttgctgcctccatgctgtccttcatgctggagaacctgcagaagacagtcatcctgaccggggcccaggtgcccatccacgccctgtggagcgatggaagagagaacctgctgggcgccctgctgatggccggccagtatgtgattcctgaggtgtgcctcttcttccagaaccagctgttccggggcaacagagccaccaaggtggatgccaggagatttgctgccttctgcagccccaacctgctgcccctggccaccgtgggcgctgacatcaccatcaaccgggagctggtgaggaaggtggatggcaaggccggcctggtggtgcacagctccatggagcaggatgtgggcctgctgcggctgtacccaggcatcccagctgccctggtgcgggccttcctgcagccccccctgaagggcgtggtgatggagaccttcggcagcggaaatggccccaccaagccagacctgctgcaggagctgcgggtggccacagagcggggcctggtgattgtgaactgcacccactgcctgcagggcgctgtgaccacagattatgctgctggcatggccatggccggggccggggtcatcagcggctttgacatgaccagcgaggccgccctggccaagctgtcctatgtgctgggccagcccggcctgagcctggatgtgaggaaggagctgctgaccaaggacctgcggggggagatgaccccacccagcgtggaggagcggcggcccagcctgcagggcaacaccctgggcggcggcgtgtcctggctgctgagcctgagcggcagccaggaggctgatgccctgagaaatgccctggtgcccagcctggcctgtgccgccgcccatgctggagatgtggaggccctgcaggccctggtggagctgggcagtgacctgggcctggtggacttcaacggccagacccccctgcacgccgccgcccggggcggccacacagaagctgtgaccatgctgctgcagaggggcgtggatgtgaacacccgggacacagatggcttcagccccctgctgctggccgtgcggggccgccaccctggggtgattggcctgctgcgggaggccggggccagcctgagcacccaggagctggaggaggccggcacagagctgtgccgcctggcctacagagctgacctggagggcctgcaggtgtggtggcaggccggggctgacctgggccagcccggctatgatggccacagcgccctgcacgtggccgaggccgccggcaacctggccgtggtggccttcctgcagagcctggagggcgctgtgggcgcccaggccccctgcccagaggtgctgcccggggtgtag

SEQ ID NO: 36584 - DNA, 1788 bp, Artificial Sequence
  derived and/or modified sequence
atggccggccccagcccccccctgcgggccggcgtgggccggcggcttcttggggtagcccacccggacctgagaccatgcttgtgcggtgaactgcaggtggagggaggcccgggccccgtccctggcatgttgcgaacgtgctatgtgagatcgccgtggaggagaggacctagttcagctcgtggcgaacagtctggctctggtcaccttgagcaggaggaagtacagtccggctctctgttgtttagacttctcctcttcttgagcagaagccccgcgtccagaaaccagcgaatcttgtacaccgtgttggagtgtcagcctctgttcgatagctctgacatgaccattgccgagtgggtatgcttggcacaaacaatcaaacggcattatgaacagtaccacgggttcgtggtaattcacgggacagataccatggcttttgcagcaagcatgttgtcattcatgttagaaaacctgcagaaaactgtgatcctgacaggcgcacaagttcctattcacgccctgtggtcagatggcagggagaatttgctaggggccttattaatggctggccagtacgtaatcccagaggtgtgtctattcttccagaatcagctcttcaggggaaaccgggccactaaagtcgacgcacgcaggttcgctgctttctgttcacccaacctcctccccctagccacagtgggagctgacataactatcaaccgagagctggtcaggaaggtagatggcaaggccggtttggtggtccattctagcatggaacaggacgtcgggctcctgaggctctaccctggaatacccgccgcacttgttagagcattccttcagcccccactgaaaggtgtcgttatggaaacttttggctcaggcaatggacccaccaagcctgacctgctccaggagctgcgggtggcaaccgaaaggggtctagtcattgtcaattgcacccactgcctgcagggtgcggtgacaaccgactatgccgccgggatggctatggcgggtgcaggagtcattagtggtttcgacatgacaagcgaggcagcattagccaagctctcctatgtactcggacagcccggcctctcgttagacgtcaggaaggagctactgacgaaggatttgcgcggcgagatgacccctccttccgtcgaagagagacgtccatcacttcaaggcaacactcttggcggcggtgtgagttggttactcagccttagcggatcacaggaagccgatgccctcagaaatgccctggtcccgagtctagcttgtgcggctgcccatgccggtgatgtggaggcacttcaggcactggtggagttgggcagtgatctgggcctggtggacttcaatggtcaaacaccgctgcacgcggcagctagaggaggacacacagaggccgtaacaatgctattacagagaggagttgacgtaaacactcgggacacagacggtttctcacccttgctgctagcagtgaggggtcgtcatccaggcgtgatcggactgttgagagaagctggtgctagcttgtctacacaggagctggaggaggccggcaccgagctgtgccgcctagcctacagggccgacctggaggggttgcaagtttggtggcaagctggagccgacctgggccaacccggctacgatgggcattccgctctccatgttgccgaggctgccggtaatctggctgtcgtggcctttttacagtctctggaaggtgctgtcggagcacaggccccttgtccctag

SEQ ID NO: 36585 - DNA, 1722 bp, Artificial Sequence
  derived and/or modified sequence
atggcccgggccgtgggccccgagcggcggctgctggccgtgtacaccggtgggaccattggaatgcggtccgagcttggcgtgctcgtgccaggtacaggtttggcagcaatactgagaaccctgccaatgtttcacgatgaagaacacgctcgagctcgcggcttatctgaagacactctggtccttccccctgcctcccggaaccagcggattctgtatacggtcttagaatgtcagccactgttcgattcatccgacatgaccattgcagagtgggtgtgcctcgctcagacaatcaaacgccattatgagcaatatcacgggttcgtggtgattcatggcaccgacacaatggcttttgcagcctcaatgctgagttttatgctggagaatttacagaagacagtgatcctgacaggtgcccaggtgcccatccacgcactgtggagcgacggccgcgagaacctcctgggggccttactgatggctggccaatatgtcattcctgaggtgtgcttgttctttcagaatcagctcttccgcggtaaccgcgcgacaaaagtggatgcccgccgattcgctgccttctgttcccctaatctgctaccgttggcaactgtcggagcagatatcacaataaacagggagctcgtgagaaaagtcgacgggaaggctggactggtggtccatagctctatggaacaagacgttggccttcttagattgtatcccggcatccctgccgccctcgttcgggcctttttgcaacctcctctgaagggagtggtcatggagacatttgggagcggcaatggacctacgaagcctgaccttttgcaagagctccgagtggccacagagagggggctggtgatcgttaattgtacacattgcctgcagggggcagtgaccaccgattacgccgccggaatggctatggctggagcaggtgtaatctctgggttcgacatgaccagcgaggctgctctcgctaaattgtcttacgtgctggggcagcccggattgagccttgacgtcaggaaagagctgctgactaaggacctccgaggcgagatgaccccacccagcgtggaagagcgcagaccatccctgcagggcaacacgttgggaggcggcgtcagttggctcctttccttgtcgggcagccaagaagccgacgccctcaggaacgcacttgtaccatccctggcctgtgcagccgcccacgctggtgacgtggaggcattacaggcactagtggagctaggaagcgacctgggcctagttgattttaacggccagacacccctgcacgctgccgcccgcgggggacacacagaggcagttacaatgctgttacagcggggcgtggacgtcaacactcgcgatacagacggcttttccccactgctgctggccgtgcgaggacgtcatcctggggttattgggcttcttagagaggcgggcgccagtctcagcacacaagagctcgaggaagctggcacagagttatgtagactggcatacagggccgatctagagggtctgcaagtgtggtggcaagccggcgcagacttagggcaacctggttacgatggacattcagcgctgcatgtggccgaagctgccggaaatctggctgtagttgcgttcctccagtctcttgaaggcgccgttggcgcccaggccccatgtcctgaggtgctcccaggcgtgtag

SEQ ID NO: 36586 - DNA, 1788 bp, Artificial Sequence
  derived and/or modified sequence
atggccggacccagcccgcctctccgcgcaggggtgggaaggcgcctgctgggcgtcgcccaccctgatttgaggccctgcctgtgcggggagttacaggttgagggaggacctggcccagtgcctggaatgctgcggacatgttatgtgaggagcccctggcgaagggggccttcctccgcccgaggcgagcagtcaggctcgggacacttagagcaagaagaagtgcaaagtgggagcctgttgttcaggttgctcttattcctgagtaggagccctgcttccaggaatcaaagaatcctctacacagttctcgagtgccagccacttttcgattcctcagatatgacaatcgccgaatgggtgtgtctggctcagaccataaaacgccattacgagcaataccatggctttgttgtgattcatgggaccgacactatggcctttgcagcatctatgctgtctttcatgctggaaaatctgcagaaaactgttatcctgacgggagcccaggtccccatccatgctctgtggtccgacggacgggaaaatttgctgggcgctctccttatggcaggccagtacgtgattccagaagtgtgtctgttcttccagaatcagctgttccgaggaaatcgtgccaccaaagtggacgcccgacgatttgcagcattctgtagccccaacctcctcccccttgcgacggtcggggcagatattacaataaaccgagagctcgtccgcaaagtcgacggcaaagctggcctggtggtgcattccagcatggagcaggatgtgggacttctccgactgtaccccggtatccccgctgctctggtccgcgcattcctccaaccaccactcaagggcgtggtgatggagaccttcggctcagggaatggaccgacaaagcctgacctgctgcaggagctgcgcgtggctactgaacgtggcctagtgatagtgaactgcacccattgccttcagggagcagtgactaccgactacgcagccggaatggcgatggcaggggcaggtgtcattagtgggttcgatatgacttccgaagccgcactggcaaaattatcctatgtcctgggccagcccggacttagtctggatgtgaggaaggaactcctgacgaaggatctcagaggcgaaatgacccctcccagcgttgaggaaaggaggccttctctgcagggcaacaccctgggaggcggagtttcctggttgctctcacttagcggcagccaggaggccgatgcgttgcgcaatgctctggtgcccagcttggcctgcgcagccgctcacgccggtgacgtggaagccctgcaagcgctcgtggaactgggttccgacctcgggctggttgacttcaacggtcagacccctctccacgctgcggctcgtgggggacacaccgaagccgtaactatgctgctgcaacgtggggtggatgtcaacacaagagataccgacggcttctccccacttttgctggccgtcagaggcagacatcccggagttattgggctgttacgggaagccggtgcatcattgtccactcaggagcttgaggaggccggaacggagctttgtagactggcatacagggccgacctggagggtctgcaggtatggtggcaggcaggagcggacctcggccagcccggatacgacggtcacagtgctctgcacgtcgctgaggccgcaggtaatttggccgtcgtcgccttcttgcagagtctcgagggagccgtgggcgcacaggccccatgcccttag

SEQ ID NO: 36587 - DNA, 1722 bp, Artificial Sequence
  derived and/or modified sequence
atggctcgagcagtgggtcctgaacgcagactgctggctgtttataccggcggaaccatcggcatgcgctcggagctgggcgtccttgtgcccggaacaggattggcagccatcctgaggaccctgccgatgttccacgacgaggagcacgctcgggcacggggtctgtccgaggacacattggtgctgccccctgcttctagaaaccagcggattctctataccgtgctggaatgccaacccttatttgactcttcggatatgacaattgccgagtgggtgtgcctggcgcaaaccataaagcgtcattacgagcaataccatggattcgttgttatccacggcaccgacactatggcgtttgccgcttccatgttatcattcatgctcgagaacctgcagaaaactgtgatcctaactggtgcacaggtccctatccacgccctttggtccgacggacgggaaaacctccttggtgctcttttgatggccggacagtacgtgatcccggaggtgtgtttatttttccagaatcaactgtttcggggaaatcgtgcaaccaaagttgacgcaaggcggttcgcagccttttgcagccccaatctgctccctctcgcaaccgtaggagccgatattacgattaacagggagctagtgcggaaagtggacggtaaggccggtttggtggtacactcaagtatggagcaggatgttggattactgaggctgtatcctggtatcccagctgccctggttagggccttcctgcagccaccactcaagggggtggtcatggagacttttggtagcggcaatggccctaccaagccggatcttttgcaggaactgcgtgtggccacagaacgcggactggtgatcgtcaactgcacccactgtcttcagggcgctgtgacgacagattatgcggcagggatggctatggctggcgcaggcgtgatttctggtttcgatatgacatcagaggccgctctcgccaagctgtcttacgtactgggacaacctggcctgagccttgacgtgcggaaagaacttctgactaaagatctccgtggtgaaatgaccccgccttccgtggaagagcgtaggccttctctccagggcaatacgctgggaggcggtgtcagctggctgctctccttgagtggctcacaggaagcagacgccctgcgcaacgctttggtgccatccctagcatgcgcagccgcacatgctggggacgtggaggccctgcaggcccttgtagaactgggctcggacctaggtttggtggactttaatggtcagacacccctgcatgcagcagcacgtggcggacacacagaggccgtaaccatgctcctccagcgcggagtcgacgtgaacacaagagacacggacggtttttcaccgctactgctcgctgtgagaggccgtcacccgggtgtcatcggactgctgagggaggctggtgcctctctgagcacacaggagcttgaggaggctgggaccgaactgtgtcgcctcgcttacagagccgacctggaaggactccaagtttggtggcaggctggggcagacttgggacaaccgggatatgatggtcatagtgctctgcacgttgctgaggccgcaggtaacctcgccgtcgtagcttttctccagtccctggaaggggctgtcggggcacaggccccttgtcctgaggtactcccaggcgtgtag

SEQ ID NO: 36588 - DNA, 1788 bp, Artificial Sequence
  derived and/or modified sequence
atggctggaccttccccacctctgcgcgcaggggtcggaaggaggttactgggggtagcccaccctgacctacgcccctgcttgtgcggtgagctacaggtagaggggggcccaggaccggtgccgggaatgcttcgaacctgctacgtgcggagtccatggcggagggggccttcgtccgcacggggggaacaatcaggatcaggccacctcgagcaagaagaagtgcagtctggctcgctgctgttccgcctattattgttcctgagtcggtctcctgccagccgtaatcagcgcattctatacaccgtgctagaatgccagcccctcttcgattccagcgacatgaccattgcagagtgggtgtgcctggcacagaccatcaagaggcattatgagcaatatcatggatttgtcgttattcatggtactgacactatggccttcgccgctagcatgctcagctttatgcttgagaacctgcagaaaacagttatcctgactggagcacaggtaccaatccatgccttatggagcgacgggagagaaaatctccttggggctctcctcatggctggtcagtacgttatacccgaggtctgcctgttctttcagaaccaattgtttcgcggaaaccgcgccactaaagttgacgccaggcggtttgccgccttctgtagtccaaatctcctgccactcgccacagtcggtgctgacattacaatcaaccgagaactggtgcggaaggttgatggaaaggcaggattggtggtacactcctctatggagcaggatgtgggcctcctgaggctttatcccggaataccagccgccttagtgagagccttcctgcagccacctctcaagggcgttgttatggaaacttttggtagcgggaacggtcctacaaaacccgacctgctgcaggagcttagagtggccaccgaacggggattagtgatagtgaactgtacccactgtctccaaggagctgtgacgaccgactatgctgctggaatggcaatggcaggcgccggtgttatatccggattcgatatgactagcgaggcagcgctggccaaactcagctacgtgctcggccagccgggcctgtcactggacgtgagaaaagaacttctaactaaagatctccgcggagagatgacacctccttcggtcgaagagcgtagaccatctttgcaggggaacacattaggcggcggtgtcagttggctattgtcactttctggcagccaggaggcagacgctctcagaaatgcactggtcccttctctggcatgtgcagccgctcacgcaggtgacgtagaggctttgcaagccttagtggaacttggcagcgaccttggtctggtggactttaatggacaaacacctctgcatgcagccgcacggggtggacatactgaggcagtgacaatgctgttgcagagaggagtggatgtgaacacccgggatacagatggatttagccccctgctgctggctgtcagagggaggcatccgggggttatcgggctgctgagagaagcgggagcatcactttctacacaagagttggaagaggccggaactgagctgtgcaggctggcctatagagccgacttagagggattgcaggtgtggtggcaggcaggagcagatctgggacaaccaggatacgatggccatagcgccttgcacgtcgccgaagctgctgggaacctcgctgtggttgcctttctgcaatcactggaaggcgctgttggggcccaggcgccatgtccctag

SEQ ID NO: 36589 - DNA, 1722 bp, Artificial Sequence
  derived and/or modified sequence
atggcccgagctgttggaccagaaagacgcctgcttgctgtgtacacaggaggtacaattggaatgaggagcgagctgggcgtccttgtgcctggcaccggactagcggccatcttgcgcactctacctatgttccatgatgaggagcacgccagagcacgtggtctgagcgaagatacccttgtgctgccaccagcatctaggaatcagagaattctgtacaccgtgcttgagtgccaacccctgtttgattccagcgacatgacaattgccgagtgggtgtgtttggcccagacaattaagcgtcattatgaacagtaccacggctttgtggtcatccatgggactgatacaatggcttttgcagcaagtatgctcagctttatgctggagaatctgcagaaaaccgtcatcttaacaggagctcaggtgccgatccacgcactttggtctgacgggcgggagaatcttctgggggccttactgatggcgggacaatacgtaatcccagaggtttgtcttttttttcagaaccaactttttcgagggaaccgcgcgaccaaagtggacgcccgcaggttcgccgccttctgcagccctaatttgcttccactcgcaacagttggggctgacatcactatcaacagagagctggtgcgaaaagtggatggaaaagcaggactcgtggtgcacagcagtatggaacaggatgttgggcttctgcgcttgtaccctggtatacctgcagcactcgttcgagcctttttgcagccacctctgaaaggagtggtaatggagactttcggctctggtaatggtcctacgaagccagacctgctccaggaacttcgcgtcgccaccgagagaggtctggttatcgtgaattgcacccactgcctgcagggcgcggttacaaccgactatgctgctgggatggcaatggccggggctggagtgatctcaggatttgacatgacctctgaagccgctttggccaagctgagttatgtgctggggcagcccgggctttctctggatgtacgtaaagagctactcacaaaggaccttcggggcgaaatgactcctcctagtgttgaagaacgcaggccgtccctgcaaggtaacacgcttggagggggtgtgtcttggttactatctctgtcggggagccaggaagccgacgcgctcaggaatgccttggtccctagcctggcctgcgcagccgcccacgccggggatgtggaagctcttcaggccctcgtggagttaggatccgacctcggactagtagactttaacggccagacccctctgcatgcggccgccagaggcgggcataccgaggctgtcacaatgctgttgcagaggggcgtggacgtaaacactagagatacggatggcttctcccccctgcttctggccgtcaggggaagacatcctggagtgataggactactgcgagaggcgggcgcgtccctgtccactcaggagctcgaggaagcaggcactgagctttgccggttagcctatcgagccgacttggaagggctccaggtgtggtggcaggccggcgcagacctgggtcaaccgggctatgatggtcactccgcactgcacgtcgctgaagccgccggaaacctggcagtagtggcattcctacagagccttgaaggcgcagtgggcgcccaggctccatgtcctgaggtgctgcccggggtctag

SEQ ID NO: 36590 - DNA, 1788 bp, Artificial Sequence
  derived and/or modified sequence
atggcaggcccgtcacctccccttcgcgcgggggtgggcaggcgcttactcggggttgcccaccccgacctgagaccctgtctttgtggggagcttcaagtggaaggaggacccggaccggttccaggcatgctaaggacttgttatgtgaggagcccatggcggcgaggtccatcaagtgcaaggggcgagcagtccggatcaggccacctcgaacaagaagaagtacagagcggcagcttattgtttagactcctgctctttctgtctcgatctcccgcatcacgtaaccagcgcatcttgtatactgttctagaatgccagcctctatttgatagctcagacatgacgattgcagagtgggtgtgtctggcacagactataaagcgacactacgaacagtaccacggcttcgttgtcatccatgggaccgacaccatggcatttgctgcgtctatgctctcatttatgttggaaaacctccaaaaaacggttatcctgactggcgcccaagttccaattcacgcactttggtccgacggccgcgaaaacttactgggcgccctactcatggcaggtcagtacgtcatacctgaagtctgtctcttctttcagaaccagttgttccggggaaatagagcaaccaaggtggacgctagaaggttcgccgctttctgctctcctaatctcttacctctcgcgactgtcggcgccgatattacaatcaatcgcgagttagtccgaaaagtagacggcaaagctggcttagtggtgcacagcagcatggagcaagacgtaggactcctgaggctttaccccggcattcccgctgcattagtgagggctttcctacagccccctcttaaaggagttgtcatggaaactttcgggtccggaaacggacccaccaaaccagaccttttgcaagaacttagagttgctactgagagaggcctggttatcgtaaattgtacgcattgtctgcagggcgcagtgacgacggactatgccgcagggatggccatggcaggagcaggcgttatttccggattcgacatgactagcgaagcggcccttgcaaaactgtcctacgttctcgggcagcctggcctgagcctcgacgtacggaaggaactgttgactaaggatctgcgtggcgaaatgacacccccgtccgtcgaggagagacgcccctccctgcaaggtaatactctgggaggtggtgtgtcctggttactctcactgtcaggttcccaggaagctgatgcactgaggaacgcactcgtgccttctctggcctgcgccgcggcacatgcaggcgacgtggaggctcttcaggctcttgtagagttaggatcagacctaggcctcgtagactttaacggacaaaccccactccatgcagctgcccgaggaggccatacagaggcggtcacaatgctacttcagcgaggtgtcgacgttaatactagggacaccgacggctttagccccctgctgctggctgtcagagggaggcatccgggggttatcgggctgctgagagaagcgggagcatcactttctacacaagagttggaagaggccggaactgagctgtgcaggctggcctatagagccgacttagagggattgcaggtgtggtggcaggcaggagcagatctgggacaaccaggatacgatggccatagcgccttgcacgtcgccgaagctgctgggaacctcgctgtggttgcctttctgcaatcactggaaggcgctgttggggcccaggcgccatgtccctag

SEQ ID NO: 36591 - DNA, 1722 bp, Artificial Sequence
  derived and/or modified sequence
atggccagagccgtcggccccgaaagaagacttctggccgtttacaccggcggtacaattggcatgcgttctgagcttggcgttctggttccaggaacaggactcgctgcaattctacgaactctccctatgttccacgatgaggaacacgcaagggcacgtggactctctgaggatacactggtactgccaccagcctctcggaaccaaagaattctatacacagtcttggagtgccagcctctatttgattcatcagatatgaccattgcagagtgggtctgtctcgcccaaaccataaagagacactacgagcaataccatggctttgtagttatccacgggacggacacaatggccttcgcggctagcatgctcagtttcatgcttgaaaacctgcaaaagaccgtgatcctcaccggggcccaagtccccatccacgccctctggtctgatggtagagagaacctgttaggtgcactcctgatggctggacagtacgttatacctgaagtgtgtctcttttttcaaaaccaactctttagaggcaaccgagccaccaaagtagatgcaagacgcttcgctgccttctgtagcccaaatttactgccattggccaccgttggtgccgatataacaataaatcgtgaactagttcggaaagtggatggaaaggcaggattggttgtgcacagcagtatggagcaggatgtcggtctcctgcggttatatccaggcattcccgccgccttggtccgggcctttttacagcccccactgaagggcgtggtcatggagactttcgggagcggtaacggccccacaaaaccagacctcctacaagagctgcgtgttgctaccgagaggggcctggtgattgttaattgtactcactgtctccagggcgcggttacaaccgactatgctgctgggatggcaatggccggggctggagtgatctcaggatttgacatgacctctgaagccgctttggccaagctgagttatgtgctggggcagcccgggctttctctggatgtacgtaaagagctactcacaaaggaccttcggggcgaaatgactcctcctagtgttgaagaacgcaggccgtccctgcaaggtaacacgcttggagggggtgtgtcttggttactatctctgtcggggagccaggaagccgacgcgctcaggaatgccttggtcccatctctcgcctgcgccgccgcccatgcaggagatgtggaggccctgcaagctctcgtcgagctgggatctgatcttggattagtggatttcaatggacaaactccattgcatgctgccgcccgtgggggacatacagaggccgtgaccatgctgttacaaagaggagtggatgtgaacacacgggatactgacggatttagtcctctgctgctcgccgtgcggggacgtcatcccggcgttatcggccttcttcgcgaagcaggggcatccctatctactcaggaactggaagaggctggcacagaactctgtagactggcttaccgggcggatcttgaaggacttcaggtctggtggcaagcaggagcagatctggggcagcctggatatgatggacattctgctctgcatgtggccgaagcagctggaaatctggcagtggtcgcgttcctgcagtctctggaaggagccgtgggagctcaggcaccctgccccgaagtcctccctggcgtctag

SEQ ID NO: 36592 - RNA, 1788 nt, Artificial Sequence
  derived and/or modified sequence
auggcuggaccuuccccaccucugcgcgcaggggucggaaggagguuacuggggguagcccacccugaccuacgccccugcuugugcggugagcuacagguagaggggggcccaggaccggugccgggaaugcuucgaaccugcuacgugcggaguccauggcggagggggccuucguccgcacggggggaacaaucaggaucaggccaccucgagcaagaagaagugcagucuggcucgcugcuguuccgccuauuauuguuccugagucggucuccugccagccguaaucagcgcauucuauacaccgugcuagaaugccagccccucuucgauuccagcgacaugaccauugcagagugggugugccuggcacagaccaucaagaggcauuaugagcaauaucauggauuugucguuauucaugguacugacacuauggccuucgccgcuagcaugcucagcuuuaugcuugagaaccugcagaaaacaguuauccugacuggagcacagguaccaauccaugccuuauggagcgacgggagagaaaaucuccuuggggcucuccucauggcuggucaguacguuauacccgaggucugccuguucuuucagaaccaauuguuucgcggaaaccgcgccacuaaaguugacgccaggcgguuugccgccuucuguaguccaaaucuccugccacucgccacagucggugcugacauuacaaucaaccgagaacuggugcggaagguugauggaaaggcaggauuggugguacacuccucuauggagcaggaugugggccuccugaggcuuuaucccggaauaccagccgccuuagugagagccuuccugcagccaccucucaagggcguuguuauggaaacuuuugguagcgggaacgguccuacaaaacccgaccugcugcaggagcuuagaguggccaccgaacggggauuagugauagugaacuguacccacugucuccaaggagcugugacgaccgacuaugcugcuggaauggcaauggcaggcgccgguguuauauccggauucgauaugacuagcgaggcagcgcuggccaaacucagcuacgugcucggccagccgggccugucacuggacgugagaaaagaacuucuaacuaaagaucuccgcggagagaugacaccuccuucggucgaagagcguagaccaucuuugcaggggaacacauuaggcggcggugucaguuggcuauugucacuuucuggcagccaggaggcagacgcucucagaaaugcacuggucccuucucuggcaugugcagccgcucacgcaggugacguagaggcuuugcaagccuuaguggaacuuggcagcgaccuuggucugguggacuuuaauggacaaacaccucugcaugcagccgcacgggguggacauacugaggcagugacaaugcuguugcagagaggaguggaugugaacacccgggauacagauggauuuagcccccugcugcuggcugucagagggaggcauccggggguuaucgggcugcugagagaagcgggagcaucacuuucuacacaagaguuggaagaggccggaacugagcugugcaggcuggccuauagagccgacuuagagggauugcaggugugguggcaggcaggagcagaucugggacaaccaggauacgauggccauagcgccuugcacgucgccgaagcugcugggaaccucgcugugguugccuuucugcaaucacuggaaggcgcuguuggggcccaggcgccaugucccuag

SEQ ID NO: 36593 - RNA, 1722 nt, Artificial Sequence
  derived and/or modified sequence
auggcccgagcuguuggaccagaaagacgccugcuugcuguguacacaggagguacaauuggaaugaggagcgagcugggcguccuugugccuggcaccggacuagcggccaucuugcgcacucuaccuauguuccaugaugaggagcacgccagagcacguggucugagcgaagauacccuugugcugccaccagcaucuaggaaucagagaauucuguacaccgugcuugagugccaaccccuguuugauuccagcgacaugacaauugccgaguggguguguuuggcccagacaauuaagcgucauuaugaacaguaccacggcuuuguggucauccaugggacugauacaauggcuuuugcagcaaguaugcucagcuuuaugcuggagaaucugcagaaaaccgucaucuuaacaggagcucaggugccgauccacgcacuuuggucugacgggcgggagaaucuucugggggccuuacugauggcgggacaauacguaaucccagagguuugucuuuuuuuucagaaccaacuuuuucgagggaaccgcgcgaccaaaguggacgcccgcagguucgccgccuucugcagcccuaauuugcuuccacucgcaacaguuggggcugacaucacuaucaacagagagcuggugcgaaaaguggauggaaaagcaggacucguggugcacagcaguauggaacaggauguugggcuucugcgcuuguacccugguauaccugcagcacucguucgagccuuuuugcagccaccucugaaaggagugguaauggagacuuucggcucugguaaugguccuacgaagccagaccugcuccaggaacuucgcgucgccaccgagagaggucugguuaucgugaauugcacccacugccugcagggcgcgguuacaaccgacuaugcugcugggauggcaauggccggggcuggagugaucucaggauuugacaugaccucugaagccgcuuuggccaagcugaguuaugugcuggggcagcccgggcuuucucuggauguacguaaagagcuacucacaaaggaccuucggggcgaaaugacuccuccuaguguugaagaacgcaggccgucccugcaagguaacacgcuuggagggggugugucuugguuacuaucucugucggggagccaggaagccgacgcgcucaggaaugccuuggucccuagccuggccugcgcagccgcccacgccggggauguggaagcucuucaggcccucguggaguuaggauccgaccucggacuaguagacuuuaacggccagaccccucugcaugcggccgccagaggcgggcauaccgaggcugucacaaugcuguugcagaggggcguggacguaaacacuagagauacggauggcuucuccccccugcuucuggccgucaggggaagacauccuggagugauaggacuacugcgagaggcgggcgcgucccuguccacucaggagcucgaggaagcaggcacugagcuuugccgguuagccuaucgagccgacuuggaagggcuccaggugugguggcaggccggcgcagaccugggucaaccgggcuaugauggucacuccgcacugcacgucgcugaagccgccggaaaccuggcaguaguggcauuccuacagagccuugaaggcgcagugggcgcccaggcuccauguccugaggugcugcccggggucuag

SEQ ID NO: 36594 - RNA, 1788 nt, Artificial Sequence
  derived and/or modified sequence
auggcaggcccgucaccuccccuucgcgcgggggugggcaggcgcuuacucgggguugcccaccccgaccugagacccugucuuuguggggagcuucaaguggaaggaggacccggaccgguuccaggcaugcuaaggacuuguuaugugaggagcccauggcggcgagguccaucaagugcaaggggcgagcaguccggaucaggccaccucgaacaagaagaaguacagagcggcagcuuauuguuuagacuccugcucuuucugucucgaucucccgcaucacguaaccagcgcaucuuguauacuguucuagaaugccagccucuauuugauagcucagacaugacgauugcagagugggugugucuggcacagacuauaaagcgacacuacgaacaguaccacggcuucguugucauccaugggaccgacaccauggcauuugcugcgucuaugcucucauuuauguuggaaaaccuccaaaaaacgguuauccugacuggcgcccaaguuccaauucacgcacuuugguccgacggccgcgaaaacuuacugggcgcccuacucauggcaggucaguacgucauaccugaagucugucucuucuuucagaaccaguuguuccggggaaauagagcaaccaagguggacgcuagaagguucgccgcuuucugcucuccuaaucucuuaccucucgcgacugucggcgccgauauuacaaucaaucgcgaguuaguccgaaaaguagacggcaaagcuggcuuaguggugcacagcagcauggagcaagacguaggacuccugaggcuuuaccccggcauucccgcugcauuagugagggcuuuccuacagcccccucuuaaaggaguugucauggaaacuuucggguccggaaacggacccaccaaaccagaccuuuugcaagaacuuagaguugcuacugagagaggccugguuaucguaaauuguacgcauugucugcagggcgcagugacgacggacuaugccgcagggauggccauggcaggagcaggcguuauuuccggauucgacaugacuagcgaagcggcccuugcaaaacuguccuacguucucgggcagccuggccugagccucgacguacggaaggaacuguugacuaaggaucugcguggcgaaaugacacccccguccgucgaggagagacgccccucccugcaagguaauacucugggaggugguguguccugguuacucucacugucagguucccaggaagcugaugcacugaggaacgcacucgugccuucucuggccugcgccgcggcacaugcaggcgacguggaggcucuucaggcucuuguagaguuaggaucagaccuaggccucguagacuuuaacggacaaaccccacuccaugcagcugcccgaggaggccauacagaggcggucacaaugcuacuucagcgaggugucgacguuaauacuagggacaccgacggcuuuagcccccugcugcuggcugucagagggaggcauccggggguuaucgggcugcugagagaagcgggagcaucacuuucuacacaagaguuggaagaggccggaacugagcugugcaggcuggccuauagagccgacuuagagggauugcaggugugguggcaggcaggagcagaucugggacaaccaggauacgauggccauagcgccuugcacgucgccgaagcugcugggaaccucgcugugguugccuuucugcaaucacuggaaggcgcuguuggggcccaggcgccaugucccuag

SEQ ID NO: 36595 - RNA, 1722 nt, Artificial Sequence
  derived and/or modified sequence
auggccagagccgucggccccgaaagaagacuucuggccguuuacaccggcgguacaauuggcaugcguucugagcuuggcguucugguuccaggaacaggacucgcugcaauucuacgaacucucccuauguuccacgaugaggaacacgcaagggcacguggacucucugaggauacacugguacugccaccagccucucggaaccaaagaauucuauacacagucuuggagugccagccucuauuugauucaucagauaugaccauugcagagugggucugucucgcccaaaccauaaagagacacuacgagcaauaccauggcuuuguaguuauccacgggacggacacaauggccuucgcggcuagcaugcucaguuucaugcuugaaaaccugcaaaagaccgugauccucaccggggcccaaguccccauccacgcccucuggucugaugguagagagaaccuguuaggugcacuccugauggcuggacaguacguuauaccugaagugugucucuuuuuucaaaaccaacucuuuagaggcaaccgagccaccaaaguagaugcaagacgcuucgcugccuucuguagcccaaauuuacugccauuggccaccguuggugccgauauaacaauaaaucgugaacuaguucggaaaguggauggaaaggcaggauugguugugcacagcaguauggagcaggaugucggucuccugcgguuauauccaggcauucccgccgccuugguccgggccuuuuuacagcccccacugaagggcguggucauggagacuuucgggagcgguaacggccccacaaaaccagaccuccuacaagagcugcguguugcuaccgagaggggccuggugauuguuaauuguacucacugucuccagggcgcgguuacaaccgacuaugcugcugggauggcaauggccggggcuggagugaucucaggauuugacaugaccucugaagccgcuuuggccaagcugaguuaugugcuggggcagcccgggcuuucucuggauguacguaaagagcuacucacaaaggaccuucggggcgaaaugacuccuccuaguguugaagaacgcaggccgucccugcaagguaacacgcuuggagggggugugucuugguuacuaucucugucggggagccaggaagccgacgcgcucaggaaugccuuggucccaucucucgccugcgccgccgcccaugcaggagauguggaggcccugcaagcucucgucgagcugggaucugaucuuggauuaguggauuucaauggacaaacuccauugcaugcugccgcccgugggggacauacagaggccgugaccaugcuguuacaaagaggaguggaugugaacacacgggauacugacggauuuaguccucugcugcucgccgugcggggacgucaucccggcguuaucggccuucuucgcgaagcaggggcaucccuaucuacucaggaacuggaagaggcuggcacagaacucuguagacuggcuuaccgggcggaucuugaaggacuucaggucugguggcaagcaggagcagaucuggggcagccuggauaugauggacauucugcucugcauguggccgaagcagcuggaaaucuggcaguggucgcguuccugcagucucuggaaggagccgugggagcucaggcacccugccccgaaguccucccuggcgucuag

SEQ ID NO: 36596 - protein, 1848 aa, Artificial Sequence
  derived and/or modified sequence
MSVGELYSQCTRVWIPDPDEVWRSAELTKDYKEGDKSLQLRLEDETILEYPIDVQRNQLPFLRNPDILVGENDLTALSYLHEPAVLHNLKVRFLESNHIYTYCGIVLVAINPYEQLPIYGQDVIYTYSGQNMGDMDPHIFAVAEEAYKQMARDEKNQSIIVSGESGAGKTVSAKYAMRYFATVGGSASETNIEEKVLASSPIMEAIGNAKTTRNDNSSRFGKYIQIGFDKRYHIIGANMRTYLLEKSRVVFQADDERNYHIFYQLCAAAGLPEFKELALTSAEDFFYTSQGGDTSIEGVDDAEDFEKTRQAFTLLGVKESHQMSIFKIIASILHLGSVAIQAERDGDSCSISPQDVYLSNFCRLLGVEHSQMEHWLCHRKLVTTSETYVKTMSLQQVINARNALAKHIYAQLFGWIVEHINKALHTSLKQHSFIGVLDIYGFETFEVNSFEQFCINYANEKLQQQFNSHVFKLEQEEYMKEQIPWTLIDFYDNQPCIDLIEAKLGILDLLDEECKVPKGTDQNWAQKLYDRHSSSQHFQKPRMSNTAFIIVHFADKVEYLSDGFLEKNRDTVYEEQINILKASKFPLVADLFHDDKDPVPATTPGKGSSSKISVRSARPPMKVSNKEHKKTVGHQFRTSLHLLMETLNATTPHYVRCIKPNDEKLPFHFDPKRAVQQLRACGVLETIRISAAGYPSRWAYHDFFNRYRVLVKKRELANTDKKAICRSVLENLIKDPDKFQFGRTKIFFRAGQVAYLEKLRADKFRTATIMIQKTVRGWLQKVKYHRLKGATLTLQRYCRGHLARRLAEHLRRIRAAVVLQKHYRMQRARQAYQRVRRAAVVIQAFTRAMFVRRTYRQVLMEHKATTIQKHVRGWMARRHFQRLRDAAIVIQCAFRMLKARRELKALRIEARSAEHLKRLNVGMENKVVQLQRKIDEQNKEFKTLSEQLSVTTSTYTMEVERLKKELVHYQQSPGEDTSLRLQEEVESLRTELQRAHSERKILEDAHSREKDELRKRVADLEQENALLKDEKEQLNNQILCQSKDEFAQNSVKENLMKKELEEERSRYQNLVKEYSQLEQRYDNLRDEMTIIKQTPGHRRNPSNQSSLESDSNYPSISTSEIGDTEDALQQVEEIGLEKAAMDMTVFLKLQKRVRELEQERKKLQVQLEKREQQDSKKVQAEPPQTDIDLDPNADLAYNSLKRQELESENKKLKNDLNELRKAVADQATQNNSSHGSPDSYSLLLNQLKLAHEELEVRKEEVLILRTQIVSADQRRLAGRNAEPNINARSSWPNSEKHVDQEDAIEAYHGVCQTNSKTEDWGYLNEDGELGLAYQGLKQVARLLEAQLQAQSLEHEEEVEHLKAQLEALKEEMDKQQQTFCQTLLLSPEAQVEFGVQQEISRLTNENLDLKELVEKLEKNERKLKKQLKIYMKKAQDLEAAQALAQSERKRHELNRQVTVQRKEKDFQGMLEYHKEDEALLIRNLVTDLKPQMLSGTVPCLPAYILYMCIRHADYTNDDLKVHSLLTSTINGIKKVLKKHNDDFEMTSFWLSNTCRLLHCLKQYSGDEGFMTQNTAKQNEHCLKNFDLTEYRQVLSDLSIQIYQQLIKIAEGVLQPMIVSAMLENESIQGLSGVKPTGYRKRSSSMADGDNSYCLEAIIRQMNAFHTVMCDQGLDPEIILQVFKQLFYMINAVTLNNLLLRKDVCSWSTGMQLRYNISQLEEWLRGRNLHQSGAVQTMEPLIQAAQLLQLKKKTQEDAEAICSLCTSLSTQQIVKILNLYTPLNEFEERVTVAFIRTIQAQLQERNDPQQLLLDAKHMFPVLFPFNPSSLTMDSIHIPACLNLEFLNEV

SEQ ID NO: 36597 - protein, 963 aa, Artificial Sequence
  derived and/or modified sequence
MEHKATTIQKHVRGWMARRHFQRLRDAAIVIQCAFRMLKARRELKALRIEARSAEHLKRLNVGMENKVVQLQRKIDEQNKEFKTLSEQLSVTTSTYTMEVERLKKELVHYQQSPGEDTSLRLQEEVESLRTELQRAHSERKILEDAHSREKDELRKRVADLEQENALLKDEKEQLNNQILCQSKDEFAQNSVKENLMKKELEEERSRYQNLVKEYSQLEQRYDNLRDEMTIIKQTPGHRRNPSNQSSLESDSNYPSISTSEIGDTEDALQQVEEIGLEKAAMDMTVFLKLQKRVRELEQERKKLQVQLEKREQQDSKKVQAEPPQTDIDLDPNADLAYNSLKRQELESENKKLKNDLNELRKAVADQATQNNSSHGSPDSYSLLLNQLKLAHEELEVRKEEVLILRTQIVSADQRRLAGRNAEPNINARSSWPNSEKHVDQEDAIEAYHGVCQTNRLLEAQLQAQSLEHEEEVEHLKAQLEALKEEMDKQQQTFCQTLLLSPEAQVEFGVQQEISRLTNENLDLKELVEKLEKNERKLKKQLKIYMKKAQDLEAAQALAQSERKRHELNRQVTVQRKEKDFQGMLEYHKEDEALLIRNLVTDLKPQMLSGTVPCLPAYILYMCIRHADYTNDDLKVHSLLTSTINGIKKVLKKHNDDFEMTSFWLSNTCRLLHCLKQYSGDEGFMTQNTAKQNEHCLKNFDLTEYRQVLSDLSIQIYQQLIKIAEGVLQPMIVSAMLENESIQGLSGVKPTGYRKRSSSMADGDNSYCLEAIIRQMNAFHTVMCDQGLDPEIILQVFKQLFYMINAVTLNNLLLRKDVCSWSTGMQLRYNISQLEEWLRGRNLHQSGAVQTMEPLIQAAQLLQLKKKTQEDAEAICSLCTSLSTQQIVKILNLYTPLNEFEERVTVAFIRTIQAQLQERNDPQQLLLDAKHMFPVLFPFNPSSLTMDSIHIPACLNLEFLNEV

SEQ ID NO: 36598 - protein, 720 aa, Artificial Sequence
  derived and/or modified sequence
MHWPVTRECTRVWIPDPDEVWRSAELTKDYKEGDKSLQLRLEDETILEYPIDVQRNQLPFLRNPDILVGENDLTALSYLHEPAVLHNLKVRFLESNHIYTYCGIVLVAINPYEQLPIYGQDVIYTYSGQNMGDMDPHIFAVAEEAYKQMARDEKNQSIIVSGESGAGKTVSAKYAMRYFATVGGSASETNIEEKVLASSPIMEAIGNAKTTRNDNSSRFGKYIQIGFDKRYHIIGANMRTYLLEKSRVVFQADDERNYHIFYQLCAAAGLPEFKELALTSAEDFFYTSQGGDTSIEGVDDAEDFEKTRQAFTLLGVKESHQMSIFKIIASILHLGSVAIQAERDGDSCSISPQDVYLSNFCRLLGVEHSQMEHWLCHRKLVTTSETYVKTMSLQQVINARNALAKHIYAQLFGWIVEHINKALHTSLKQHSFIGVLDIYGFETFEVNSFEQFCINYANEKLQQQFNSHVFKLEQEEYMKEQIPWTLIDFYDNQPCIDLIEAKLGILDLLDEECKVPKGTDQNWAQKLYDRHSSSQHFQKPRMSNTAFIIVHFADKVEYLSDGFLEKNRDTVYEEQINILKASKFPLVADLFHDDKDPVPATTPGKGSSSKISVRSARPPMKVSNKEHKKTVGHQFRTSLSTQQIVKILNLYTPLNEFEERVTVAFIRTIQAQLQERNDPQQLLLDAKHMFPVLFPFNPSSLTMDSIHIPACLNLEFLNEV

SEQ ID NO: 36599 - DNA, 5547 bp, Artificial Sequence
  derived and/or modified sequence
atgtctgtcggggagctttactcccaatgcacccgtgtctggattcctgatccggacgaagtctggaggtcagcagagctgaccaaagactataaagaaggcgataagagcctgcagctgaggttggaggatgagaccatcctggaatatcctattgacgtgcagcgtaaccagctgccgtttctgcgaaatccagacatcctagtgggcgagaacgatttgaccgccctatcatatcttcacgagccagcggtgttgcataacctcaaggtgagattcctcgaatcaaaccacatctacacctactgcggaattgtgttggtggccatcaacccttatgagcagctgcccatatacggccaggacgtgatctatacgtattcaggtcagaatatgggtgatatggatccccatatatttgccgtggccgaggaagcatacaagcagatggcccgggacgagaagaaccagtccatcatcgtctctggagaatctggtgctggcaaaacagtatctgccaaatatgctatgcggtatttcgccaccgtcgggggatcggcatccgagactaatattgaagaaaaagtgctcgctagttcgccaattatggaggctatcggaaatgctaaaaccacccgtaacgacaatagcagccggttcggaaaatacattcagatcgggttcgacaagcggtatcacattatcggggccaatatgagaacctacctccttgagaagtcccgcgtagtctttcaggcagacgacgaacggaattatcatattttctaccagttatgcgctgccgctggactgccggagttcaaggaactcgcacttacttctgccgaggatttcttctacacatcccaaggaggcgatacctctatagagggggtcgatgacgccgaggattttgagaaaacaaggcaggccttcactctgttaggagtcaaggaatctcatcagatgtctatatttaagatcatcgcaagcattttacacctgggaagcgttgcaatacaggctgagcgagatggggacagctgttcaatcagcccacaggatgtctatctctccaacttctgcaggctgctgggcgtcgaacactcgcagatggagcactggctgtgtcacaggaagctcgtcaccacatccgaaacttacgttaagactatgtctctgcaacaggtgattaatgcccgaaacgcgctggcgaagcacatatatgcacaactattcggatggatcgtcgaacatattaacaaggcactgcatactagcctaaagcagcactcatttatcggcgtgctggacatttacggattcgaaacatttgaggttaatagctttgagcagttttgtattaactacgctaatgaaaaactgcagcagcaatttaatagtcacgtgtttaagctggagcaggaagagtacatgaaggagcagataccctggactctaattgatttctatgataaccagccttgcatcgatcttatcgaagctaaactgggaatattggatctcctcgacgaggagtgcaaggtgcccaagggtaccgaccagaactgggcccaaaagctctacgataggcattctagcagccaacactttcagaagcctcgcatgtccaacaccgcctttattatcgtgcatttcgccgacaaggtggaatacttaagcgatgggtttctagagaagaatcgcgatacagtgtacgaggagcagattaatattttaaaggcctcaaagtttcctctagtagcagacctctttcatgacgataaggatcctgtgcccgccaccactcctgggaaaggcagcagcagcaagatctctgtcagaagcgctcggccacctatgaaggtcagtaacaaggagcacaaaaagaccgttggtcaccagttccggacctctttgcatcttttgatggagactctcaacgccactacaccccattatgtgagatgcatcaagccaaatgacgagaagttaccttttcactttgaccctaaacgtgcagtgcagcagttgcgcgcatgcggagtgctagagaccatccgtatatccgccgccggctatcccagccggtgggcttaccatgacttttttaaccggtaccgcgtgcttgtgaagaagcgtgaactcgccaacacagataagaaagccatctgtagatctgtcctggagaacttaatcaaagacccggataaatttcagttcgggcggacaaagatcttttttcgagcagggcaggtggcctatcttgagaaactgcgggctgacaaatttcgcacagccactattatgattcaaaagacggtccgaggctggcttcaaaaagtgaagtaccatcggctcaagggagctactctcaccctgcagcgatactgccgtgggcacttggccaggcgattagccgaacacttgaggcggatccgcgccgccgtagttctgcagaagcattaccggatgcagagggcccggcaggcctaccagcgcgtgcgaagggccgccgtggttatccaggcatttactagggccatgttcgtcaggcgaacataccggcaagtcctcatggaacacaaggccacgacgatccagaaacacgtgcgcgggtggatggctcgccgccatttccagcggctgagggacgccgccatcgtcattcagtgtgccttccgcatgctgaaagccaggcgggagctgaaggcgctaaggattgaagctagatcggccgagcacctcaagcgccttaatgtgggaatggagaacaaggtggtccagctccagcgaaagattgatgaacagaacaaggaatttaagactctctcagagcaattgagtgttaccactagtacatacacgatggaagttgagcgactgaagaaggaattggttcactatcaacagtcccctggagaagacacctccctgaggctccaggaggaggtcgaatctttgcgcacggagctccaacgagctcactctgaacgtaagattctggaagacgcccattcgcgcgagaaagacgagctaaggaaacgcgtggccgatctggaacaagagaatgccctgctgaaggacgagaaagagcaactgaacaaccagatactgtgccagtccaaggatgaattcgcccagaacagcgtgaaagaaaatctcatgaaaaaagagctggaagaagagcgaagcaggtaccagaatctggtgaaagaatattcccagctcgagcagagatatgacaatcttcgggacgagatgacaattataaagcagaccccaggacatagaagaaaccccagtaaccaaagctcgctggagagcgacagcaattacccaagcattagcacatccgaaataggtgacacagaagacgccctgcagcaggtcgaggagatcgggctggagaaagcagccatggacatgaccgtgtttctgaagttgcagaagcgggtccgcgaattagagcaagaacgcaaaaaactgcaggtgcagctcgagaaacgtgaacaacaagactccaaaaaagtgcaggcagagccgccccagaccgacatagatctagaccccaatgccgatctagcctacaacagtctgaagaggcaggagcttgagtcagagaataagaagctgaaaaacgatttaaacgagctccggaaagccgtggcagaccaggctacccagaacaacagtagccacggctcacccgatagttacagcctgcttctcaatcagttaaagttagctcacgaggagctggaagttcgtaaagaagaagtgctcattctgagaacacagatcgtgtctgctgaccagcggaggcttgccggtcggaacgccgagccgaatattaacgctcgatcctcttggcctaattctgaaaagcacgtcgaccaggaggacgctatcgaggcttatcacggtgtgtgccaaacaaactccaagacggaggactgggggtatctcaatgaagatggagagctgggcctcgcttatcaaggtcttaagcaagttgcaaggctgctggaggcacaactgcaggcacaaagccttgagcacgaggaggaggtcgaacatctgaaggctcagctcgaggctttgaaagaagagatggacaagcaacaacaaactttctgtcagacactgctgctcagtcccgaggcccaggtagagtttggagtccagcaggagatcagcagactgactaatgagaatctcgacctcaaggaactggtcgaaaagttggagaaaaatgagaggaaattaaagaaacaacttaagatctatatgaagaaagcccaggacctggaggctgcccaggcattggcccaaagtgagcgcaagcggcatgaactgaatagacaggtgacggtgcagagaaaagaaaaagactttcaaggcatgctggagtaccataaagaagatgaagcccttctgatacgtaacctcgttaccgatctcaagccacagatgctgtctggcaccgttccatgcttgcccgcatatatcctctatatgtgtattaggcacgctgattatactaacgatgacttaaaggtacactcgcttctgacatcaacaattaacgggattaagaaggtactgaagaagcataatgacgacttcgagatgacctcattctggttgagcaatacctgcagactgctccactgcttgaagcagtacagtggcgacgaaggctttatgactcagaacacagccaagcagaacgaacactgtcttaaaaacttcgatctcacggaataccggcaggtgctgtcagatctgagcatccagatctatcagcaattgattaagatcgctgaaggtgtgctccagcccatgattgtctcagccatgctagaaaacgaaagcatccaggggttgtctggtgtgaagcctacagggtatcggaaaagatcttcaagcatggctgacggtgacaattcttattgtttggaagcaattattaggcagatgaacgctttccataccgtgatgtgcgaccagggattagaccctgaaataattctacaggtgtttaaacagctgttctatatgattaacgctgtgacactcaataacctcctgctgagaaaggatgtgtgctcttggtcaacgggaatgcagctaaggtataatatctcacagctggaagagtggttaagggggagaaacctccaccagtctggtgccgtgcagactatggagcctcttatccaggccgctcagcttctacagctcaagaaaaagactcaagaggacgctgaggcgatctgctcactgtgtacctcattaagtacccagcaaattgtgaagattctcaacctgtacaccccgctcaacgaattcgaggagagggttaccgtcgcatttatccgaacaatccaggctcagctccaggaaaggaacgaccctcagcagctgcttctcgatgcaaagcatatgttccctgttttgtttcccttcaacccttccagcctgaccatggactccatccacatccctgcatgcttgaacctcgaatttctgaacgaagtctag

SEQ ID NO: 36600 - DNA, 2892 bp, Artificial Sequence
  derived and/or modified sequence
atggaacacaaggcaaccaccattcagaagcacgtgcgcggatggatggccagacggcatttccaacggctcagggacgcagcaatagtcattcagtgtgcgtttaggatgttgaaagctcgacgggagctcaaagccttgagaatcgaagccagaagcgcagagcacctaaagcggttgaacgtaggcatggagaacaaggtggtgcagctgcaacgaaagatcgacgagcagaacaaagagttcaaaactctctctgagcagctgagtgtgacaacatcaacctataccatggaggtggagagactaaaaaaggagctcgtgcactaccaacagtctcccggggaagataccagcctgaggcttcaagaggaggttgaatccctaagaacagagctgcagcgcgcccatagcgaacggaagattctggaagacgcccacagtagggagaaagatgaattgcggaaacgcgtggccgaccttgaacaagaaaacgctctactgaaggatgaaaaagagcagctgaacaaccagatactttgccagagcaaagacgaatttgcgcagaattcagtgaaagagaacctcatgaagaaggaattggaggaagagaggagccgataccagaatctggtgaaagagtacagtcagctggagcaaaggtacgacaacctacgtgacgaaatgaccatcatcaaacagactcccggccatcgccgtaacccctcaaatcagtctagtttggagagcgactccaactatccttctattagcacaagcgaaattggagatacagaggacgccctgcagcaggtcgaggagatcgggcttgagaaggcagccatggacatgaccgtgttcttaaagttgcaaaagcgagtacgggagcttgagcaggagcgcaagaagcttcaggtccagctcgagaagcgagaacagcaagattcaaagaaagtgcaggcagagccaccccagactgacatcgatctggatccaaatgcagatctcgcttacaacagcttaaagcgacaggagctagagagtgagaacaaaaagctgaagaacgatcttaacgaactgaggaaggcggtagccgatcaggcaacccaaaacaactcaagccacgggtcacctgactcgtacagtttgttactgaaccagctcaaactagcgcacgaggagcttgaagtgcggaaggaggaggtgctgatcctgcgtacacagattgtatccgccgaccaacgtcgactcgccggccgcaatgccgaacccaatatcaatgcccggtcttcttggcccaactccgaaaaacacgttgaccaggaggacgcgattgaggcttaccatggagtgtgccaaacaaacagactccttgaagcgcagctgcaggctcagtctctggaacatgaagaagaggtcgagcatcttaaagcgcagctcgaagctctgaaggaagagatggacaaacagcagcagactttctgccagactcttctgctgtctccggaagctcaagttgagttcggcgtccagcaggagattagtcggttaaccaatgaaaatttggatctaaaagaacttgtggagaagctggagaaaaacgagcggaagctcaagaagcagctgaagatttacatgaaaaaggcccaggacctggaggccgcccaggctttagcccagtctgaaagaaaacgccacgaactgaacagacaagtgacggtccagcggaaagagaaggattttcagggaatgttggaataccacaaggaggacgaagcactcttaattcgaaatttggtgactgatttgaagccccagatgctctccggaactgtgccctgcctgccggcgtacatcctctatatgtgcatcaggcacgctgactacaccaacgatgacctgaaagtgcatagcttactgacctcaaccatcaatggaatcaagaaggtgctgaaaaagcacaatgatgatttcgaaatgacatcattttggttgtccaacacctgtcgcctactacattgtttgaagcagtactctggcgacgaaggcttcatgacccaaaatacagccaagcagaacgagcattgcttaaaaaacttcgacctgacagagtatcgacaggtgcttagcgacctgagtatccagatttaccagcagttgatcaagatagcggagggggtattacagcccatgatcgtgagtgcaatgctcgaaaatgagagtatccagggcctaagcggcgtgaagccaaccggatatcgtaaaagatccagttctatggccgatggggataattcttattgcttggaagctatcatcaggcagatgaatgcttttcatactgtgatgtgcgatcagggactggatccggagatcatcctccaggtgtttaagcagctgttctacatgattaacgcagtcactctcaataaccttctcctcaggaaggacgtctgttcatggagcacaggcatgcagctacggtataacatctcacagcttgaggagtggcttcgcggaaggaacttgcaccaaagcggtgctgttcagacaatggagcccttgattcaagcggcacaactgctgcaactgaaaaaaaaaacacaggaagatgctgaagctatctgctcactctgcacctctctcagcacgcagcagattgtgaagatactgaacctgtacacccccctcaatgagtttgaagagcgcgtgacggtggcgttcatccgaacaatccaagcgcagttgcaagaaaggaatgacccacagcaactgttgctggacgctaagcacatgttccccgtgttgtttccctttaatccctccagcctgaccatggactctatccacatccctgcctgcttaaatctggaatttctgaatgaagtctag

SEQ ID NO: 36601 - DNA, 2163 bp, Artificial Sequence
  derived and/or modified sequence
atgcactggcccgtgacccgggagtgcacacgcgtgtggataccagatccagacgaggtgtggaggtctgccgaactaaccaaggactataaagagggcgacaagtcgctacagttgcggttggaggatgagactatcttagagtatccaattgacgtgcagcgaaaccaactgcccttccttagaaatcccgatattctcgtgggggagaacgacctcaccgccctttcgtatttacacgagcctgccgtgcttcataatctgaaagtgcgatttctcgaatctaatcacatttacacatattgcgggatcgttctggtggccattaatccttacgaacagttgcccatttatggccaggacgttatctacacgtactctggtcaaaatatgggcgacatggacccacacatcttcgctgtggccgaggaggcttacaagcagatggcccgtgacgagaagaaccaatccatcatcgtaagcggggaaagtggagccgggaagaccgtttccgcaaagtacgcaatgcgttacttcgctacggtgggcggttctgcgtctgagactaatatcgaagaaaaggtacttgcctcctcacccataatggaggccatcggtaatgccaagactaccaggaatgacaattcctctaggttcggaaagtatatccagatcggtttcgacaaaagatatcatatcatcggagcaaacatgagaacgtatttgctggagaagtcccgcgttgtgtttcaggccgacgacgagcgtaattaccacatcttttatcagctgtgcgcagctgccggactccccgagtttaaggagctggctctaacttccgctgaggactttttctatactagccagggcggcgatacgtcgatcgagggagtggacgacgcagaggactttgagaaaacgagacaggcgtttactctcctgggagtgaaggaatctcaccagatgtccatctttaagatcatcgcgtccatcctgcacctcggtagcgttgcaatacaggccgaacgggatggggattcatgttccatatctccccaggacgtgtacctatcaaacttctgccggctgttaggcgtggagcacagccaaatggaacattggctgtgtcaccgaaaactggtgacgaccagtgaaacatacgttaaaaccatgagtctgcaacaagtgatcaacgcgagaaacgcgcttgccaaacatatctatgcacagttgttcggttggatagtcgaacatattaataaagcactccacacatctctgaagcagcatagcttcatcggagtgctcgacatctatggcttcgaaactttcgaggtgaactcctttgagcaattttgtattaattacgccaatgagaagttacagcagcagttcaacagccatgtctttaagctcgagcaggaagaatacatgaaagaacaaatcccctggaccttgatcgatttctacgataaccagccttgtattgacctgatcgaggcaaagctgggcatccttgacctcttggacgaggaatgcaaagtgcccaaggggaccgaccagaattgggcacaaaaactgtacgaccgtcactcgtcgagtcagcacttccagaaacccagaatgagcaacacagcgttcatcattgtccattttgctgacaaagtggagtacttaagtgacggctttttggagaaaaatcgggacactgtgtacgaggaacagattaacatacttaaggcttcaaaatttccactggttgctgacttgttccatgacgacaaagatccagttcccgccacaacccccggcaagggatcatcctctaagatttcagttaggtcagccaggcctcctatgaaggtgagcaacaaggagcacaagaagactgtgggccaccagttccgaacctctcttagtactcagcagatcgtgaaaattctcaacctgtataccccactgaatgagtttgaggaacgagtgaccgtggcatttatccggaccattcaggctcaattgcaggagcgtaacgatcctcaacagctcctgttagacgccaaacacatgttccctgtcctctttcctttcaacccttcttcattgacgatggactccatccacatccctgcctgcttgaatctggaattcctcaacgaggtctag

SEQ ID NO: 36602 - DNA, 5547 bp, Artificial Sequence
  derived and/or modified sequence
atgtctgtgggggagctgtacagccagtgcaccagggtgtggatcccagaccctgatgaggtgtggaggtctgctgagctgaccaaggactacaaggagggggacaagagcctgcagctgcggctggaggatgagaccatcctggagtaccccattgatgtgcagaggaaccagctgcccttcctgagaaatccagacatcctggtgggagaaaatgacctgacagccctgagctacctgcacgagcctgctgtgctgcacaacctgaaggtgcgcttcctggagagcaaccacatctacacctactgcggcatcgtgctggtggccatcaacccctatgagcagctgcccatctacggccaggacgtcatctacacctacagcggccagaacatgggagacatggacccccacatctttgctgtggccgaggaggcctacaagcagatggccagagatgagaagaaccagagcatcatcgtgtctggagagagcggggccggcaagacagtgtctgccaagtatgccatgagatactttgccaccgtgggcggcagcgccagcgagaccaacatcgaggagaaggtgctggccagcagccccatcatggaggccatcggaaatgccaagaccaccagaaatgacaacagcagcagatttgggaagtacatccagatcggctttgacaagcgctaccacatcattggagccaacatgaggacctacctgctggagaagagccgggtggtgttccaggctgatgatgaaagaaactaccacatcttctaccagctgtgtgccgctgctggcctgcctgagttcaaggagctggccctgaccagcgctgaggacttcttctacaccagccagggcggggacaccagcattgagggcgtggatgatgctgaagattttgagaagacccggcaggccttcaccctgctgggcgtgaaggagagccaccagatgagcatcttcaagatcatcgccagcatcctgcacctgggctctgtggccatccaggccgagagagatggagacagctgcagcatcagcccccaggatgtgtacctgagcaacttctgccgcctgctgggcgtggagcacagccagatggagcactggctgtgccacaggaagctggtgaccaccagcgagacctacgtgaagaccatgagcctgcagcaggtgatcaatgccagaaatgccctggccaagcacatctatgcccagctgtttggctggatcgtggagcacatcaacaaggccctgcacaccagcctgaagcagcacagcttcatcggcgtgctggacatctacggctttgagacctttgaggtgaacagctttgagcagttctgcatcaactatgccaatgagaagctgcagcagcagttcaacagccacgtgttcaagctggagcaggaggagtacatgaaggagcagatcccctggaccctgattgacttctatgacaaccagccctgcatcgacctgattgaggccaagctgggcatcctggacctgctggatgaggagtgcaaggtgcccaagggcacagaccagaactgggcccagaagctgtatgacagacacagcagcagccagcacttccagaagcccaggatgagcaacacagccttcatcatcgtgcactttgctgacaaggtggagtacctgagtgatggcttcctggagaagaacagagacacagtgtatgaggagcagatcaacatcctgaaggccagcaagttccccctggtggccgacctcttccatgatgacaaggaccctgtgcctgccaccacccctgggaagggcagcagcagcaagatctctgtgcgcagcgcccggccccccatgaaggtgagcaacaaggagcacaagaagacagtgggccaccagttccgcaccagcctgcacctgctgatggagaccctgaatgccaccaccccccactacgtgcgctgcatcaagcccaatgatgagaagctgcccttccactttgaccccaagagagctgtgcagcagctgcgggcctgtggggtgctggagaccatccgcatctctgctgctggctaccccagccgctgggcctaccatgacttcttcaaccgctacagagtgctggtgaagaagcgggagctggccaacacagacaagaaggccatctgccgctctgtgctggagaacctgatcaaggaccctgacaagttccagtttggaagaaccaagatcttcttccgggccggccaggtggcctacctggagaagctgcgggctgacaagttcagaacagccaccatcatgatccagaagacagtgcggggctggctgcagaaggtgaagtaccaccggctgaagggggccaccctgaccctgcagcgctactgccggggccacctggcccggcggctggccgagcacctgcggcgcatccgggctgctgtggtgctgcagaagcactacaggatgcagagggcccggcaggcctaccagagggtgcggcgggctgctgtggtgatccaggccttcacccgggccatgtttgtgcggaggacctaccggcaggtgctgatggagcacaaggccaccaccatccagaagcacgtgcggggctggatggcccggcggcacttccagaggctgagagatgctgccatcgtcatccagtgtgccttcaggatgctgaaggcccggcgggagctgaaggccctgcgcatcgaggcccggtctgctgagcacctgaagaggctgaatgtgggcatggagaacaaggtggtgcagctgcagaggaagattgatgagcagaacaaggagttcaagaccctgtctgagcagctgtctgtgaccaccagcacctacaccatggaggtggagcggctgaagaaggagctggtgcactaccagcagagccctggagaggacaccagcctgcggctgcaggaggaggtggagagcctgaggacagagctgcagagggcccacagcgagaggaagatcctggaggatgcccacagccgggagaaggatgagctgaggaagagggtggccgacctggagcaggagaatgccctgctgaaggatgagaaggagcagctgaacaaccagatcctgtgccagagcaaggatgaatttgcccagaacagcgtgaaggagaacctgatgaagaaggagctggaggaggagaggagccgctaccagaacctggtgaaggagtacagccagctggagcagagatatgacaacctgagagatgagatgaccatcatcaagcagaccccaggccacagaagaaaccccagcaaccagagcagcctggagagtgacagcaactaccccagcatcagcaccagcgagattggagacacagaagatgccctgcagcaggtggaggagatcggcctggagaaggccgccatggacatgaccgtcttcctgaagctgcagaagagggtgcgggagctggagcaggagaggaagaagctgcaggtgcagctggagaagcgggagcagcaggacagcaagaaggtgcaggccgagcccccccagacagacatcgacctggaccccaatgctgacctggcctacaacagcctgaagaggcaggagctggagagcgagaacaagaagctgaagaatgacctgaatgagctgaggaaggctgtggccgaccaggccacccagaacaacagcagccacggcagcccagacagctacagcctgctgctgaaccagctgaagctggcccacgaggagctggaggtgaggaaggaggaggtgctgatcctgcggacccagatcgtgtctgctgaccagaggcggctggccggcagaaatgctgagcccaacatcaatgcccggagctcctggcccaacagcgagaagcacgtggaccaggaggatgccatcgaggcctaccacggcgtgtgccagaccaacagcaagacagaggactggggctacctgaatgaagatggagagctgggcctggcctaccagggcctgaagcaggtggcccggctgctggaggcccagctgcaggcccagagcctggagcacgaggaggaggtggagcacctgaaggcccagctggaggccctgaaggaggagatggacaagcagcagcagaccttctgccagaccctgctgctgagccctgaggcccaggtggagtttggagtgcagcaggagatcagccggctgaccaatgaaaacctggacctgaaggagctggtggagaagctggagaagaatgaaaggaagctgaagaagcagctgaagatctacatgaagaaggcccaggacctggaggccgcccaggccctggcccagagcgagaggaagagacatgagctgaaccggcaggtgacagtgcagaggaaggagaaggacttccagggcatgctggagtaccacaaggaggatgaggccctgctgatccggaacctggtgacagacctgaagccccagatgctgagcggcaccgtgccctgcctgcctgcctacatcctgtacatgtgcatcagacatgctgactacaccaatgatgacctgaaggtgcacagcctgctgaccagcaccatcaatggcatcaagaaggtgctgaagaagcacaatgatgactttgagatgaccagcttctggctgagcaacacctgccgcctgctgcactgcctgaagcagtacagcggagatgagggcttcatgacccagaacacagccaagcagaatgagcactgcctgaagaactttgacctgacagagtaccggcaggtgctgagtgacctgagcatccagatctaccagcagctgatcaagattgctgagggcgtgctgcagcccatgattgtgtctgccatgctggagaatgaaagcatccagggcctgtctggagtgaagcccaccggctacaggaagaggagcagctccatggctgatggagacaacagctactgcctggaggccatcatccggcagatgaatgccttccacacagtgatgtgtgaccagggcctggaccctgagatcatcctgcaggtgttcaagcagctgttctacatgatcaatgctgtgaccctgaacaacctgctgctgaggaaggatgtgtgctcctggagcacaggcatgcagctgcgctacaacatcagccagctggaggagtggctgcggggcaggaacctgcaccagagcggggctgtgcagaccatggagcccctcatccaggccgcccagctgctgcagctgaagaagaagacccaggaggatgctgaggccatctgcagcctgtgcaccagcctgagcacccagcagatcgtgaagatcctgaacctgtacacccccctgaatgaatttgaggagcgggtgacagtggccttcatccgcaccatccaggcccagctgcaggagagaaatgacccccagcagctgctgctggatgccaagcacatgtttcctgtgctcttccccttcaaccccagcagcctgaccatggacagcatccacatcccagcctgcctgaacctggagttcctgaatgaggtgtag

SEQ ID NO: 36603 - DNA, 2892 bp, Artificial Sequence
  derived and/or modified sequence
atggagcacaaggccaccaccatccagaagcacgtgcggggctggatggcccggcggcacttccagaggctgagagatgctgccatcgtcatccagtgtgccttcaggatgctgaaggcccggcgggagctgaaggccctgagaattgaggcccggtctgctgagcacctgaagaggctgaatgtgggcatggagaacaaggtggtgcagctgcagaggaagattgatgagcagaacaaggagttcaagaccctgtctgagcagctgtctgtgaccaccagcacctacaccatggaggtggagcggctgaagaaggagctggtgcactaccagcagagccctggagaggacaccagcctgcggctgcaggaggaggtggagagcctgaggacagagctgcagagggcccacagcgagaggaagatcctggaggatgcccacagccgggagaaggatgagctgaggaagagggtggccgacctggagcaggagaatgccctgctgaaggatgagaaggagcagctgaacaaccagatcctgtgccagagcaaggatgaatttgcccagaacagcgtgaaggagaacctgatgaagaaggagctggaggaggagaggagccgctaccagaacctggtgaaggagtacagccagctggagcagagatatgacaacctgagagatgagatgaccatcatcaagcagaccccaggccacagaagaaaccccagcaaccagagcagcctggagagtgacagcaactaccccagcatcagcaccagcgagatcggggacacagaagatgccctgcagcaggtggaggagatcggcctggagaaggccgccatggacatgacagtgttcctgaagctgcagaagagggtgcgggagctggagcaggagaggaagaagctgcaggtgcagctggagaagcgggagcagcaggacagcaagaaggtgcaggccgagcccccccagacagacatcgacctggaccccaatgctgacctggcctacaacagcctgaagaggcaggagctggagagcgagaacaagaagctgaagaatgacctgaatgagctgaggaaggctgtggccgaccaggccacccagaacaacagcagccacggcagcccagacagctacagcctgctgctgaaccagctgaagctggcccacgaggagctggaggtgaggaaggaggaggtgctgatcctgcggacccagatcgtgtctgctgaccagaggcggctggccggcagaaatgctgagcccaacatcaatgcccggagctcctggcccaacagcgagaagcacgtggaccaggaggatgccatcgaggcctaccatggagtgtgccagaccaaccggctgctggaggcccagctgcaggcccagagcctggagcacgaggaggaggtggagcacctgaaggcccagctggaggccctgaaggaggagatggacaagcagcagcagaccttctgccagaccctgctgctgagccctgaggcccaggtggagtttggagtgcagcaggagatcagccggctgaccaatgaaaacctggacctgaaggagctggtggagaagctggagaagaatgaaaggaagctgaagaagcagctgaagatctacatgaagaaggcccaggacctggaggccgcccaggccctggcccagagcgagaggaagagacatgagctgaaccggcaggtgacagtgcagaggaaggagaaggacttccagggcatgctggagtaccacaaggaggatgaggccctgctgatccggaacctggtgacagacctgaagccccagatgctgtctggaacagtgccctgcctgcctgcctacatcctgtacatgtgcatcagacatgctgactacaccaatgatgacctgaaggtgcacagcctgctgaccagcaccatcaatggcatcaagaaggtgctgaagaagcacaatgatgactttgagatgaccagcttctggctgagcaacacctgccgcctgctgcactgcctgaagcagtacagcggagatgagggcttcatgacccagaacacagccaagcagaatgagcactgcctgaagaactttgacctgacagagtaccggcaggtgctgagtgacctgagcatccagatctaccagcagctgatcaagattgctgagggcgtgctgcagcccatgattgtgtctgccatgctggagaatgaaagcatccagggcctgagcggcgtgaagcccaccggctacaggaagaggagcagctccatggctgatggagacaacagctactgcctggaggccatcatccggcagatgaatgccttccacacagtgatgtgtgaccagggcctggaccctgagatcatcctgcaggtgttcaagcagctgttctacatgatcaatgctgtgaccctgaacaacctgctgctgaggaaggatgtgtgctcctggagcacaggcatgcagctgcgctacaacatcagccagctggaggagtggctgcggggcaggaacctgcaccagagcggggctgtgcagaccatggagcccctcatccaggccgcccagctgctgcagctgaagaagaagacccaggaggatgctgaggccatctgcagcctgtgcaccagcctgagcacccagcagatcgtgaagatcctgaacctgtacacccccctgaatgaatttgaggagcgggtgacagtggccttcatccgcaccatccaggcccagctgcaggagagaaatgacccccagcagctgctgctggatgccaagcacatgtttcctgtgctcttccccttcaaccccagcagcctgaccatggacagcatccacatcccagcctgcctgaacctggagttcctgaatgaggtgtag

SEQ ID NO: 36604 - DNA, 2163 bp, Artificial Sequence
  derived and/or modified sequence
atgcactggcctgtgacccgggagtgcaccagggtgtggatcccagaccctgatgaggtgtggaggtctgctgagctgaccaaggactacaaggagggggacaagagcctgcagctgcggctggaggatgagaccatcctggagtaccccattgatgtgcagaggaaccagctgcccttcctgaggaacccagacatcctggtgggggagaatgacctgacagccctgagctacctgcacgagcctgctgtgctgcacaacctgaaggtgcgcttcctggagagcaaccacatctacacctactgcggcatcgtgctggtggccatcaacccctatgagcagctgcccatctacggccaggatgtgatctacacctacagcggccagaacatgggagacatggacccccacatctttgctgtggccgaggaggcctacaagcagatggccagagatgagaagaaccagagcatcatcgtgtctggagagagcggggccggcaagacagtgtctgccaagtatgccatgagatactttgccaccgtgggcggcagcgccagcgagaccaacatcgaggagaaggtgctggccagcagccccatcatggaggccatcggaaatgccaagaccaccagaaatgacaacagcagcagatttgggaagtacatccagattggatttgacaagcgctaccacatcatcggggccaacatgaggacctacctgctggagaagagccgggtggtgttccaggctgatgatgagaggaactaccacatcttctaccagctgtgtgccgccgccggcctgcctgagttcaaggagctggccctgaccagcgctgaggacttcttctacaccagccagggcggggacaccagcattgaaggagtggatgatgctgaggactttgagaagacccggcaggccttcaccctgctgggcgtgaaggagagccaccagatgagcatcttcaagatcatcgccagcatcctgcacctgggctctgtggccatccaggccgagagagatggagacagctgcagcatcagcccccaggatgtgtacctgagcaacttctgccgcctgctgggcgtggagcacagccagatggagcactggctgtgccacaggaagctggtgaccaccagcgagacctacgtgaagaccatgagcctgcagcaggtgatcaatgccagaaatgccctggccaagcacatctatgcccagctgtttggctggatcgtggagcacatcaacaaggccctgcacaccagcctgaagcagcacagcttcatcggcgtgctggacatctacggctttgagacctttgaggtgaacagctttgagcagttctgcatcaactatgccaatgagaagctgcagcagcagttcaacagccacgtgttcaagctggagcaggaggagtacatgaaggagcagatcccctggaccctgattgacttctatgacaaccagccctgcatcgacctgattgaggccaagctgggcatcctggacctgctggatgaggagtgcaaggtgcccaagggcacagaccagaactgggcccagaagctgtatgacagacacagcagcagccagcacttccagaagcccaggatgagcaacacagccttcatcatcgtgcactttgctgacaaggtggagtacctgagtgatggcttcctggagaagaacagagacacagtgtatgaggagcagatcaacatcctgaaggccagcaagttccccctggtggccgacctcttccatgatgacaaggaccctgtgcctgccaccaccccaggcaagggcagcagcagcaagatctctgtgcgcagcgcccggccccccatgaaggtgagcaacaaggagcacaagaagacagtgggccaccagttccgcaccagcctgagcacccagcagatcgtgaagatcctgaacctgtacacccccctgaatgaatttgaggagcgggtgacagtggccttcatccgcaccatccaggcccagctgcaggagagaaatgacccccagcagctgctgctggatgccaagcacatgtttcctgtgctcttccccttcaaccccagcagcctgaccatggacagcatccacatcccagcctgcctgaacctggagttcctgaatgaggtgtag

SEQ ID NO: 36605 - DNA, 9520 bp, Artificial Sequence
  derived and/or modified sequence
gcctcctccccacacctgggaggggagtggtgcggcgcggcctcctcccccggcgctcgcaactcctgtccggccgtagctgcgccgccgcggcgggagtaaaggtcgcgccgccgggagcgagccggccgcggcgcctgcgggaagccggcggggcaggtcggagaagagcgagaagatcgagaaactccaggccagcccgggaacatggcgccaggcgggccagccgcggactgagagccgcggggcagccaggagccggggcccgagccccgcccggcccgggccatgtcggtgggcgagctctacagccagtgcacaagggtctggatccctgaccctgatgaggtatggcgctcagctgagttaaccaaggactacaaagaaggagacaagagcctacagctcagactggaggatgaaacgattctggaatacccaattgatgtacaacgcaaccagctgcccttcttacggaatccagatatcttggtgggagaaaatgacctgactgcccttagctatcttcatgagcctgcagttttgcataatttgaaggtccgtttcctggagtccaaccatatctacacttactgtggtatcgtacttgttgccattaatccttatgaacagttgccaatctatggacaagatgtcatctatacctacagtggccaaaacatgggagacatggacccccacatctttgctgtggcagaagaagcctacaagcagatggccagagatgagaagaatcagtccatcatagtcagtggggagtctggagccgggaagacggtatcagccaagtatgccatgcgctatttcgccaccgttggtggctcggccagtgaaaccaacatcgaagagaaggtgctggcatccagtcccatcatggaggccattggaaatgccaagaccacccgcaatgacaacagcagccgttttggcaagtacatccagattggctttgacaaaaggtaccacatcatcggggccaacatgaggacttacctcttggagaagtccagagtggtcttccaggcagatgatgagaggaattaccacatcttttaccagctctgtgctgctgccggtcttccagaatttaaagagcttgcactaacaagtgcagaggactttttctatacatcacagggaggagacacttccatcgagggtgtggacgatgctgaggactttgagaagactcgacaagccttcacactcctcggagtgaaagagtcccatcagatgagcatttttaagataattgcttctatcttgcaccttggaagtgtggcgattcaggctgagcgtgatggtgattcctgtagtatatcaccccaggatgtatacctaagcaacttctgccgactgctaggggtggagcacagtcagatggagcactggctgtgtcatcgcaagctggtcaccacctcggagacctacgtcaagaccatgtccctgcagcaggtgatcaatgcgcgcaacgccctggcgaagcacatctatgcccagttgttcggctggattgtggagcacatcaacaaggccctgcacacctccctcaagcagcactccttcatcggggtcctggacatctatgggtttgagacatttgaggtaaacagctttgagcagttctgtatcaactatgcaaatgaaaagctccagcagcagttcaactcgcatgttttcaaactggagcaagaagaatacatgaaggaacagatcccttggaccctgattgatttttatgataaccaaccttgtatcgacctcattgaagccaagctgggtatcttggacctgttggatgaagaatgtaaggtccccaaaggaactgaccagaactgggctcagaagctctatgaccggcactccagcagccagcacttccagaagccccgcatgtccaacacggccttcatcatcgtccactttgcagacaaggtggagtacctctctgatggttttctggagaaaaacagagacacggtgtatgaagagcagatcaatatcctgaaggccagcaagttcccactagtggctgacttgtttcatgatgacaaggaccctgttcctgccaccacccctgggaaggggtcatcttcgaagatcagcgtccgttctgccagaccccccatgaaagtctccaacaaggagcacaagaaaaccgttggccaccagttccgtacctccctgcatctgctcatggagaccctgaatgccacgacacctcactatgtccgctgcatcaagcccaacgatgagaagctcccctttcactttgacccaaagagagcagtgcagcaactcagagcctgcggggtgttggagacgattcgaatcagtgcagctggctacccatccaggtgggcctaccatgactttttcaaccggtatcgggtgctggtcaagaagagagagctcgccaacacagacaaaaaggccatctgcaggtctgtcctggagaacctcatcaaggaccccgacaagttccagtttggccgcaccaagatcttctttcgagcaggccaggtggcctacctggagaagctgcgggctgacaagttccggacagccaccatcatgatccagaaaactgtccggggatggctgcagaaggtgaaatatcacaggctgaagggggctaccttaaccctgcagaggtactgccggggacacctggcccgcaggctggctgagcacctgcggaggatcagagcggctgtggtgctccagaaacattaccgcatgcagagggcccgccaggcctaccagagggtccgcagagctgccgttgttatccaggccttcacccgggccatgtttgtgcggagaacctaccgccaggtcctcatggagcacaaggccaccaccatccagaagcacgtgcggggctggatggcacgcaggcacttccagcggctgcgggatgcagccattgtcatccagtgtgccttccggatgctcaaggccaggcgggagctgaaggccctcaggattgaggcccgctcagcagagcatctgaaacgtctcaacgtgggcatggagaacaaggtggtccagctgcagcggaagatcgatgagcagaacaaagagttcaagacactttcagagcagttgtccgtgaccacctcaacatacaccatggaggtagagcggctgaagaaggagctggtgcactaccagcagagcccaggtgaggacaccagcctcaggctgcaggaggaggtggagagcctgcgcacagagctgcagagggcccactcggagcgcaagatcttggaggacgcccacagcagggagaaagatgagctgaggaagcgagttgcagacctggagcaagaaaatgctctcttgaaagatgagaaagaacagctcaacaaccaaatcctgtgccagtctaaagatgaatttgcccagaactctgtgaaggaaaatctcatgaagaaagaactggaggaggagcgatcccggtaccagaaccttgtgaaggaatattcacagttggagcagagatacgacaaccttcgggatgaaatgaccatcataaagcaaactccaggtcataggcggaacccatcaaaccaaagtagcttagaatctgactccaattacccctccatctccacatctgagatcggagacactgaggatgccctccagcaggtggaggaaattggcctggagaaggcagccatggacatgacggtcttcctgaagctgcagaagagagtacgggagctggagcaggagaggaaaaagctgcaagtgcagctggagaagagagaacagcaggacagcaagaaagtccaggcggaaccaccacagactgacatagatttggacccgaatgcagatctggcctacaatagtctgaagaggcaagagctggagtcagagaacaaaaagctgaagaatgacctgaatgagctgaggaaagccgtggccgaccaagccacgcagaataactccagccacggctccccagatagctacagcctcctgctgaaccagctcaagctggcccacgaggagctcgaggtgcgcaaggaggaggtgctcatcctcaggacccagatcgtgagcgccgaccagcggcgactcgccggcaggaacgcggagccgaacattaatgccagatcaagttggcctaacagtgaaaagcatgttgaccaggaggatgccattgaggcctatcacggggtctgccagacaaacagcaagactgaggattggggatatttaaatgaagatggagaactcggcttggcctaccaaggcctaaagcaagttgccaggctgctggaggctcagctgcaggcccagagcctggagcatgaggaggaggtggagcatctcaaggctcagctcgaggccctgaaggaggagatggacaaacagcagcagaccttctgccagacgctactgctctccccagaggcccaggtggaattcggcgttcagcaggaaatatcccggctgaccaacgagaatctggaccttaaagaactggtagaaaagctggaaaagaatgagaggaagctcaaaaagcaactgaagatttacatgaagaaagcccaggacctagaagctgcccaggcattggcccagagtgagaggaagcgccatgagctcaacaggcaggtcacggtccagcggaaagagaaggatttccagggcatgctggagtaccacaaagaggacgaggccctcctcatccggaacctggtgacagacttgaagccccagatgctgtcgggcacagtgccctgtctccccgcctacatcctctacatgtgcatccggcacgcggactacaccaacgacgatctcaaggtgcactccctgctgacctccaccatcaacggcattaagaaagtcctgaaaaagcacaatgatgactttgagatgacgtcattctggttatccaacacctgccgccttcttcactgtctgaagcagtacagcggggatgagggcttcatgactcagaacactgcaaagcagaatgaacactgtcttaagaattttgacctcaccgaataccgtcaggtgctgagtgacctttccattcagatctaccagcagctcattaaaattgccgagggcgtgttacagccgatgatagtttctgccatgttggaaaatgagagcattcagggtctatctggtgtgaagcccaccggctaccggaagcgctcctccagcatggcagatggggataactcatactgcctggaagctatcatccgccagatgaatgcctttcatacagtcatgtgtgaccagggcttggaccctgagatcatcctgcaggtattcaaacagctcttctacatgatcaacgcagtgactcttaacaacctgctcttgcggaaggacgtctgctcttggagcacaggcatgcaactcaggtacaatataagtcagcttgaggagtggcttcggggaagaaaccttcaccagagtggagcagttcagaccatggaacctctgatccaagcagcccagctcctgcaattaaagaagaaaacccaggaggacgcagaggctatctgctccctgtgtacctccctcagcacccagcagattgtcaaaattttaaacctttatactcccctgaatgaatttgaagaacgggtaacagtggcctttatacgaacaatccaggcacaactacaagagcggaatgaccctcagcaactgctattagatgccaagcacatgtttcctgttttgtttccatttaatccatcttctctaaccatggactcaatccacatcccagcgtgtctcaatctggaattcctcaatgaagtctgaagatgcatgtttccagcattagtttgattcccaatgtgagcaagaaggaagtatatacagtaaagtaaattcaaggatctgttaaatctggtaaaagtagatcaaatcagagattgacagcctgtggagggtgctgaactatacagaattagacacaactatgtcattattttttgtacctactgctcagaataaaaacacttgaaatatggaagattttaagtttgatttcagtccaacacatatacataatttatagacaccaagcagtccccatagacatataaaaggtgtcaattctataaaacgaagctgcctagttttgatctttgcatagaactagagaatgtccaaattaaaataccaaatatatataagtcacataaattgccttcaaagggctttaacaaataatggtactaataaccatgataatggcatatactgacatttcccaaagtttgcaaaccataggtgtggttgagtttgtggtgagatgttttaagaacaaaaatatggggatgagacttctgagaaatattcccaaaatattttttaatggctgattatacacagacagtggtgtaactgacctccagaccagacattttgagtactggtttctgaagcaaaattagaagtgccagtcctcagtgtgctcaaacgcttttgtgttatcttgatttaatggaagagattattaaaatgctgctatcccaaactccaagtgagaaagatggaaaaatattttgtttctgatgctagtccatacactttccaagtcccacaaaactttcacaaaaatgtatataagctaaatattagaaacggataacaaacttgttttatttatagatgtaaaaaccaaacaagtcaatatgaaagcttttaatctcttaataccattaagcttccagtaagagcatcacataatgctctactgttccagaaaccaaatagtaaaacaaactaaagttcgcacatcagatcatctgaaaaaccttcaaaaataatcagttcagggatattatacaaaagtttgggttttttttttttaagagaataaaatggcttaggtcaactttcccttttcaggttattttcaacgtttttcaaatttagcacacaaaaaattgtaaatatctctcccacaaaataaggattttaaaaaagtaattcagtaatataacaggcttagatgtttgctgctcttagaattttttttaacttgtttttggtttcttcaaaagcaagcattcaattggaaacccatattctttccacacttttttttactgtcttttctgtatttcttgatagcagtatgctgttcccataagaaaaaaatggtatttgcaaatcatggaagaacagcctctgtattacattgagaaaataagatttatccatgaattggaagtagaacagcctgccttcaccctcttttactcaaccacccaacttaaaaggctcttggaaacacagcacactccacgctaccttctgcactgtgcccttagagcacagcttcctcagttgttctctgcatctcctggggcttaggccagtcttagcctgggttaaggctgctgacattgtgttccaatcagttgtcatgggcattatcccctctacatccacattaaacatgccggcttctcttgggcatcggcagagctgtgcctttttctttcagttacagttacataatcactgacgtccatgacacttacccatggatccatgtgctgacttcatttagaaggccaatctaaaacaactgggtttgtggctacctctttaaagttgtttgtgaaggataatttgttttttaatgcactttagtttgaaagtgagtctcttatgtaaggaccatccttaaaagaccaaaaatgccttgttagagtgttaaggagttttgacatgcagtggttccacaaacacagtggcttactatccttatacactgtcttataccatcattctctccatctctcttggtcactactctctgctgtcactggttaatcactaggtgccaagagcttactgaataaaagcttggcaattagaataaatggggagggaaggaccttatgaatagtccatttagcctaagaaatggcagatttagttcttctcttccaaaagataaaggtatatcctggaattgtacttaaaacttacagatgactaacaaatatatactttatatgtagttaatatttagatctgtcttatttaatacttggaggctagaagaagcatctttaggggaactatataatcttttgttagcattttctctgcattttaaaaaatcatttcaattcaaacatttatcagtgtcatgaaatcagtaatgactctttaacaattcaggtttgaactctgcattagatgtctctttaattttttaatatttaaaatttagttgacatttttttcaccaggtgcctttagcggttactaagataactgacatcagttgtttctctgaaataagtgttgctgtgggaataattttaatgttcaaggtgatatcatgggggagttttgtcttttaaaacattagaagcattttaaatattaagaatcaaatatttatagatcaaaacttgtgttttaagtattatacgggacctgtttacttatagtaaatgtgaatgtacacatgagttgttgctgaagctgacaagcatattacatacatgcattttccctgtgccctcatagttgcagttagagttccagtacctgtaggctcacctgggaggcagattagacccaaaggtagatgtttttcccctttccatgaagcatgtcagtgggagttgcttcctttgatttccctagtactaaattttaaggcttttgtaaaaacaaaacaaaactaggagcttggaacagttaaaaatcaacactgctaccatcaattcatcaaatatttacttagagctttcatacattaagattccagtaaccaataaattagaattcatttcttctgcataaagtaaattttcatacacttgacctactaagacagcaagggtgtcctaaattgaggcatttgtataatgcctgcataactaaatggtcactaaaatgggacagcatggggcaagaccttgtagttcttcacagaatatttgtggtcagtttctccaattaatttgctgcatgagccaaataaccataattcactttttatacccactggtgccataattagagaattagagggtgtagacagaggttaatgccaatgagaaacacaggacagggttttttttattataaaggtcattagatacaaaagattgtttttcaaaaaatttctaattctaacaaaggggatcaatcagaaatgaaactaagctactttctaaagtgacactgtatcagaataatccagatttgaatataacattttgccaccaactgacatttagatgaaggactgcctctctgaaagagttcagatcatattcaggggtgaatccaacaccatggaagaaagactactgatgaaaatattttcccactttgcacaaatctgtaaactacacctttgtttatagaaaaatgcttgtaatagtcactgtaatatttagctgtggataaaaatttgtggaaataaatacttttgaataaagaggtgtgccaaatctaaatgaaattt

SEQ ID NO: 36606 - DNA, 3111 bp, Artificial Sequence
  derived and/or modified sequence
aggtcctcatggagcacaaggccaccaccatccagaagcacgtgcggggctggatggcacgcaggcacttccagcggctgcgggatgcagccattgtcatccagtgtgccttccggatgctcaaggccaggcgggagctgaaggccctcaggattgaggcccgctcagcagagcatctgaaacgtctcaacgtgggcatggagaacaaggtggtccagctgcagcggaagatcgatgagcagaacaaagagttcaagacactttcagagcagttgtccgtgaccacctcaacatacaccatggaggtagagcggctgaagaaggagctggtgcactaccagcagagcccaggtgaggacaccagcctcaggctgcaggaggaggtggagagcctgcgcacagagctgcagagggcccactcggagcgcaagatcttggaggacgcccacagcagggagaaagatgagctgaggaagcgagttgcagacctggagcaagaaaatgctctcttgaaagatgagaaagaacagctcaacaaccaaatcctgtgccagtctaaagatgaatttgcccagaactctgtgaaggaaaatctcatgaagaaagaactggaggaggagcgatcccggtaccagaaccttgtgaaggaatattcacagttggagcagagatacgacaaccttcgggatgaaatgaccatcataaagcaaactccaggtcataggcggaacccatcaaaccaaagtagcttagaatctgactccaattacccctccatctccacatctgagatcggagacactgaggatgccctccagcaggtggaggaaattggcctggagaaggcagccatggacatgacggtcttcctgaagctgcagaagagagtacgggagctggagcaggagaggaaaaagctgcaagtgcagctggagaagagagaacagcaggacagcaagaaagtccaggcggaaccaccacagactgacatagatttggacccgaatgcagatctggcctacaatagtctgaagaggcaagagctggagtcagagaacaaaaagctgaagaatgacctgaatgagctgaggaaagccgtggccgaccaagccacgcagaataactccagccacggctccccagatagctacagcctcctgctgaaccagctcaagctggcccacgaggagctcgaggtgcgcaaggaggaggtgctcatcctcaggacccagatcgtgagcgccgaccagcggcgactcgccggcaggaacgcggagccgaacattaatgccagatcaagttggcctaacagtgaaaagcatgttgaccaggaggatgccattgaggcctatcacggggtctgccagacaaacaggctgctggaggctcagctgcaggcccagagcctggagcatgaggaggaggtggagcatctcaaggctcagctcgaggccctgaaggaggagatggacaaacagcagcagaccttctgccagacgctactgctctccccagaggcccaggtggaattcggcgttcagcaggaaatatcccggctgaccaacgagaatctggaccttaaagaactggtagaaaagctggaaaagaatgagaggaagctcaaaaagcaactgaagatttacatgaagaaagcccaggacctagaagctgcccaggcattggcccagagtgagaggaagcgccatgagctcaacaggcaggtcacggtccagcggaaagagaaggatttccagggcatgctggagtaccacaaagaggacgaggccctcctcatccggaacctggtgacagacttgaagccccagatgctgtcgggcacagtgccctgtctccccgcctacatcctctacatgtgcatccggcacgcggactacaccaacgacgatctcaaggtgcactccctgctgacctccaccatcaacggcattaagaaagtcctgaaaaagcacaatgatgactttgagatgacgtcattctggttatccaacacctgccgccttcttcactgtctgaagcagtacagcggggatgagggcttcatgactcagaacactgcaaagcagaatgaacactgtcttaagaattttgacctcaccgaataccgtcaggtgctgagtgacctttccattcagatctaccagcagctcattaaaattgccgagggcgtgttacagccgatgatagtttctgccatgttggaaaatgagagcattcagggtctatctggtgtgaagcccaccggctaccggaagcgctcctccagcatggcagatggggataactcatactgcctggaagctatcatccgccagatgaatgcctttcatacagtcatgtgtgaccagggcttggaccctgagatcatcctgcaggtattcaaacagctcttctacatgatcaacgcagtgactcttaacaacctgctcttgcggaaggacgtctgctcttggagcacaggcatgcaactcaggtacaatataagtcagcttgaggagtggcttcggggaagaaaccttcaccagagtggagcagttcagaccatggaacctctgatccaagcagcccagctcctgcaattaaagaagaaaacccaggaggacgcagaggctatctgctccctgtgtacctccctcagcacccagcagattgtcaaaattttaaacctttatactcccctgaatgaatttgaagaacgggtaacagtggcctttatacgaacaatccaggcacaactacaagagcggaatgaccctcagcaactgctattagatgccaagcacatgtttcctgttttgtttccatttaatccatcttctctaaccatggactcaatccacatcccagcgtgtctcaatctggaattcctcaatgaagtctgaagatgcatgtttccagcattagtttgattcccaatgtgagcaagaaggaagtatatacagtaaagtaaattcaaggatctgttaaatctggtaaaagtagatcaaatcagagattgacagcctgtggagggtgctgaactatacagaattagacacaactatgtcattattttttgtacctactgctcagaataaaaacacttgaaatatg

SEQ ID NO: 36607 - DNA, 2726 bp, Artificial Sequence
  derived and/or modified sequence
agccctacattctgctgctgctgcagagtgatgatttttaacagaccagaacttacacatctaaatgagtgttgttgttcagtgaagtcaccttaggacaatgatttaaataacaccgcgatttctcaagaagtttggaacttctcttatggttgagttcaaagccattttatgttatatgtggcccaaacaagttttattagtacaattaaatctttattgaggacttttgatggaccacatagtgaacttggactgggaatcaaaagaatggtaaggcagggtgtctgccttcactgtgcctgcagtctggctgagatgcacatgtgagccacactagcacaagccagcatgcactggcctgtcacaagagagtgcacaagggtctggatccctgaccctgatgaggtatggcgctcagctgagttaaccaaggactacaaagaaggagacaagagcctacagctcagactggaggatgaaacgattctggaatacccaattgatgtacaacgcaaccagctgcccttcttacggaatccagatatcttggtgggagaaaatgacctgactgcccttagctatcttcatgagcctgcagttttgcataatttgaaggtccgtttcctggagtccaaccatatctacacttactgtggtatcgtacttgttgccattaatccttatgaacagttgccaatctatggacaagatgtcatctatacctacagtggccaaaacatgggagacatggacccccacatctttgctgtggcagaagaagcctacaagcagatggccagagatgagaagaatcagtccatcatagtcagtggggagtctggagccgggaagacggtatcagccaagtatgccatgcgctatttcgccaccgttggtggctcggccagtgaaaccaacatcgaagagaaggtgctggcatccagtcccatcatggaggccattggaaatgccaagaccacccgcaatgacaacagcagccgttttggcaagtacatccagattggctttgacaaaaggtaccacatcatcggggccaacatgaggacttacctcttggagaagtccagagtggtcttccaggcagatgatgagaggaattaccacatcttttaccagctctgtgctgctgccggtcttccagaatttaaagagcttgcactaacaagtgcagaggactttttctatacatcacagggaggagacacttccatcgagggtgtggacgatgctgaggactttgagaagactcgacaagccttcacactcctcggagtgaaagagtcccatcagatgagcatttttaagataattgcttctatcttgcaccttggaagtgtggcgattcaggctgagcgtgatggtgattcctgtagtatatcaccccaggatgtatacctaagcaacttctgccgactgctaggggtggagcacagtcagatggagcactggctgtgtcatcgcaagctggtcaccacctcggagacctacgtcaagaccatgtccctgcagcaggtgatcaatgcgcgcaacgccctggcgaagcacatctatgcccagttgttcggctggattgtggagcacatcaacaaggccctgcacacctccctcaagcagcactccttcatcggggtcctggacatctatgggtttgagacatttgaggtaaacagctttgagcagttctgtatcaactatgcaaatgaaaagctccagcagcagttcaactcgcatgttttcaaactggagcaagaagaatacatgaaggaacagatcccttggaccctgattgatttttatgataaccaaccttgtatcgacctcattgaagccaagctgggtatcttggacctgttggatgaagaatgtaaggtccccaaaggaactgaccagaactgggctcagaagctctatgaccggcactccagcagccagcacttccagaagccccgcatgtccaacacggccttcatcatcgtccactttgcagacaaggtggagtacctctctgatggttttctggagaaaaacagagacacggtgtatgaagagcagatcaatatcctgaaggccagcaagttcccactagtggctgacttgtttcatgatgacaaggaccctgttcctgccaccacccctgggaaggggtcatcttcgaagatcagcgtccgttctgccagaccccccatgaaagtctccaacaaggagcacaagaaaaccgttggccaccagttccgtacctccctcagcacccagcagattgtcaaaattttaaacctttatactcccctgaatgaatttgaagaacgggtaacagtggcctttatacgaacaatccaggcacaactacaagagcggaatgaccctcagcaactgctattagatgccaagcacatgtttcctgttttgtttccatttaatccatcttctctaaccatggactcaatccacatcccagcgtgtctcaatctggaattcctcaatgaagtctgaagatgcatgtttccagcattagtttgattcccaatgtgagcaagaaggaagtatatacagtaaagtaaattcaaggatctgttaaatctggtaaaagtagatcaaatcagagattgacagcctgtggagggtgctgaactatacagaattagacacaactatgtcattattttttgtacctactgctcagaataaaaacacttgaaatatgg

SEQ ID NO: 36608 - DNA, 5547 bp, Artificial Sequence
  derived and/or modified sequence
atgagcgtgggcgagctgtacagccagtgcacccgggtgtggatccccgacccagacgaggtgtggcggtctgccgagctgaccaaggattacaaggagggagataagtcattgcaactgagactggaagatgagaccattctggagtatcctatagatgtccagcgcaaccaactcccatttctccgtaacccagatattctggtcggcgagaatgacctaactgctctgtcctatctgcatgagccggcagtactgcataatctcaaagttcggtttctggagtccaatcacatttacacctattgcggtatagtgcttgtggctattaatccatacgaacagttgcctatctatggccaggacgtcatctacacctactccggacagaatatgggtgacatggacccgcacatattcgccgtagcagaagaggcatacaaacaaatggctagggacgagaaaaatcagagcattatcgtgagcggagagagtggtgctggaaaaaccgtgagcgcaaaatacgccatgagatacttcgccaccgtgggcggcagtgctagcgaaaccaatatcgaggaaaaagtgctggccagttcacctatcatggaagcgatcggaaatgctaagaccacccgcaatgataacagctctcgctttgggaagtacattcagatcggctttgacaagagataccacataatcggcgctaacatgagaacttatctgctggagaagagcagggttgtctttcaagccgatgatgagcgaaattatcacattttctaccaactgtgcgctgctgctggcctccccgagtttaaggagttggcactgacttctgcagaagactttttctacacttcacagggcggggacacttcgatagagggtgtcgacgatgccgaagacttcgaaaagacccggcaggcttttacactgctgggtgtgaaagagagtcatcaaatgtccatattcaagatcatcgcatccattttacacctgggttctgtggcgattcaggcagagagggacggcgactcctgctccatttcgccacaagacgtatatctatcgaacttctgccgcttattgggggtggaacacagccagatggaacactggctgtgtcatagaaagcttgtgacgacctcagaaacatacgttaagacgatgtcattacagcaggtgattaacgcacgcaacgcgctcgcgaaacacatttacgctcagctgttcggttggatcgtggagcacatcaataaggcgctgcacacatctctgaaacagcactcgttcattggagtgctggacatctacggatttgagacgtttgaggttaactcatttgaacaattttgtatcaattacgccaacgaaaagcttcagcagcagttcaatagccacgtattcaaactggaacaggaggagtatatgaaggagcaaattccctggacactgattgacttctacgataaccagccatgcatcgaccttattgaagctaagcttgggattctagacttgttggacgaggaatgtaaagtgccaaagggaaccgaccaaaactgggcccagaagctttacgatcgacatagctctagtcagcattttcaaaagcctagaatgtcaaacaccgccttcataatagttcattttgcagataaggtggagtatctgtccgacggattccttgaaaagaatcgtgacacggtctacgaggagcagatcaacattctaaaggctagtaagtttcccctggtggctgatctctttcatgacgataaagatccggtgcctgcaactaccccaggaaaggggagttcttccaagatttctgtcagaagtgcacgtcctcccatgaaagtgtcaaataaggaacacaaaaagacggtgggccaccaatttcggacgagtctgcacctgctgatggagacactcaacgctaccacaccccactacgtccgctgtattaagccgaatgacgagaagctccctttccactttgatcccaaaagagccgtgcagcagcttcgcgcctgcggggttctggagacaatcaggatttccgccgccggttacccctccaggtgggcctaccacgactttttcaataggtatcgcgtcctggttaagaagagggaactggctaataccgacaaaaaggccatctgtcgctcagttcttgagaatctgatcaaggatccagacaaattccagtttggtcggacaaaaattttctttcgcgctggtcaggtggcctatcttgagaagttacgggcagacaagtttaggactgccaccatcatgattcagaagactgtaagaggatggctacaaaaggtcaagtatcaccggttaaaaggggcaaccctgacactgcaaaggtactgtcgagggcacctcgcacggcggttagccgagcacctgcgaagaattagagccgccgtagttctgcagaaacactaccgcatgcagcgagcgagacaagcttaccagcgtgtgaggagggctgctgtcgtcattcaggctttcactcgtgctatgtttgtgcgacggacctacaggcaggtactgatggagcacaaagccacaaccattcaaaagcacgtccggggctggatggcccgtcgccattttcagcgcctgcgcgatgctgccatcgttatccaatgtgcctttcgcatgctgaaggcccgcagagaactcaaagcactgagaatcgaagcgcggagcgctgagcatctaaaacgcctgaacgtcgggatggaaaataaggtggtccagctccaacgcaagattgacgagcagaataaagagtttaagactctctctgagcaattatcagttacaacctctacatacaccatggaagttgagcgattgaaaaaggagctcgtgcattaccaacagagccccggagaggataccagtttaaggctacaagaagaagttgagtccttaagaacggaactgcagcgagcccactctgagagaaagattctcgaggatgcgcatagtcgggagaaggacgagcttagaaagcgtgtagcagaccttgagcaggagaatgctctcctcaaggacgaaaaggagcagctgaataaccagatcctctgccagtcgaaggacgagtttgctcagaacagcgtgaaggaaaatctcatgaaaaaggagctcgaagaggaaaggtctcggtaccaaaatttggtgaaggaatattcgcaactggagcagcgctatgataacctccgtgacgaaatgaccattattaaacagacacccggccatcgaaggaatccttccaaccagagtagtttagagtccgattcaaactacccatccatatcaacaagcgagatcggggatacagaagatgcactgcaacaagtggaggagatcggacttgaaaaagcagccatggacatgactgtgtttctgaaactgcagaagagagtcagggaactggaacaggagcgcaagaaactccaggtgcaattggagaagagggagcagcaagattcaaagaaagtgcaagcagagccaccacagaccgacatagatctggatcctaatgcagatctggcctataactctctgaaaagacaggagctggaatctgaaaataaaaagctgaaaaacgatctgaacgagctgcggaaggctgtcgcggatcaagccacgcagaacaacagtagtcatggaagtcccgatagttattcccttctcctcaaccagttaaaacttgcacacgaggaactggaggtgcgcaaagaagaagtgttgatactcagaactcagattgtcagcgcagatcagcgaaggttggcggggcgtaatgccgagcctaacataaacgcgcggtcgagctggcccaattctgagaaacacgtcgaccaggaggacgctatagaggcttatcacggtgtgtgccagactaattccaagacagaggattgggggtacctgaatgaagacggtgagcttggactggcctaccagggcctcaagcaagttgccaggcttctcgaggcacagcttcaagcacaatctcttgagcatgaggaagaggttgagcaccttaaggcccagcttgaggctcttaaagaagagatggacaagcaacagcaaactttctgtcagacattgcttctcagtccagaggcccaagttgaattcggagtgcagcaagagatcagtcggctgacaaacgagaatctggacctgaaagagctggtggagaagctggagaaaaacgaacggaagctgaaaaaacagctcaaaatttatatgaaaaaggcccaagacctggaagcagcccaggcgctggctcagagtgagcggaaacggcacgagctgaatagacaggtgactgtccagcgtaaggagaaagattttcaggggatgctagagtaccacaaggaggacgaagccctacttatacggaaccttgtgacagatctcaagccccaaatgctgtccggcacggtgccatgccttccagcctatatcctttatatgtgcataaggcacgcagattacactaatgacgatctgaaggtgcacagcctgctcacttctactatcaacggcataaaaaaggttcttaaaaagcacaatgacgactttgaaatgacctccttttggctgagtaacacctgtaggttgctccactgtctgaagcagtactccggagacgagggttttatgacccagaacactgctaagcaaaacgaacactgcctgaaaaacttcgacctgacagagtatagacaggttctgagtgacctgagcattcagatttaccagcaactcatcaagattgctgaaggtgtcctgcagcctatgattgttagtgcgatgttggaaaacgaatcaatccagggactgtccggcgtgaagcctacagggtatcggaaacgctccagcagtatggctgatggagacaattcttactgcctggaagcgattatccgacagatgaatgctttccatacggttatgtgtgaccagggtttggaccctgagatcattctccaagtgttcaaacagctcttttacatgattaatgccgtcaccctcaacaatctgttgctgagaaaggacgtctgcagctggtccaccggaatgcagctgagatacaatattagccaactcgaagagtggttgcgtggccgaaatttgcatcagtcgggtgccgtacagaccatggaaccgctcattcaggccgctcagctgctgcagttaaagaagaagacccaagaagacgccgaagccatatgctccctctgcacgagtttgagtacacagcaaattgtgaagattctgaacctgtacaccccactcaatgaattcgaagagcgtgtgacagttgctttcatccgaacgattcaggcccaactccaggaacggaatgatccacagcagctgctgttggacgccaagcatatgttccctgtgctgtttccctttaacccgtcttccttaaccatggatagcatacatattcctgcatgtttaaatctggagtttcttaatgaggtatag

SEQ ID NO: 36609 - DNA, 2892 bp, Artificial Sequence
  derived and/or modified sequence
atggagcacaaggccaccaccatccagaagcacgtgcggggctggatggcgcggaggcactttcagagactccgggacgccgctatcgtcattcagtgcgcgtttcggatgcttaaggcccggagggagctgaaggcgctgaggatcgaagcccgctctgctgagcatctcaagagacttaacgtgggtatggaaaacaaagtggtccagctgcagcgcaaaatcgacgagcaaaacaaagaatttaagacactgtccgaacaactgtctgtaacaaccagcacctacacaatggaggtggaacgattgaagaaggagcttgtgcactatcagcagtctccaggagaggatacatcacttagattacaggaagaggtcgagtctctgcgcacagagcttcagcgggcccactccgagcgcaagatcctggaagatgcccactcacgtgaaaaagatgagctgcgaaagcgagtggccgaccttgaacaagagaacgccctcttaaaggatgagaaagagcaactgaataatcagatcctgtgccagtccaaagatgaattcgcacaaaatagcgttaaggagaatctgatgaagaaggagctggaggaagaacggtcaagatatcagaatctggtgaaagaatacagccaacttgagcagcgatacgataacttgcgggatgagatgactatcataaagcagacaccaggccataggagaaatccctctaaccagagctcccttgaaagcgattcaaattacccaagcatctcaacatcagaaatcggtgatactgaagacgccctgcagcaggtagaggagattgggctggagaaggcagccatggatatgacagtgttcttaaagttgcagaagcgggtcagggagctggagcaggagaggaagaagctccaggtgcaactagaaaaaagagaacagcaggactcgaagaaagtgcaagccgaacctccccagaccgacattgacctcgacccaaacgccgacctcgcctataacagcttgaagaggcaggaactggagtccgagaacaagaagttaaaaaacgacctgaacgagctgaggaaagccgtcgccgatcaggcaacccagaacaactcttcccatggtagcccggacagttacagtttactactgaaccagcttaaattagcccatgaagagctcgaagttagaaaagaagaagtgctcatcctgcgtacccagattgtcagcgcagaccagcgaaggctggccggcagaaacgccgagcctaacatcaatgctcgcagtagctggcccaactcagaaaagcatgttgatcaggaggatgccattgaagcataccacggagtgtgtcagacaaacagactgcttgaggcacagcttcaagcccagtcactcgagcatgaagaggaagtggaacaccttaaagcgcagctggaggccctaaaagaagaaatggacaagcagcagcaaacattctgtcagacactgctcctcagcccagaagcccaggtagaatttggcgtgcagcaagagatctccagactgacaaacgaaaacctggatttgaaggaattggtggaaaaactagagaaaaacgaacgaaagctgaagaaacagctgaaaatttatatgaagaaagcccaagacctggaagctgctcaggccctcgcacagtccgaaagaaagaggcacgaactgaaccgtcaagtgaccgtacagcgcaaggaaaaagactttcagggaatgctagagtaccacaaggaggatgaagcgcttttaattcgtaacctcgttactgacctcaagcctcagatgcttagtgggacagtgccatgcttgcctgcgtacattctctacatgtgcatccggcacgccgactacactaacgacgatcttaaggtccatagtcttctgacaagtactattaacggaatcaagaaggtcctgaaaaagcacaatgacgatttcgaaatgactagcttctggctgagtaacacgtgcagactgttgcactgtctgaaacaatactccggcgatgaaggctttatgacacaaaacacggcaaagcagaatgaacattgtctcaagaacttcgatttgacggaatataggcaggtgctgtctgatctgagcattcagatatatcagcagctgatcaaaatcgctgagggggtactgcagcccatgatcgtgagcgctatgctggagaacgagagtatacaaggcctgtctggggtcaagccaacaggctaccgcaaaagaagcagcagcatggcagacggtgacaactcttattgtctcgaagctatcattaggcagatgaacgccttccataccgtgatgtgcgaccagggtctcgacccagaaatcattcttcaagtgttcaagcagttgttttacatgatcaacgcagtgactttaaataatttgttactgaggaaggacgtctgttcttggagtactggaatgcagctgcgttataacatatctcagcttgaggagtggctgcgcggccgcaacctacatcagagcggcgccgttcagacgatggaacccctaattcaggcagcgcagctcttgcaactgaaaaaaaagacccaggaggacgcagaagccatctgtagcctgtgcacctctctcagtacgcagcagatcgttaagattctgaatctctatacaccactcaatgagtttgaggagcgagtcaccgtcgctttcattagaaccattcaagcccaattgcaggagcgaaatgacccacagcaattgctgttggatgctaaacacatgttcccagtgctctttccattcaacccaagttctctgaccatggatagtattcacatccccgcctgcttgaaccttgaattcctgaatgaggtctag

SEQ ID NO: 36610 - DNA, 2163 bp, Artificial Sequence
  derived and/or modified sequence
atgcactggcccgtgacccgggagtgcacccgggtgtggatccccgacccagatgaagtgtggcggtccgctgagttgaccaaggactataaagaaggcgataagtcactccagttgcgtctggaggacgaaacaatactagagtatccaattgatgtccaaaggaatcagttgcctttcctccgtaatcctgatatactcgtgggggagaacgatcttactgcactcagttatctgcatgaacccgcagtgctgcacaatctaaaggtgcggttcctagagagcaatcatatctatacctattgcggaatcgtcctcgtggctataaatccgtacgaacagcttcctatctatggacaagatgtgatttatacgtacagtgggcagaatatgggagatatggatccccatattttcgccgttgctgaggaggcgtacaagcagatggctagagacgagaagaaccagagtattatcgttagtggagaatccggtgccggcaaaactgtgtctgccaagtacgccatgaggtattttgcgactgtggggggatccgccagcgagacgaacatagaagagaaagtactggctagtagcccgattatggaagccatcggcaatgcaaagaccactcgtaatgacaacagtagtcgatttgggaagtatatccagatcggcttcgataaaaggtaccatattatcggggcaaacatgagaacctaccttctcgagaaaagtcgggtggtcttccaagccgatgatgaaagaaactaccacatattctatcaactctgtgctgctgctgggctgcccgaattcaaagaactggctctgactagcgctgaggattttttctacacctctcagggcggagatacttccattgaaggggtcgacgatgccgaggactttgaaaagacaagacaggcattcacacttctgggagtgaaggagagccaccaaatgtccatttttaagataatcgcctccattctccatttaggctctgtggccattcaagctgagcgtgacggggactcctgctccatcagcccccaggatgtgtacctctccaatttctgccggctcctgggtgtagagcactcacagatggagcattggctgtgccaccgcaagctggttaccacatccgagacttacgtgaagaccatgagcctgcaacaggtgattaacgctaggaacgctctcgcgaagcatatctacgcacagttgttcggctggatcgtagagcacattaacaaagccctgcatacatcactgaagcaacattctttcattggagtactggacatttacggctttgaaacttttgaggtgaattctttcgaacagttctgtattaattacgccaacgagaagttgcaacagcagtttaattctcatgtgttcaaactcgaacaggaggagtatatgaaggaacagataccatggaccttgatcgatttctacgataaccagccatgtatagaccttatcgaggccaaactcggaatcctcgatctgctagatgaggagtgcaaggttcccaagggaaccgatcagaattgggcccagaagctatacgacagacatagctcctcacagcactttcagaagccacgcatgtctaatacggcttttataattgtgcacttcgccgataaggtggaatatttgtccgatgggttcctcgagaagaatcgtgatacagtgtatgaggagcagatcaacatcttgaaggcatctaagttccctctggtggccgacctatttcacgacgacaaagacccggtgcctgccactacaccggggaagggatcaagttccaaaatatccgtcagatctgcacgacccccaatgaaggtgagcaataaggaacataagaagacagtcggtcaccagtttcggacatctctcagcactcaacaaattgtaaaaattttgaacctatacacacctctgaatgagttcgaagagcgcgttaccgtagccttcataaggactatacaggcacagttacaggaacggaatgacccccagcagctgctcctggacgctaaacacatgttccctgtcctcttcccattcaacccatcatctcttactatggatagcatacatattcctgcctgtctgaacttagagttcctcaatgaagtatag

SEQ ID NO: 36611 - DNA, 5547 bp, Artificial Sequence
  derived and/or modified sequence
atgtctgtaggggagctgtacagccagtgcaccagggtctggatccctgacccggacgaagtgtggcgcagcgccgagcttacaaaagactataaggagggcgataagagcctccagctgcgcttggaggacgagacgatccttgaataccccatcgacgtacaacgaaatcagctcccgttccttagaaacccagatattctcgtcggggagaacgacctgaccgctctaagctatctccatgaacccgctgtcctgcataatctgaaggtcaggttcttagaatcaaatcacatttacacctattgtgggattgtcttagtcgccataaacccctatgaacaattgccgatatatggacaagatgtcatttacacgtacagtggacagaatatgggcgatatggaccctcacatatttgccgttgccgaagaagcatataaacagatggctcgcgacgagaaaaaccaatccatcattgtgtccggagagagtggcgctggcaagacagtgagcgccaaatacgctatgcgctatttcgctacagtgggtgggtccgcctctgagactaacattgaagagaaggtgctggcttcaagtcccatcatggaggccattgggaatgccaaaacaacccggaacgataattcatcaagattcggtaaatatattcagatagggtttgacaaacgctatcacatcattggcgctaatatgaggacctacttgctcgagaaaagtagggtggttttccaggcggatgatgagcggaattatcatattttctaccagctgtgcgctgccgctggcctgccagaattcaaagagctcgctttaacgtcagccgaggactttttttatacaagccagggaggcgatacaagtatagagggggttgatgacgccgaggactttgaaaaaacaaggcaagccttcacgcttttgggcgtgaaggagtctcaccagatgtcaatatttaagattatcgcctctatcctccatctgggcagcgtggccatccaggcagagcgtgacggagattcatgttcgatatctcctcaggacgtctacctgtctaacttctgcaggctgttgggtgtggagcacagtcaaatggagcactggctttgccatcgcaagctcgtaaccacttcagagacctacgtcaaaacaatgagcctgcaacaggtcatcaacgcacgcaacgctctggccaaacacatttacgctcagttgtttggctggattgttgaacacatcaataaagccctgcacaccagcttgaagcagcattccttcatcggggttctggatatatatggtttcgaaacctttgaagtcaatagtttcgagcagttctgtatcaattacgcgaacgagaagctgcagcagcagttcaatagccacgtgtttaagctcgaacaggaggagtacatgaaagagcagattccctggacactcatagacttttatgacaaccaaccatgtatagatttaattgaagcaaagctgggaatcctagacttattagacgaggaatgcaaggtgccgaaagggaccgaccagaactgggctcaaaagttgtatgatagacattcttcttcacagcacttccaaaagccacgcatgtcaaatacagcctttattatcgtgcatttcgccgacaaggtggagtacttgtccgacgggtttctggaaaagaaccgcgacacggtgtacgaggaacagatcaacattctaaaggcatccaaatttccgctggttgctgatctattccatgacgacaaggacccggtgcctgcaactaccccaggaaagggttcaagctcaaaaatatctgtgcggtctgcacgcccacccatgaaagtatccaataaggagcacaagaagaccgttggccaccagtttcgcacatccctgcatttgttgatggagacactgaacgctactacacctcactatgtacgctgcatcaaaccgaatgatgaaaagcttccctttcactttgaccccaagagggcagtgcagcagctgcgcgcttgcggagtgctcgagaccatccgaatttcagccgctggatatccctctcgatgggcctatcatgatttcttcaataggtatcgcgtgttagtcaagaagcgggaactggccaacaccgacaaaaaggcaatttgccgcagcgtcctcgagaatctgatcaaggaccctgacaagtttcagtttggacgaaccaagattttcttcagggccggacaagtggcttaccttgagaagcttagggctgacaagtttaggacagcaactattatgattcagaagaccgtgagaggctggttgcagaaggtcaaatatcatcggttgaagggagctactctaactctgcagcgctattgtcggggtcatcttgcgagacgactggctgagcatctgaggcgaatccgtgctgccgtggtgctgcagaagcactaccgcatgcagcgcgcacgacaggcttatcagcgggtgcgtcgagctgcagtcgttatacaggctttcactcgggctatgtttgtgcggagaacgtaccgacaggtgctcatggagcacaaagctacaaccattcaaaagcacgttcgaggctggatggctagacgacacttccagcgtctccgcgacgccgcaatcgttatccagtgcgcctttcgcatgttgaaggccagacgtgaactcaaggcacttcgtattgaggcaaggagtgccgaacacctgaaacgtctcaacgttgggatggaaaataaagtagtccagttacagaggaaaattgatgagcagaataaagaatttaaaacactcagtgagcagctcagcgtcaccaccagcacgtacacaatggaggtagaacgccttaagaaagagctggtccattatcagcagtccccaggcgaagacaccagtctgcggttgcaggaagaggtagaatctctccgaaccgagctccagagagcgcactccgaacggaaaatactcgaggacgcgcattcgagagagaaagacgaactccgcaaacgggtcgccgacctagagcaggagaacgctttgctaaaagacgaaaaggaacagctcaataatcagatactatgccagagcaaggacgagttcgctcagaactcggtgaaggagaacctcatgaaaaaggagctggaggaggagcggtcccggtaccagaatctggtgaaagagtacagccagctggagcaacgctatgataaccttcgcgacgaaatgactataatcaagcagacaccaggccatcgacgtaaccctagtaaccagtcatcactggaatccgacagtaactatccaagcatcagtactagtgaaatcggagatactgaagacgcgcttcagcaggttgaggagattgggcttgaaaaagccgctatggatatgacggtctttctgaaactccagaagagagtgagagaactggaacaggaaagaaagaaactgcaggtccagttagaaaagcgcgagcagcaggactccaaaaaggttcaggcagagccccctcagacagatattgacctagatcccaatgctgacctggcctacaactcactcaaacgccaggagctcgagtccgaaaataaaaaactaaagaacgacctcaatgagcttcgtaaagcggtggcggatcaagctacccaaaacaattcatcccacggaagccccgatagctactcactgctgttgaatcaactgaagcttgctcacgaagagctggaggtcaggaaagaggaggtgttgatcttgagaacgcagatcgtcagcgccgatcaaagacgccttgccggaaggaacgctgagccaaacattaatgcgagaagcagctggcccaattctgaaaaacatgtggaccaggaggacgcaatcgaggcttatcacggcgtttgtcaaactaattcgaaaacagaagactggggctacctgaacgaggacggcgagctgggcctcgcttaccaaggcctgaagcaggtggcccgactcctcgaagctcagctgcaggcacagagtctggagcacgaggaggaggtagaacacctgaaggcacagctggaagcacttaaagaggaaatggacaaacagcaacagacgttctgtcagaccctcttgttatctcccgaagcccaagtggagttcggagtgcagcaagaaattagtcgcctcacaaatgagaatctggacctcaaggagttggtggagaaactggagaagaacgagcggaaattgaaaaaacagcttaaaatatatatgaaaaaagctcaagacctggaagccgcacaggcgcttgcccaaagcgagagaaagcgccatgagcttaatcgtcaggtgactgtccagcggaaggagaaagactttcaggggatgctcgagtaccacaaagaggacgaagccttgctgattcggaacctggtgacggatttgaagccccagatgctctcaggcacggtgccttgcctccctgcgtacatcctgtacatgtgtattaggcatgcagattatacaaatgacgatctcaaagtgcactcactgctgacctccacaattaatgggatcaaaaaggtgctcaagaaacacaatgacgatttcgagatgaccagcttctggctgtccaacacgtgtaggctgctgcactgcttgaagcagtacagcggcgacgagggatttatgactcagaatacggccaaacagaatgagcactgcctgaaaaatttcgacctgaccgaataccgccaggtgctctcggatctgagcatacagatttaccagcaactcataaaaatagccgaaggcgtgctccaacccatgattgtctccgcgatgctggagaatgagtctattcagggattgagtggcgttaagcctacaggctacagaaaacgctccagttcgatggctgacggggataacagttactgcctggaagcgatcattagacagatgaatgcctttcacacagtgatgtgtgatcagggcctagatcctgaaatcatactgcaagtgttcaagcaattgttctacatgatcaatgcagttaccctcaataacctgctattacgcaaggatgtatgtagttggagcactggaatgcaactgcgatacaatattagccagctggaggaatggttgcggggacgtaatcttcatcaatccggcgctgtgcagaccatggaaccactcatacaggcagcccaattgcttcagctgaagaaaaagacgcaggaggacgcggaagcaatctgctctctgtgcacttctctttcaacccagcagatagtgaagatcctgaacctgtacacgcctctcaatgagtttgaggagagggtaactgtggcattcattcgcacaatacaggcgcagctgcaggaacgtaatgaccctcagcagttgctgctagatgccaagcacatgttcccggtcttgttcccatttaaccccagttccctgaccatggattcaatccacatccccgcttgccttaacctggagtttctgaacgaggtgtac

SEQ ID NO: 36612 - DNA, 2892 bp, Artificial Sequence
  derived and/or modified sequence
atggaacacaaggctaccacgattcaaaagcacgttcgagggtggatggcaagacggcattttcagcgtctccgggacgccgcaatagtgatccagtgtgctttccgaatgttgaaggcgaggcgggaacttaaggctctccgcatcgaggctaggagcgcagaacatctcaagcgcctgaacgtcggcatggagaacaaagtggtgcaactgcagaggaagattgacgaacaaaacaaagaatttaagaccttgtctgagcaattgtctgttacgactagcacctacacaatggaggttgagagactcaaaaaggagcttgtgcattatcagcagagtcctggtgaagatacctccctaagactgcaagaggaagtagagtctcttagaacagagctgcagagagcacactccgagaggaagatcctggaagatgcacatagcagagagaaagatgaacttcgtaagcgcgttgctgatctggagcaggagaacgctctgctgaaggacgagaaggagcagctaaataaccaaatcctatgccaatccaaggatgagttcgctcagaactcagttaaagagaatctgatgaagaaggagttggaggaggagcggtcgaggtatcagaatctcgtgaaggagtactcacagctggaacagaggtatgacaacttaagggacgagatgaccataataaagcagacgccgggtcacaggcgcaaccccagcaaccagtctagcttggagtccgattccaattacccgtctatctccacttccgagattggagacaccgaggacgcactccagcaggttgaggaaattggtttggagaaagcggctatggacatgactgtctttctgaaactccaaaagcgtgtccgagagcttgagcaggaacgaaaaaagctgcaggtacagttggaaaagcgcgaacagcaagactctaaaaaagttcaggcggagccccctcagactgatatcgatctagacccaaacgcagatttggcctacaattcccttaagcgccaggaattagaatccgagaataaaaagcttaagaacgatctaaacgaactgagaaaagcggttgcagatcaggctacacagaacaactcatctcatgggtcacctgactcttacagtctccttcttaaccaactgaagctcgcccacgaagaattggaggtccggaaagaagaagtgctgattctcagaactcaaattgtatccgccgaccagcggcgacttgcagggaggaacgctgagccgaatatcaatgcacgctcctcttggcctaacagcgagaaacacgtagatcaggaggatgccattgaggcgtatcacggtgtctgtcagactaatagactgttggaagcgcagttgcaggcccagagtctagagcacgaggaggaagttgaacatttgaaggcccagctcgaggcccttaaggaggaaatggacaagcaacagcagacgttttgccagaccttactgctgtctcccgaggcccaggttgagtttggagtacagcaggagatttcacggctgacaaacgaaaacctagacctgaaggagctggtcgagaagctggaaaagaatgagagaaaactgaaaaaacaactgaaaatctatatgaagaaagctcaggaccttgaggccgcacaggcgttggcccagagcgaaaggaagcggcatgagctaaatcggcaagtaactgtgcagaggaaagagaaagatttccagggcatgcttgagtatcataaggaggacgaggcacttctgatacgaaatctggtgacggatctgaagcctcagatgctttctggtacggtcccctgccttcccgcttacatactttatatgtgcataaggcacgctgactacaccaacgacgacctaaaggtacactctctcctcacctcaactataaacggtatcaagaaagtactcaagaaacacaacgatgacttcgagatgacgagcttttggctgtctaacacttgtcgacttctgcactgcctgaaacagtattctggtgatgaaggttttatgacccagaatacagcaaagcagaatgagcactgcttaaaaaacttcgatttgaccgaataccgccaggtgctctctgacctgtctattcaaatttatcagcagctcatcaagattgcagaaggcgtacttcagccaatgatagtgtcagctatgctcgagaatgaaagcatacaggggctgtccggagtcaaaccaacggggtatcggaaaaggtccagtagcatggctgatggcgacaactcctactgtctggaagcaataatccggcagatgaacgcatttcacacggtcatgtgcgaccaaggcctcgatcctgagattattctgcaggttttcaagcagctgttttacatgatcaatgccgtgactttgaataatttgctgttacgcaaggacgtatgcagttggtctactggcatgcagttgagatataatatctctcagctggaggagtggctgagagggagaaatttgcatcagtcaggggcagtacagacaatggagccattaattcaggcagcacagctccttcagcttaaaaagaaaactcaggaggacgctgaggcaatttgctctctgtgcacctcactttctacccagcaaatcgtcaaaatccttaatctatacacacccctaaacgaattcgaggagcgcgttaccgtagcgtttatccggacgatccaggctcagttgcaagaacggaacgatccccagcagctgctccttgacgctaaacacatgttcccagtactgttcccctttaatccatctagcctcacgatggacagtattcacattccagcgtgtcttaacctggagtttctgaacgaagtgtag

SEQ ID NO: 36613 - DNA, 2163 bp, Artificial Sequence
  derived and/or modified sequence
atgcactggcctgtgacccgggagtgtaccagggtatggattcctgatcccgatgaagtgtggagatccgcagaattgacaaaagattacaaagagggcgataaatcattacagctgcgtctggaggatgagacgatcctcgagtaccccatcgatgtgcagcgaaatcagttgccgttcctgcggaatcccgacatactcgtgggcgaaaatgacctgaccgcattaagctatcttcacgaacctgccgttcttcacaacctcaaggtcaggttcctggagtctaatcacatttacacatattgtggcatcgttctggtggcgatcaacccctatgagcaactccccatttacggccaggatgttatctacacatattccggacagaatatgggtgacatggaccctcatatctttgcagtagcagaagaggcatacaagcaaatggcaagagatgagaaaaatcaatcaattattgtgtctggcgaaagtggtgcgggtaagaccgtgagcgcgaagtacgccatgagatactttgcgaccgtcggaggctccgcatccgagacgaatattgaagaaaaagttctcgccagttcgcccatcatggaggcaataggcaatgccaaaaccacccggaacgataatagttccagatttggtaaatacatccagattggattcgataaaagataccacataatcggggctaatatgaggacgtatttacttgaaaaatcccgtgtcgtattccaagccgatgatgagcgcaactaccacatattttaccagctgtgcgccgcagccggactgcccgaattcaaggagctggcattgaccagcgccgaggatttcttctatacctctcaaggcggtgatacgtcaattgagggggtcgacgatgcggaagactttgagaagacacgacaggcattcacactgttaggggtcaaggagtcacatcaaatgtctattttcaagatcatcgcgtccatccttcaccttggaagtgtggcaatccaggctgaacgggacggagatagctgttccatttctccgcaggacgtctatttgtctaatttctgccggctgctgggcgtcgaacacagtcagatggaacattggctgtgccatagaaagttggtcaccacgtcggaaacttacgtaaagacgatgagtctccaacaggtgatcaatgcacggaatgccctcgcaaagcacatctatgcccagctattcggttggatcgtggaacacatcaacaaggcccttcacacatccctgaagcaacacagctttattggtgtgctcgatatctacggcttcgagacgtttgaggtgaactcatttgaacagttttgtataaactacgcaaatgagaagctacagcagcagttcaactcccacgtgttcaaattggaacaggaggagtacatgaaagagcagatcccctggacactgattgatttttatgataaccagccttgcattgaccttattgaagccaagttgggcatcctggacttgctagacgaagagtgcaaagtcccaaaaggaaccgatcagaattgggcacagaagctgtatgaccggcatagttcgtctcagcattttcagaagcccaggatgagcaatacagcattcatcattgtgcatttcgccgataaagtcgagtatcttagcgacgggtttttggagaagaaccgggataccgtgtacgaagagcagattaacatccttaaagcgagcaaattcccactcgttgcagatctcttccacgatgacaaggacccagtgccagccaccacaccaggcaaggggagctcctccaagatctccgtcaggagcgcgagacctcccatgaaggtctccaataaagagcataaaaaaacagttgggcatcagttccgtaccagccttagtacacagcaaattgtgaaaatcttgaatctgtacacgcccttgaacgagttcgaagaaagggttacggtggccttcattaggactatccaggctcagttacaggaacgcaatgatccacagcagctcctccttgacgcaaagcatatgtttcccgtgttattccccttcaatccctcctccttgacaatggactcaatccacattcccgcatgccttaacctcgaattccttaatgaagtgtag

SEQ ID NO: 36614 - DNA, 5547 bp, Artificial Sequence
  derived and/or modified sequence
atgagcgtgggcgagctgtacagccagtgcaccagagtgtggatccccgaccccgacgaggtgtggagaagcgccgagctgaccaaggactacaaggagggcgacaagagcctgcagctgagactggaggacgagaccatcctggagtaccccatcgacgtgcagagaaaccagctgcccttcctgagaaaccccgacatcctggtgggcgagaacgacctgaccgccctgagctacctgcacgagcccgccgtgctgcacaacctgaaggtgagattcctggagagcaaccacatctacacctactgcggcatcgtgctggtggccatcaacccctacgagcagctgcccatctacggccaggacgtgatctacacctacagcggccagaacatgggcgacatggacccccacatcttcgccgtggccgaggaggcctacaagcagatggccagagacgagaagaaccagagcatcatcgtgagcggcgagagcggcgccggcaagaccgtgagcgccaagtacgccatgagatacttcgccaccgtgggcggcagcgccagcgagaccaacatcgaggagaaggtgctggccagcagccccatcatggaggccatcggcaacgccaagaccaccagaaacgacaacagcagcagattcggcaagtacatccagatcggcttcgacaagagataccacatcatcggcgccaacatgagaacctacctgctggagaagagcagagtggtgttccaggccgacgacgagagaaactaccacatcttctaccagctgtgcgccgccgccggcctgcccgagttcaaggagctggccctgaccagcgccgaggacttcttctacaccagccagggcggcgacaccagcatcgagggcgtggacgacgccgaggacttcgagaagaccagacaggccttcaccctgctgggcgtgaaggagagccaccagatgagcatcttcaagatcatcgccagcatcctgcacctgggcagcgtggccatccaggccgagagagacggcgacagctgcagcatcagcccccaggacgtgtacctgagcaacttctgcagactgctgggcgtggagcacagccagatggagcactggctgtgccacagaaagctggtgaccaccagcgagacctacgtgaagaccatgagcctgcagcaggtgatcaacgccagaaacgccctggccaagcacatctacgcccagctgttcggctggatcgtggagcacatcaacaaggccctgcacaccagcctgaagcagcacagcttcatcggcgtgctggacatctacggcttcgagaccttcgaggtgaacagcttcgagcagttctgcatcaactacgccaacgagaagctgcagcagcagttcaacagccacgtgttcaagctggagcaggaggagtacatgaaggagcagatcccctggaccctgatcgacttctacgacaaccagccctgcatcgacctgatcgaggccaagctgggcatcctggacctgctggacgaggagtgcaaggtgcccaagggcaccgaccagaactgggcccagaagctgtacgacagacacagcagcagccagcacttccagaagcccagaatgagcaacaccgccttcatcatcgtgcacttcgccgacaaggtggagtacctgagcgacggcttcctggagaagaacagagacaccgtgtacgaggagcagatcaacatcctgaaggccagcaagttccccctggtggccgacctgttccacgacgacaaggaccccgtgcccgccaccacccccggcaagggcagcagcagcaagatcagcgtgagaagcgccagaccccccatgaaggtgagcaacaaggagcacaagaagaccgtgggccaccagttcagaaccagcctgcacctgctgatggagaccctgaacgccaccaccccccactacgtgagatgcatcaagcccaacgacgagaagctgcccttccacttcgaccccaagagagccgtgcagcagctgagagcctgcggcgtgctggagaccatcagaatcagcgccgccggctaccccagcagatgggcctaccacgacttcttcaacagatacagagtgctggtgaagaagagagagctggccaacaccgacaagaaggccatctgcagaagcgtgctggagaacctgatcaaggaccccgacaagttccagttcggcagaaccaagatcttcttcagagccggccaggtggcctacctggagaagctgagagccgacaagttcagaaccgccaccatcatgatccagaagaccgtgagaggctggctgcagaaggtgaagtaccacagactgaagggcgccaccctgaccctgcagagatactgcagaggccacctggccagaagactggccgagcacctgagaagaatcagagccgccgtggtgctgcagaagcactacagaatgcagagagccagacaggcctaccagagagtgagaagagccgccgtggtgatccaggccttcaccagagccatgttcgtgagaagaacctacagacaggtgctgatggagcacaaggccaccaccatccagaagcacgtgagaggctggatggccagaagacacttccagagactgagagacgccgccatcgtgatccagtgcgccttcagaatgctgaaggccagaagagagctgaaggccctgagaatcgaggccagaagcgccgagcacctgaagagactgaacgtgggcatggagaacaaggtggtgcagctgcagagaaagatcgacgagcagaacaaggagttcaagaccctgagcgagcagctgagcgtgaccaccagcacctacaccatggaggtggagagactgaagaaggagctggtgcactaccagcagagccccggcgaggacaccagcctgagactgcaggaggaggtggagagcctgagaaccgagctgcagagagcccacagcgagagaaagatcctggaggacgcccacagcagagagaaggacgagctgagaaagagagtggccgacctggagcaggagaacgccctgctgaaggacgagaaggagcagctgaacaaccagatcctgtgccagagcaaggacgagttcgcccagaacagcgtgaaggagaacctgatgaagaaggagctggaggaggagagaagcagataccagaacctggtgaaggagtacagccagctggagcagagatacgacaacctgagagacgagatgaccatcatcaagcagacccccggccacagaagaaaccccagcaaccagagcagcctggagagcgacagcaactaccccagcatcagcaccagcgagatcggcgacaccgaggacgccctgcagcaggtggaggagatcggcctggagaaggccgccatggacatgaccgtgttcctgaagctgcagaagagagtgagagagctggagcaggagagaaagaagctgcaggtgcagctggagaagagagagcagcaggacagcaagaaggtgcaggccgagcccccccagaccgacatcgacctggaccccaacgccgacctggcctacaacagcctgaagagacaggagctggagagcgagaacaagaagctgaagaacgacctgaacgagctgagaaaggccgtggccgaccaggccacccagaacaacagcagccacggcagccccgacagctacagcctgctgctgaaccagctgaagctggcccacgaggagctggaggtgagaaaggaggaggtgctgatcctgagaacccagatcgtgagcgccgaccagagaagactggccggcagaaacgccgagcccaacatcaacgccagaagcagctggcccaacagcgagaagcacgtggaccaggaggacgccatcgaggcctaccacggcgtgtgccagaccaacagcaagaccgaggactggggctacctgaacgaggacggcgagctgggcctggcctaccagggcctgaagcaggtggccagactgctggaggcccagctgcaggcccagagcctggagcacgaggaggaggtggagcacctgaaggcccagctggaggccctgaaggaggagatggacaagcagcagcagaccttctgccagaccctgctgctgagccccgaggcccaggtggagttcggcgtgcagcaggagatcagcagactgaccaacgagaacctggacctgaaggagctggtggagaagctggagaagaacgagagaaagctgaagaagcagctgaagatctacatgaagaaggcccaggacctggaggccgcccaggccctggcccagagcgagagaaagagacacgagctgaacagacaggtgaccgtgcagagaaaggagaaggacttccagggcatgctggagtaccacaaggaggacgaggccctgctgatcagaaacctggtgaccgacctgaagccccagatgctgagcggcaccgtgccctgcctgcccgcctacatcctgtacatgtgcatcagacacgccgactacaccaacgacgacctgaaggtgcacagcctgctgaccagcaccatcaacggcatcaagaaggtgctgaagaagcacaacgacgacttcgagatgaccagcttctggctgagcaacacctgcagactgctgcactgcctgaagcagtacagcggcgacgagggcttcatgacccagaacaccgccaagcagaacgagcactgcctgaagaacttcgacctgaccgagtacagacaggtgctgagcgacctgagcatccagatctaccagcagctgatcaagatcgccgagggcgtgctgcagcccatgatcgtgagcgccatgctggagaacgagagcatccagggcctgagcggcgtgaagcccaccggctacagaaagagaagcagcagcatggccgacggcgacaacagctactgcctggaggccatcatcagacagatgaacgccttccacaccgtgatgtgcgaccagggcctggaccccgagatcatcctgcaggtgttcaagcagctgttctacatgatcaacgccgtgaccctgaacaacctgctgctgagaaaggacgtgtgcagctggagcaccggcatgcagctgagatacaacatcagccagctggaggagtggctgagaggcagaaacctgcaccagagcggcgccgtgcagaccatggagcccctgatccaggccgcccagctgctgcagctgaagaagaagacccaggaggacgccgaggccatctgcagcctgtgcaccagcctgagcacccagcagatcgtgaagatcctgaacctgtacacccccctgaacgagttcgaggagagagtgaccgtggccttcatcagaaccatccaggcccagctgcaggagagaaacgacccccagcagctgctgctggacgccaagcacatgttccccgtgctgttccccttcaaccccagcagcctgaccatggacagcatccacatccccgcctgcctgaacctggagttcctgaacgaggtgtag

SEQ ID NO: 36615 - DNA, 2892 bp, Artificial Sequence
  derived and/or modified sequence
atggagcacaaggccaccaccatccagaagcacgtgagaggctggatggccagaagacacttccagagactgagagacgccgccatcgtgatccagtgcgccttcagaatgctgaaggccagaagagagctgaaggccctgagaatcgaggccagaagcgccgagcacctgaagagactgaacgtgggcatggagaacaaggtggtgcagctgcagagaaagatcgacgagcagaacaaggagttcaagaccctgagcgagcagctgagcgtgaccaccagcacctacaccatggaggtggagagactgaagaaggagctggtgcactaccagcagagccccggcgaggacaccagcctgagactgcaggaggaggtggagagcctgagaaccgagctgcagagagcccacagcgagagaaagatcctggaggacgcccacagcagagagaaggacgagctgagaaagagagtggccgacctggagcaggagaacgccctgctgaaggacgagaaggagcagctgaacaaccagatcctgtgccagagcaaggacgagttcgcccagaacagcgtgaaggagaacctgatgaagaaggagctggaggaggagagaagcagataccagaacctggtgaaggagtacagccagctggagcagagatacgacaacctgagagacgagatgaccatcatcaagcagacccccggccacagaagaaaccccagcaaccagagcagcctggagagcgacagcaactaccccagcatcagcaccagcgagatcggcgacaccgaggacgccctgcagcaggtggaggagatcggcctggagaaggccgccatggacatgaccgtgttcctgaagctgcagaagagagtgagagagctggagcaggagagaaagaagctgcaggtgcagctggagaagagagagcagcaggacagcaagaaggtgcaggccgagcccccccagaccgacatcgacctggaccccaacgccgacctggcctacaacagcctgaagagacaggagctggagagcgagaacaagaagctgaagaacgacctgaacgagctgagaaaggccgtggccgaccaggccacccagaacaacagcagccacggcagccccgacagctacagcctgctgctgaaccagctgaagctggcccacgaggagctggaggtgagaaaggaggaggtgctgatcctgagaacccagatcgtgagcgccgaccagagaagactggccggcagaaacgccgagcccaacatcaacgccagaagcagctggcccaacagcgagaagcacgtggaccaggaggacgccatcgaggcctaccacggcgtgtgccagaccaacagactgctggaggcccagctgcaggcccagagcctggagcacgaggaggaggtggagcacctgaaggcccagctggaggccctgaaggaggagatggacaagcagcagcagaccttctgccagaccctgctgctgagccccgaggcccaggtggagttcggcgtgcagcaggagatcagcagactgaccaacgagaacctggacctgaaggagctggtggagaagctggagaagaacgagagaaagctgaagaagcagctgaagatctacatgaagaaggcccaggacctggaggccgcccaggccctggcccagagcgagagaaagagacacgagctgaacagacaggtgaccgtgcagagaaaggagaaggacttccagggcatgctggagtaccacaaggaggacgaggccctgctgatcagaaacctggtgaccgacctgaagccccagatgctgagcggcaccgtgccctgcctgcccgcctacatcctgtacatgtgcatcagacacgccgactacaccaacgacgacctgaaggtgcacagcctgctgaccagcaccatcaacggcatcaagaaggtgctgaagaagcacaacgacgacttcgagatgaccagcttctggctgagcaacacctgcagactgctgcactgcctgaagcagtacagcggcgacgagggcttcatgacccagaacaccgccaagcagaacgagcactgcctgaagaacttcgacctgaccgagtacagacaggtgctgagcgacctgagcatccagatctaccagcagctgatcaagatcgccgagggcgtgctgcagcccatgatcgtgagcgccatgctggagaacgagagcatccagggcctgagcggcgtgaagcccaccggctacagaaagagaagcagcagcatggccgacggcgacaacagctactgcctggaggccatcatcagacagatgaacgccttccacaccgtgatgtgcgaccagggcctggaccccgagatcatcctgcaggtgttcaagcagctgttctacatgatcaacgccgtgaccctgaacaacctgctgctgagaaaggacgtgtgcagctggagcaccggcatgcagctgagatacaacatcagccagctggaggagtggctgagaggcagaaacctgcaccagagcggcgccgtgcagaccatggagcccctgatccaggccgcccagctgctgcagctgaagaagaagacccaggaggacgccgaggccatctgcagcctgtgcaccagcctgagcacccagcagatcgtgaagatcctgaacctgtacacccccctgaacgagttcgaggagagagtgaccgtggccttcatcagaaccatccaggcccagctgcaggagagaaacgacccccagcagctgctgctggacgccaagcacatgttccccgtgctgttccccttcaaccccagcagcctgaccatggacagcatccacatccccgcctgcctgaacctggagttcctgaacgaggtgtag

SEQ ID NO: 36616 - DNA, 2163 bp, Artificial Sequence
  derived and/or modified sequence
atgcactggcccgtgaccagagagtgcaccagagtgtggatccccgaccccgacgaggtgtggagaagcgccgagctgaccaaggactacaaggagggcgacaagagcctgcagctgagactggaggacgagaccatcctggagtaccccatcgacgtgcagagaaaccagctgcccttcctgagaaaccccgacatcctggtgggcgagaacgacctgaccgccctgagctacctgcacgagcccgccgtgctgcacaacctgaaggtgagattcctggagagcaaccacatctacacctactgcggcatcgtgctggtggccatcaacccctacgagcagctgcccatctacggccaggacgtgatctacacctacagcggccagaacatgggcgacatggacccccacatcttcgccgtggccgaggaggcctacaagcagatggccagagacgagaagaaccagagcatcatcgtgagcggcgagagcggcgccggcaagaccgtgagcgccaagtacgccatgagatacttcgccaccgtgggcggcagcgccagcgagaccaacatcgaggagaaggtgctggccagcagccccatcatggaggccatcggcaacgccaagaccaccagaaacgacaacagcagcagattcggcaagtacatccagatcggcttcgacaagagataccacatcatcggcgccaacatgagaacctacctgctggagaagagcagagtggtgttccaggccgacgacgagagaaactaccacatcttctaccagctgtgcgccgccgccggcctgcccgagttcaaggagctggccctgaccagcgccgaggacttcttctacaccagccagggcggcgacaccagcatcgagggcgtggacgacgccgaggacttcgagaagaccagacaggccttcaccctgctgggcgtgaaggagagccaccagatgagcatcttcaagatcatcgccagcatcctgcacctgggcagcgtggccatccaggccgagagagacggcgacagctgcagcatcagcccccaggacgtgtacctgagcaacttctgcagactgctgggcgtggagcacagccagatggagcactggctgtgccacagaaagctggtgaccaccagcgagacctacgtgaagaccatgagcctgcagcaggtgatcaacgccagaaacgccctggccaagcacatctacgcccagctgttcggctggatcgtggagcacatcaacaaggccctgcacaccagcctgaagcagcacagcttcatcggcgtgctggacatctacggcttcgagaccttcgaggtgaacagcttcgagcagttctgcatcaactacgccaacgagaagctgcagcagcagttcaacagccacgtgttcaagctggagcaggaggagtacatgaaggagcagatcccctggaccctgatcgacttctacgacaaccagccctgcatcgacctgatcgaggccaagctgggcatcctggacctgctggacgaggagtgcaaggtgcccaagggcaccgaccagaactgggcccagaagctgtacgacagacacagcagcagccagcacttccagaagcccagaatgagcaacaccgccttcatcatcgtgcacttcgccgacaaggtggagtacctgagcgacggcttcctggagaagaacagagacaccgtgtacgaggagcagatcaacatcctgaaggccagcaagttccccctggtggccgacctgttccacgacgacaaggaccccgtgcccgccaccacccccggcaagggcagcagcagcaagatcagcgtgagaagcgccagaccccccatgaaggtgagcaacaaggagcacaagaagaccgtgggccaccagttcagaaccagcctgagcacccagcagatcgtgaagatcctgaacctgtacacccccctgaacgagttcgaggagagagtgaccgtggccttcatcagaaccatccaggcccagctgcaggagagaaacgacccccagcagctgctgctggacgccaagcacatgttccccgtgctgttccccttcaaccccagcagcctgaccatggacagcatccacatccccgcctgcctgaacctggagttcctgaacgaggtgtag

SEQ ID NO: 36617 - protein, 1037 aa, Artificial Sequence
  derived and/or modified sequence
MSPPLCPLLLLAVGLRLAGTLNPSDPNTCSFWESFTTTTKESHSRPFSLLPSEPCERPWEGPHTCPQPTVVYRTVYRQVVKTDHRQRLQCCHGFYESRGFCVPLCAQECVHGRCVAPNQCQCVPGWRGDDCSSECAPGMWGPQCDKPCSCGNNSSCDPKSGVCSCPSGLQPPNCLQPCTPGYYGPACQFRCQCHGAPCDPQTGACFCPAERTGPSCDVSCSQGTSGFFCPSTHSCQNGGVFQTPQGSCSCPPGWMGTICSLPCPEGFHGPNCSQECRCHNGGLCDRFTGQCRCAPGYTGDRCREECPVGRFGQDCAETCDCAPDARCFPANGACLCEHGFTGDRCTDRLCPDGFYGLSCQAPCTCDREHSLSCHPMNGECSCLPGWAGLHCNESCPQDTHGPGCQEHCLCLHGGVCQATSGLCQCAPGYTGPHCASLCPPDTYGVNCSARCSCENAIACSPIDGECVCKEGWQRGNCSVPCPPGTWGFSCNASCQCAHEAVCSPQTGACTCTPGWHGAHCQLPCPKGQFGEGCASRCDCDHSDGCDPVHGRCQCQAGWMGARCHLSCPEGLWGVNCSNTCTCKNGGTCLPENGNCVCAPGFRGPSCQRSCQPGRYGKRCVPCKCANHSFCHPSNGTCYCLAGWTGPDCSQPCPPGHWGENCAQTCQCHHGGTCHPQDGSCICPLGWTGHHCLEGCPLGTFGANCSQPCQCGPGEKCHPETGACVCPPGHSGAPCRIGIQEPFTVMPTTPVAYNSLGAVIGIAVLGSLVVALVALFIGYRHWQKGKEHHHLAVAYSSGRLDGSEYVMPDVPPSYSHYYSNPSYHTLSQCSPNPPPPNKVPGPLFASLQNPERPGGAQGHDNHTTLPADWKHRREPPPGPLDRGSSRLDRSYSYSYSNGPGPFYNKGLISEEELGASVASLSSENPYATIRDLPSLPGGPRESSYMEMKGPPSGSPPRQPPQFWDSQRRRQPQPQRDSGTYEQPSPLIHDRDSVGSQPPLPPGLPPGHYDSPKNSHIPGHYDLPPVRHPPSPPLRRQDR

SEQ ID NO: 36618 - protein, 173 aa, Artificial Sequence
  derived and/or modified sequence
MSPPLCPLLLLAVGLRLAGTLNPSDPNTCSFWESFTTTTKESHSRPFSLLPSEPCERPWEGPHTCPQPTVVYRTVYRQVVKTDHRQRLQCCHGFYESRGFCVPLCAQECVHGRCVAPNQCQCVPGWRGDDCSSECAPGMWGPQCDKPCSCGNNSSCDPKSGVCSCPSGLQPPN

SEQ ID NO: 36619 - DNA, 3114 bp, Artificial Sequence
  derived and/or modified sequence
atgagcccccccctgtgccccctgctgctgctggccgtgggcctgagactggccggcaccctgaaccccagcgaccccaacacctgcagcttctgggagagcttcaccaccaccaccaaggagagccacagcagacccttcagcctgctgcccagcgagccctgcgagagaccctgggagggcccccacacctgcccccagcccaccgtggtgtacagaaccgtgtacagacaggtggtgaagaccgaccacagacagagactgcagtgctgccacggcttctacgagagcagaggcttctgcgtgcccctgtgcgcccaggagtgcgtgcacggcagatgcgtggcccccaaccagtgccagtgcgtgcccggctggagaggcgacgactgcagcagcgagtgcgcccccggcatgtggggcccccagtgcgacaagccctgcagctgcggcaacaacagcagctgcgaccccaagagcggcgtgtgcagctgccccagcggcctgcagccccccaactgcctgcagccctgcacccccggctactacggccccgcctgccagttcagatgccagtgccacggcgccccctgcgacccccagaccggcgcctgcttctgccccgccgagagaaccggccccagctgcgacgtgagctgcagccagggcaccagcggcttcttctgccccagcacccacagctgccagaacggcggcgtgttccagaccccccagggcagctgcagctgcccccccggctggatgggcaccatctgcagcctgccctgccccgagggcttccacggccccaactgcagccaggagtgcagatgccacaacggcggcctgtgcgacagattcaccggccagtgcagatgcgcccccggctacaccggcgacagatgcagagaggagtgccccgtgggcagattcggccaggactgcgccgagacctgcgactgcgcccccgacgccagatgcttccccgccaacggcgcctgcctgtgcgagcacggcttcaccggcgacagatgcaccgacagactgtgccccgacggcttctacggcctgagctgccaggccccctgcacctgcgacagagagcacagcctgagctgccaccccatgaacggcgagtgcagctgcctgcccggctgggccggcctgcactgcaacgagagctgcccccaggacacccacggccccggctgccaggagcactgcctgtgcctgcacggcggcgtgtgccaggccaccagcggcctgtgccagtgcgcccccggctacaccggcccccactgcgccagcctgtgcccccccgacacctacggcgtgaactgcagcgccagatgcagctgcgagaacgccatcgcctgcagccccatcgacggcgagtgcgtgtgcaaggagggctggcagagaggcaactgcagcgtgccctgcccccccggcacctggggcttcagctgcaacgccagctgccagtgcgcccacgaggccgtgtgcagcccccagaccggcgcctgcacctgcacccccggctggcacggcgcccactgccagctgccctgccccaagggccagttcggcgagggctgcgccagcagatgcgactgcgaccacagcgacggctgcgaccccgtgcacggcagatgccagtgccaggccggctggatgggcgccagatgccacctgagctgccccgagggcctgtggggcgtgaactgcagcaacacctgcacctgcaagaacggcggcacctgcctgcccgagaacggcaactgcgtgtgcgcccccggcttcagaggccccagctgccagagaagctgccagcccggcagatacggcaagagatgcgtgccctgcaagtgcgccaaccacagcttctgccaccccagcaacggcacctgctactgcctggccggctggaccggccccgactgcagccagccctgcccccccggccactggggcgagaactgcgcccagacctgccagtgccaccacggcggcacctgccacccccaggacggcagctgcatctgccccctgggctggaccggccaccactgcctggagggctgccccctgggcaccttcggcgccaactgcagccagccctgccagtgcggccccggcgagaagtgccaccccgagaccggcgcctgcgtgtgcccccccggccacagcggcgccccctgcagaatcggcatccaggagcccttcaccgtgatgcccaccacccccgtggcctacaacagcctgggcgccgtgatcggcatcgccgtgctgggcagcctggtggtggccctggtggccctgttcatcggctacagacactggcagaagggcaaggagcaccaccacctggccgtggcctacagcagcggcagactggacggcagcgagtacgtgatgcccgacgtgccccccagctacagccactactacagcaaccccagctaccacaccctgagccagtgcagccccaacccccccccccccaacaaggtgcccggccccctgttcgccagcctgcagaaccccgagagacccggcggcgcccagggccacgacaaccacaccaccctgcccgccgactggaagcacagaagagagcccccccccggccccctggacagaggcagcagcagactggacagaagctacagctacagctacagcaacggccccggccccttctacaacaagggcctgatcagcgaggaggagctgggcgccagcgtggccagcctgagcagcgagaacccctacgccaccatcagagacctgcccagcctgcccggcggccccagagagagcagctacatggagatgaagggcccccccagcggcagcccccccagacagcccccccagttctgggacagccagagaagaagacagccccagccccagagagacagcggcacctacgagcagcccagccccctgatccacgacagagacagcgtgggcagccagccccccctgccccccggcctgccccccggccactacgacagccccaagaacagccacatccccggccactacgacctgccccccgtgagacacccccccagcccccccctgagaagacaggacagatag

SEQ ID NO: 36620 - DNA, 522 bp, Artificial Sequence
  derived and/or modified sequence
atgagcccccccctgtgccccctgctgctgctggccgtgggcctgagactggccggcaccctgaaccccagcgaccccaacacctgcagcttctgggagagcttcaccaccaccaccaaggagagccacagcagacccttcagcctgctgcccagcgagccctgcgagagaccctgggagggcccccacacctgcccccagcccaccgtggtgtacagaaccgtgtacagacaggtggtgaagaccgaccacagacagagactgcagtgctgccacggcttctacgagagcagaggcttctgcgtgcccctgtgcgcccaggagtgcgtgcacggcagatgcgtggcccccaaccagtgccagtgcgtgcccggctggagaggcgacgactgcagcagcgagtgcgcccccggcatgtggggcccccagtgcgacaagccctgcagctgcggcaacaacagcagctgcgaccccaagagcggcgtgtgcagctgccccagcggcctgcagccccccaactag

SEQ ID NO: 36621 - DNA, 3114 bp, Artificial Sequence
  derived and/or modified sequence
atgtccccacccctgtgcccactcttacttttggcggtgggccttcgcctagccggtaccctgaatccaagtgatcctaacacatgttctttctgggaaagctttacgactacgaccaaggaaagccacagtcgccccttcagtctgctgccctcggaaccgtgtgaaaggccatgggagggtccacatacgtgcccacagccaactgtcgtgtaccggacggtgtacaggcaggtagtcaagactgaccatcgccagaggctgcagtgctgccacggattttatgagtctcgcggtttttgcgtacctctgtgcgcccaggaatgtgtgcacggaaggtgcgttgcgcctaatcagtgtcagtgcgtgcccgggtggcgcggcgatgactgttcatccgagtgtgcaccaggtatgtggggaccacagtgcgataaaccgtgcagctgcgggaataacagctcctgtgatcccaagtctggcgtatgcagttgtccctctggcctgcaaccaccgaattgcctgcagccatgtacacccggttactacggccccgcctgccagtttcgttgtcagtgccatggtgcaccatgtgatccccagacgggggcctgtttctgccctgctgaaagaactggcccatcttgcgacgtgtcctgcagccagggcacttcgggtttcttctgtcccagtacccacagttgtcagaacggaggcgtatttcagacccctcagggtagctgctcatgtccacctggctggatgggaactatctgctctcttccatgcccggaaggctttcatggccccaattgctcacaagaatgtaggtgtcacaacggggggctctgcgaccgatttaccggacagtgcaggtgtgctcctgggtataccggcgacagatgtcgtgaggagtgccctgttggtcgattcggccaggactgcgcagagacctgcgattgtgcccccgatgcgcggtgcttccctgctaatggggcttgtttgtgcgaacacgggttcacaggggaccggtgtaccgaccgcctttgtcccgacggtttctatggactgagctgtcaggcgccttgcacttgcgacagggagcactctctgtcatgccatcccatgaacggcgagtgcagctgtctgcccggatgggccggtttacattgtaacgaatcctgcccccaagacacacacggacctggttgccaggagcattgtttgtgcttgcatggaggcgtatgccaggctacttctggcctgtgtcagtgtgcgccgggatacactggccctcattgcgcctccttatgcccgcctgacacttacggtgtgaactgttccgccagatgctcatgcgaaaacgcaatcgcttgctccccaattgacggggaatgcgtgtgtaaggaaggctggcaaaggggcaattgctccgtgccatgccccccaggaacttgggggtttagctgtaacgccagctgccagtgcgcccacgaagccgtgtgttctccacagactggagcctgcacatgcacccccgggtggcatggggctcactgtcagctgccttgccctaagggccagttcggagaaggctgtgcctcacggtgtgactgtgaccactccgatggttgtgatccagtgcacgggagatgtcaatgtcaggccggttggatgggcgccagatgccacctgagttgtccagaaggactgtggggcgttaattgcagtaacacgtgtacttgcaaaaacggaggaacttgcttgcctgaaaacggaaactgtgtttgcgccccaggattcaggggcccaagctgccagaggtcatgtcagcccggccgctatggtaagcgctgcgtgccatgtaaatgcgccaatcactctttctgtcacccctctaacggaacctgttattgccttgccggctggaccggccccgactgttcacagccatgtccccccggacattggggagaaaattgcgcccagacatgccaatgtcaccacggagggacatgccacccacaggatggctcttgtatatgcccactgggttggacgggccaccactgcctggagggctgccccttggggacctttggcgcaaattgctcacagccctgtcagtgcgggccaggcgagaagtgtcaccccgaaacaggggcctgcgtatgcccaccgggccattcgggcgcaccctgccggataggcattcaggaaccattcacagtcatgccaactacacctgtcgcgtacaacagcctgggtgccgtcatcggaatcgccgttttgggatcgctggttgtggcactagtggcacttttcataggctataggcactggcagaaggggaaagaacaccatcatctggccgtggcctacagctcgggccggctcgacggaagcgagtatgtgatgcccgatgtccctccttcctactctcactactatagtaatccatcataccacacactgagccagtgtagcccaaatccccccccccctaataaggtacccggacctttgttcgcatctctccagaaccctgagagacccggcggagcccaggggcatgataatcatacaactttgcctgctgactggaagcaccgccgtgagcctccccctggccccctggaccgcggctctagccgcttggacaggtcctacagctatagttattccaacggcccaggcccattttacaataaggggctcatctctgaggaggaattgggggcaagtgtagcgagcctgtcctcggaaaacccctacgcaaccatcagggatctgccgagccttcccggcggcccaagagaaagctcatatatggagatgaagggaccccccagcgggtctcctcctcggcaacctcctcagttttgggactcacagcggagacggcaaccccagcctcagagggacagcggaacttatgaacagccttcccctctgatccatgaccgggactccgttggtagccagccgccactgcctcctggactaccccctggacattacgacagccccaaaaactctcacatcccaggccactacgacctgccccctgttcgccaccccccctccccccccctgcggcggcaagaccgctag

SEQ ID NO: 36622 - DNA, 3114 bp, Artificial Sequence
  derived and/or modified sequence
atgagtcccccattatgcccactcctgctcctggctgtgggccttagactggcaggaactctgaacccttctgatcctaacacttgctctttctgggagtctttcaccactactactaaggaatcacacagcaggcctttctctttattgcccagtgagccctgcgaaagaccctgggaaggcccccacacgtgcccccagccgacagtggtgtaccgcacggtgtaccgacaggtcgtgaagactgatcaccgtcagcggctgcagtgttgtcacggcttctacgaatctcgcgggttttgcgtcccactctgtgcacaggagtgcgtccacgggagatgcgttgctcccaatcagtgccaatgtgtgcccggatggaggggagacgactgctcatccgaatgcgcccctggcatgtggggtcctcagtgcgataagccctgcagctgcggcaataattcctcctgcgaccccaaaagcggcgtgtgtagttgcccttctgggttacagccccccaattgcctgcagccttgcacgcctggctattatggtcctgcgtgccagttcagatgccagtgtcacggtgccccatgtgatccacaaacaggcgcatgcttctgccctgctgagagaaccggtccctcttgtgacgtcagttgcagccagggaacttccggcttcttctgtccttctacccattcttgccaaaatgggggcgtctttcaaaccccacagggaagctgcagctgtccccccgggtggatggggacaatctgctctttgccttgccctgaaggcttccatggtccaaactgtagccaggaatgtcgttgccacaatggagggctgtgtgaccggttcacgggccagtgtcgctgcgcccccgggtatacaggggataggtgtcgggaagagtgtcccgtgggtaggttcggtcaagactgcgcggaaacatgcgattgcgcaccagatgcacgttgctttcccgctaacggcgcctgtctgtgcgaacacggatttaccggcgatcggtgtaccgacagattgtgtcccgatggcttctatggtctcagctgtcaagcaccatgtacctgcgatagggagcattcactctcttgccaccccatgaacggtgagtgctcttgtttgcccggttgggccgggttacactgcaacgaatcgtgtcctcaggatacgcatggtcctgggtgtcaggagcactgtctctgcctgcatgggggagtttgccaggcgacctcaggcctctgccagtgcgcacctggatataccggcccccactgcgccagcctctgtccacctgatacttacggagtcaactgctcagctaggtgctcttgcgagaatgccattgcttgttcgcccatagatggtgagtgcgtgtgcaaggaagggtggcagaggggcaattgcagcgttccatgtccacctggcacctgggggttcagctgcaacgcaagctgtcagtgcgcccatgaagccgtgtgctccccacagacaggggcctgcacttgcacacccggctggcatggagcccactgtcagctaccttgccccaaaggccaatttggagaggggtgcgcaagcagatgtgactgcgatcacagtgacggatgtgaccccgtgcatggtcggtgtcagtgccaggcaggatggatgggagcacggtgccacttatcttgccctgaaggactgtggggtgttaactgctccaacacttgtacatgcaagaatggggggacatgcctcccagagaatggaaattgcgtctgtgccccaggctttcggggaccgagttgccagcggtcctgccaaccaggaagatacggcaagcgctgtgtcccatgcaagtgtgctaaccatagcttctgccatccgtcgaacgggacatgttattgcctcgccggatggacgggtccggattgcagtcagccatgtcctcccgggcactggggagagaactgcgcgcagacatgccagtgccatcacggcggaacttgtcatccacaggatggtagctgcatttgtcctctggggtggacaggtcatcactgccttgaaggttgcccactggggacctttggcgctaattgttcgcaaccatgccagtgtgggcctggggagaagtgccatcctgagaccggcgcttgtgtgtgtcccccagggcattcaggagccccttgccggatcggaatccaagaaccatttactgtgatgcctaccaccccagtcgcttataactcattgggcgccgtcatcgggatagcagtattgggcagtctggtggtcgccctggtagcgctcttcattgggtatcggcactggcagaagggcaaagagcaccatcacctcgcagtggcctactcgtcaggaagactcgacggatctgaatacgttatgccggatgttcctccatcctactcacattactacagcaatcccagctaccacaccctatctcagtgctcaccaaatccacctcccccaaacaaagtgcctggtccacttttcgcttccttacagaatcccgagagacccgggggggcgcagggccacgataatcataccaccttgccagccgactggaaacaccgccgggaaccccccccaggtccgctggatagggggtcttcaagactggataggtcatactcctattcttattccaacggacccggcccattttacaacaagggactaatctcagaagaggagctgggcgcctctgttgcctccttaagttccgagaacccttatgccactatccgggatctcccttcacttcctggaggcccccgggagtccagttacatggagatgaaaggccccccgagcggaagcccaccacgacaacctccacagttctgggatagccagcgccggagacaaccccaacctcaaagggatagcggcacctatgaacagccctcacccctgatacatgatcgggattccgtcggtagtcaaccgcctcttcctcccggactcccacctggtcattacgacagtcccaagaactcccacataccaggtcattatgaccttcctcccgtgcgacatccaccttcgcctccactgcgtaggcaggacagatag

SEQ ID NO: 36623 - DNA, 522 bp, Artificial Sequence
  derived and/or modified sequence
atgagtcccccactttgcccactcctcctcctggctgttggactacgactcgcgggcaccctgaacccaagcgatcctaacacttgtagcttttgggagtcattcacgactaccacaaaggagagtcactcaaggcccttctcactgctgccatctgagccgtgcgaacgcccttgggaaggaccacatacttgtcctcagcctaccgtggtataccgcaccgtctacaggcaggtggtgaaaaccgatcataggcagagactgcaatgctgccacggattctacgaaagcagaggcttctgtgtgcccctgtgcgcacaggaatgcgtacatggaagatgtgtggccccgaaccaatgccagtgcgtccccggctggcggggcgacgattgttcctccgagtgtgctcccggaatgtggggaccccagtgtgataagccttgcagttgtggtaataatagttcgtgtgaccccaagtccggtgtttgctcctgtccctctggtctgcaaccaccaaactag

SEQ ID NO: 36624 - DNA, 3114 bp, Artificial Sequence
  derived and/or modified sequence
atgagcccccccctgtgccccctgctgctgctggccgtgggcctgcggctggccggcaccctgaaccccagcgaccccaacacctgcagcttctgggagagcttcaccaccaccaccaaggagagccacagccggcccttcagcctgctgcccagcgagccctgtgagcggccctgggagggcccccacacctgcccccagcccaccgtggtgtacagaacagtgtaccggcaggtggtgaagacagaccaccggcagaggctgcagtgctgccacggcttctatgagagccggggcttctgtgtgcccctgtgtgcccaggagtgtgtgcacggccgctgtgtggcccccaaccagtgccagtgtgtgcccggctggagaggagatgactgcagcagtgaatgtgcccctggcatgtggggcccccagtgtgacaagccctgcagctgtggcaacaacagcagctgtgaccccaagagcggcgtgtgcagctgccccagcggcctgcagccccccaactgcctgcagccctgcaccccaggctactacggccctgcctgccagttccgctgccagtgccacggggccccctgtgacccccagacaggagcctgcttctgcccagctgagaggacaggccccagctgtgatgtgtcctgcagccagggcaccagcggcttcttctgccccagcacccacagctgccagaatggaggagtcttccagaccccccagggcagctgcagctgccccccaggctggatgggcaccatctgcagcctgccctgcccagagggcttccacggccccaactgcagccaggagtgccgctgccacaacggcggcctgtgtgaccgcttcaccggccagtgccgctgtgcccctggctacaccggggaccgctgccgggaggagtgccctgtgggccgcttcggccaggactgtgccgagacctgtgactgtgccccagatgcccgctgcttccctgccaatggagcctgcctgtgtgagcacggcttcaccggggaccgctgcacagaccggctgtgcccagatggcttctacggcctgagctgccaggccccctgcacctgtgaccgggagcacagcctgagctgccaccccatgaatggagaatgtagctgcctgcccggctgggccggcctgcactgcaatgaaagctgcccccaggacacccacggccctggctgccaggagcactgcctgtgcctgcacggcggcgtgtgccaggccaccagcggcctgtgccagtgtgcccctggctacacaggcccccactgtgccagcctgtgccccccagacacctatggagtgaactgcagcgcccgctgcagctgtgaaaatgccatcgcctgcagccccattgatggagaatgtgtgtgcaaggagggctggcagaggggcaactgcagcgtgccctgccccccaggcacctggggcttcagctgcaatgccagctgccagtgtgcccacgaggccgtgtgcagcccccagacaggagcctgcacctgcaccccaggctggcacggggcccactgccagctgccctgccccaagggccagtttggagagggctgtgccagccgctgtgactgtgaccacagtgatggctgtgaccctgtgcacggccgctgccagtgccaggccggctggatgggcgcccgctgccacctgagctgcccagagggcctgtggggcgtgaactgcagcaacacctgcacctgcaagaatggaggcacctgcctgcctgaaaatggaaactgtgtgtgtgcccctggcttccggggccccagctgccagaggagctgccagcccggccgctatggcaagagatgtgtgccctgcaagtgtgccaaccacagcttctgccaccccagcaatggcacctgctactgcctggccggctggacaggccctgactgcagccagccctgccccccaggccactggggcgagaactgtgcccagacctgccagtgccaccacggcggcacctgccacccccaggacggcagctgcatctgccccctgggctggacaggccaccactgcctggagggctgccccctgggcaccttcggggccaactgcagccagccctgccagtgtggccctggagagaagtgccaccctgagaccggggcctgtgtgtgccccccaggccacagcggggccccctgccgcatcggcatccaggagcccttcaccgtgatgcccaccacccctgtggcctacaacagcctgggcgctgtgattggaattgctgtgctgggcagcctggtggtggccctggtggccctcttcatcggctaccgccactggcagaagggcaaggagcaccaccacctggccgtggcctacagcagcggccgcctggatggctctgaatatgtgatgccagatgtgccccccagctacagccactactacagcaaccccagctaccacaccctgagccagtgcagccccaaccccccaccacccaacaaggtgcccggccccctgtttgccagcctgcagaaccctgagaggcctgggggcgcccagggccatgacaaccacaccaccctgcctgctgactggaagcacagaagagagcccccacctggccccctggaccggggcagcagccggctggacaggagctacagctacagctacagcaatggacctggccccttctacaacaagggcctcatcagcgaggaggagctgggcgcctctgtggccagcctgagcagcgagaacccctatgccaccatccgggacctgcccagcctgcccggcggcccccgggagagcagctacatggagatgaagggccccccatctggcagccccccccggcagcccccccagttctgggacagccagaggcggcggcagccccagccccagagggacagcggcacctatgagcagcccagccccctcatccatgaccgggacagcgtgggcagccagccccccctgcccccaggcctgcccccaggccactatgacagccccaagaacagccacatccctggccactatgacctgccccctgtgcgccacccccccagcccccccctgcggcggcaggacagatag

SEQ ID NO: 36625 - DNA, 522 bp, Artificial Sequence
  derived and/or modified sequence
atgagcccccccctgtgccccctgctgctgctggccgtgggcctgcggctggccggcaccctgaaccccagcgaccccaacacctgcagcttctgggagagcttcaccaccaccaccaaggagagccacagccggcccttcagcctgctgcccagcgagccctgtgagcggccctgggagggcccccacacctgcccccagcccaccgtggtgtacagaacagtgtaccggcaggtggtgaagacagaccaccggcagaggctgcagtgctgccacggcttctatgagagccggggcttctgtgtgcccctgtgtgcccaggagtgtgtgcacggccgctgtgtggcccccaaccagtgccagtgtgtgcccggctggagaggagatgactgcagcagtgaatgtgcccctggcatgtggggcccccagtgtgacaagccctgcagctgtggcaacaacagcagctgtgaccccaagagcggcgtgtgcagctgccccagcggcctgcagccccccaactag

SEQ ID NO: 36626 - DNA, 3114 bp, Artificial Sequence
  derived and/or modified sequence
atgagcccccccctgtgccccctgctgctgctggccgtgggcctgcgtctggccggcacgttaaacccgagtgatcccaacacatgctctttttgggagtcatttacaacaacaactaaggagagccacagcaggccattttctctcttacccagtgaaccctgtgaaagaccatgggaagggccccacacctgcccccagcctacagtggtgtatagaacagtttacagacaagttgtgaaaacagatcatcgccaaaggctccagtgctgccacggcttttatgagtcccgcgggttctgcgtccctctttgcgctcaggaatgtgtgcacggtagatgcgtagcccctaatcaatgtcagtgcgtgcctgggtggaggggagacgattgttctagtgagtgtgcaccaggaatgtggggcccccagtgcgacaaaccttgcagctgcggaaataattcctcttgcgatccaaagtcaggggtgtgtagttgtccgtcgggcttacagccccccaactgtctccagccctgtacaccgggatattacggcccagcttgtcaatttaggtgccagtgtcatggtgccccttgcgacccacagacaggggcttgcttctgtccagccgagcgaaccggaccctcgtgtgacgtgtcctgttctcaggggacatccggattcttctgtccctcaacccacagttgtcagaacggaggtgtgttccagaccccccagggatcttgctcatgtcctccaggctggatggggacgatatgtagccttccctgccctgagggttttcacggaccaaattgttcccaggagtgcagatgtcacaacggcgggctttgtgatcgattcactggtcagtgcaggtgtgcacctggttacaccggcgaccgctgccgcgaagaatgccctgtgggtaggttcggacaggactgtgccgaaacatgtgattgcgccccggacgcgcgatgcttccccgcaaacggagcctgcctctgcgaacatgggttcaccggagaccggtgtacagatcgactgtgtcccgacggattctacggcctctcttgccaggccccttgcacctgcgacagagagcacagcctatcttgccaccccatgaatggcgagtgctcctgcctaccaggctgggccggcctgcattgcaatgagtcttgcccccaggatacccacggaccaggttgtcaggagcactgtctgtgcctccacgggggtgtttgccaggccacaagtggcctttgccagtgcgcaccaggatatactggcccacattgcgcctccctctgtcctcccgacacatatggggtgaactgctccgctaggtgctcatgtgaaaatgccatcgcttgctcccctatcgatggcgagtgtgtatgtaaggaagggtggcagagaggaaattgtagcgtgccttgtccaccagggacctggggctttagttgtaatgcatcgtgccagtgcgctcacgaagcggtttgctccccccagactggcgcgtgtacatgtaccccgggctggcacggcgcacactgccaattgccgtgtcctaagggccagtttggtgaaggttgcgcctcccggtgcgactgcgaccattctgatgggtgcgatccggtgcacgggaggtgccaatgtcaggccggatggatgggagcccggtgccatctgtcctgtcccgaaggactgtggggcgtgaactgttccaatacatgtacttgtaagaatggtggcacctgcctaccagagaatggaaattgtgtatgcgcccccggatttcgggggccaagctgtcaacgctcctgccagcccggacgctacggcaagaggtgtgtaccatgtaagtgtgccaaccattcattttgccaccctagtaacggtacatgctattgccttgctggttggaccggtccagactgctctcaaccctgtcccccagggcattggggagaaaactgtgcccagacctgtcagtgtcaccacggcggcacttgtcatccacaggatggttcttgtatatgtcccttaggctggacaggccatcattgcctggaggggtgtccactagggaccttcggagccaactgttctcagccatgccaatgtggaccaggagaaaagtgccacccagaaaccggcgcctgtgtctgccctccaggtcactccggggctccttgtagaataggcatccaggagcccttcacagtgatgcccaccacccccgtagcatataattcccttggggccgtaatcggaatcgcagtgctgggcagcctggtggttgcccttgtggcactgttcatcggatacaggcattggcaaaaagggaaagagcatcaccatctcgcagtagcctattctagcgggaggctggatggcagtgagtatgtgatgcctgacgttccgccatcctattcccattactatagcaaccccagctatcatacactgagccagtgctcacctaaccctccccccccgaataaggtccccggacccctctttgcaagtttgcaaaacccagagcggccaggcggcgctcagggacacgataaccacactactctgcctgccgactggaaacatagacgtgaaccacctcccggccctctggaccgcggctcgagtagactcgatagatcttactcatatagttattccaacggtcctggcccattctacaataaagggctgatctccgaggaggaactcggagcatccgtggcatcactctcctcagaaaacccgtacgcaaccattcgggacctgccttcattgccgggggggccgcgagagagctcatacatggagatgaagggcccgcctagcggtagtcccccaagacaacctccccagttctgggacagccagagaagaaggcaacctcagcctcagcgagattcggggacatacgaacaaccatctccactgattcatgatagggattccgtcgggagtcaacctcctctccccccgggtctcccccctggacactatgacagtcccaaaaatagccatatccctgggcattacgacctgcctcccgtgcgtcacccacccagcccccccctgcggcgacaggatcggtag

SEQ ID NO: 36627 - DNA, 3114 bp, Artificial Sequence
  derived and/or modified sequence
atgagcccccccctgtgccccctgctgctgctggccgtgggcctgcgcttggctggaactcttaacccctcggaccctaacacttgtagcttttgggaaagcttcacaacgactaccaaagaatcacactcaagaccattcagccttcttccgtccgaaccttgcgaacggccatgggagggcccacatacgtgtcctcaacctactgtcgtgtaccggacggtctaccgacaggttgttaagactgaccaccgccagcgcctacagtgctgccatggcttttacgaatccaggggcttttgtgtacctctgtgcgctcaagaatgcgttcatggtcgctgtgtggcacctaaccagtgtcagtgtgtccctggatggagaggcgacgattgctcgtccgaatgtgctcccgggatgtgggggcctcagtgcgataagccctgttcctgtggtaacaatagcagctgcgatcctaagtctggcgtgtgcagctgtccctcaggcctccagcctcctaactgtttgcagccatgtactccgggttattatgggcctgcctgtcagtttcgctgccagtgtcacggcgccccctgcgatccccaaacaggtgcttgtttttgtcctgccgaacggaccggcccttcgtgcgacgttagttgtagccagggcacctcaggcttcttctgcccctcaacacactcctgtcagaacgggggagtctttcagactcctcaaggcagctgcagttgtccccccggctggatgggcaccatttgtagcctgccctgtcctgaaggatttcacggccctaattgttctcaggaatgtcgctgtcacaatggcgggctgtgtgacaggtttactggccaatgccgatgtgcaccgggctatactggagatagatgccgagaggaatgccctgtggggcggtttggccaggactgcgctgaaacatgcgactgtgcccccgatgcacgctgctttcctgccaatggggcctgtctatgtgaacatggcttcacgggtgatagatgtacggaccgcctgtgcccggacggtttttacgggctgagctgccaagcaccgtgcacttgcgaccgcgaacatagtcttagttgccatccgatgaacggtgagtgttcctgcctcccgggctgggccggtctgcattgcaacgagtcttgcccccaggacactcacggtcctggctgtcaagaacattgcctgtgtctacacggaggtgtgtgccaggcgacatccggcctttgccagtgcgctccagggtacaccggacctcattgcgcatcactttgtccacctgatacgtacggcgtcaattgtagtgcccgctgttcgtgcgagaatgccatcgcgtgttctccaattgatggcgagtgcgtttgtaaagagggttggcaacgcggcaactgcagtgttccttgccctcctggcacttggggcttcagctgcaatgcatcctgtcagtgcgcccatgaagcggtgtgttccccacagaccggtgcctgcacgtgcacacccggctggcacggcgcccattgtcagcttccctgtcccaaagggcagtttggcgagggatgcgcaagcaggtgtgattgtgatcactctgacggttgcgatccggtccacggccgatgccaatgtcaggccggatggatgggcgcaagatgccatttaagttgcccagagggactttggggggtcaattgtagtaacacctgtacctgcaaaaatgggggcacttgtcttcctgaaaacggcaactgtgtgtgtgcacccggattcagaggtccgagttgccagcgctcatgccagcccgggcggtatggcaaacgctgcgtgccatgtaagtgcgccaatcattctttttgccatccaagcaatgggacttgctactgtctggccggttggactggccctgactgttctcagccctgtcccccaggtcattggggcgaaaattgcgcacagacatgtcagtgccaccacggcggaacatgtcacccacaggacgggagctgcatatgtccactggggtggacaggccaccactgcctcgagggctgtcctttaggcactttcggagccaactgttcacagccttgtcagtgcgggcccggcgaaaagtgccatcccgaaaccggcgcatgcgtgtgtcctcccggccacagcggggccccttgtagaatcgggattcaggagccgtttaccgttatgccgaccacacccgttgcatacaatagtcttggggccgtgatcggcatcgctgtgttgggcagtcttgtagttgctctggtcgcactgttcattggctatagacattggcaaaaaggaaaggaacatcatcacctagcagttgcctattcttcaggacggctcgacggctcagagtatgtgatgcccgatgtccctccatcttactcccactactattcgaatccctcataccacaccctttctcagtgtagcccgaacccgcctccaccaaataaggtgcctgggccactcttcgcaagccttcaaaatcctgagaggcccggtggcgcacagggtcacgataaccacaccactctcccagcggattggaaacacagacgggagcctcctccggggccactggacaggggatcttccagactcgaccggtcctactcctattcttacagcaatgggcccggtccattctacaacaagggtctcatctccgaggaagagttgggggcatccgttgccagcctctcgtcagagaacccatacgctaccataagggaccttcccagcctacctggcggcccgcgggagtccagttacatggaaatgaaaggccctcccagcggcagccccccgcggcaaccccctcagttttgggacagtcaacgccgtagacaaccccagccacagcgggatagtgggacatatgaacagcccagccctcttatccacgaccgcgattcagtgggatctcagcctcccttgccacctggactgccacctggccactacgacagtcccaagaatagccacatccccggccactatgaccttccccccgtgagacatcctccctcaccgccactccggcgccaggatcgctag

SEQ ID NO: 36628 - DNA, 522 bp, Artificial Sequence
  derived and/or modified sequence
atgagcccccccctgtgccccctgctgctgctggccgtgggcctgcggcttgcaggaacactgaacccctccgatcctaatacctgttctttttgggaatcattcactacgacaacaaaagaatctcactctcggcccttcagcctgctgcccagcgagccttgtgagagaccctgggaaggccctcatacatgcccccagccaactgttgtgtatcggaccgtgtacagacaggtcgttaaaactgatcaccggcagcgtcttcagtgttgtcatggcttttacgaatccagagggttttgcgtccccctgtgcgcccaggaatgtgtacacgggagatgtgtggctccaaaccagtgccagtgtgttcctggctggagaggggacgattgctcttctgaatgtgcccccggcatgtggggtccccaatgtgataaaccctgctcctgtgggaacaactcttcctgtgatccaaagagtggagtgtgttcatgtccatctggcctccagccacctaattag

SEQ ID NO: 36629 - DNA, 4866 bp, Artificial Sequence
  derived and/or modified sequence
ggctcgaagtggggaccctcgccccgtcctcggctgtccagtcctcctcctcgcagaccccggcggttcctaccccaggccgcaggggagacggggccccaaggcaggcctctgcaatgtcaccgcctctgtgtcccctccttctcctggctgtgggcctgcggctggctggaactctcaaccccagtgatcccaatacctgcagcttctgggaaagcttcactaccaccaccaaggagtcccactcccgccccttcagcctgctcccctcagagccctgcgagcggccctgggagggcccccatacttgcccccagcccacggttgtataccggaccgtgtaccgtcaggtggtgaagacggaccaccgccagcgcctgcagtgctgccatggcttctatgagagcagggggttctgtgtcccgctctgtgcccaggagtgtgtccatggccgttgtgtggcacccaatcagtgccaatgtgtgccaggctggcggggcgacgactgttccagtgagtgtgccccaggaatgtgggggccacagtgtgacaagccctgcagctgcggcaacaacagctcgtgtgatcccaagagtggggtatgttcttgcccttctggtctgcagcccccgaactgccttcagccctgtacccctggctactatggccctgcctgccagttccgctgccagtgccatggggcaccctgcgatccccagactggagcctgcttctgccccgcagagagaactgggcccagctgtgacgtgtcctgttcccagggcacttctggcttcttctgccccagcacccattcttgccaaaatggaggtgtcttccaaaccccacagggctcctgcagctgcccccctggctggatgggcaccatctgctccctgccctgcccagagggctttcacggacccaactgctcccaggaatgtcgctgccacaacggcggcctctgtgaccgattcactgggcagtgccgctgcgctccgggttacactggggatcggtgccgggaggagtgcccggtgggccgctttgggcaggactgtgctgagacgtgcgactgcgccccggacgcccgttgcttcccggccaacggcgcatgtctgtgcgaacacggcttcactggggaccgctgcacggatcgcctctgccccgacggcttctacggtctcagctgccaggccccctgcacctgcgaccgggagcacagcctcagctgccacccgatgaacggggagtgctcctgcctgccgggctgggcgggcctccactgcaacgagagctgcccgcaggacacgcatgggccagggtgccaggagcactgtctctgcctgcacggtggcgtctgccaggctaccagcggcctctgtcagtgcgcgccgggttacacgggccctcactgtgctagtctttgtcctcctgacacctacggtgtcaactgttctgcacgctgctcatgtgaaaatgccatcgcctgctcacccatcgacggcgagtgcgtctgcaaggaaggttggcagcgtggtaactgctctgtgccctgcccacccggaacctggggcttcagttgcaatgccagctgccagtgtgcccatgaggcagtctgcagcccccaaactggagcctgtacctgcacccctgggtggcatggggcccactgccagctgccctgtccgaaggggcagtttggagaaggttgtgccagtcgctgtgactgtgaccactctgatggctgtgaccctgttcatggacgctgtcagtgccaggctggctggatgggtgcccgctgccacctgtcctgccctgagggcttatggggagtcaactgtagcaacacctgcacctgcaagaatgggggcacctgtctccctgagaatggcaactgcgtgtgtgcacccggattccggggcccctcctgccagagatcctgtcagcctggccgctatggcaaacgctgtgtgccctgcaagtgcgctaaccactccttctgccacccctcgaacgggacctgctactgcctggctggctggacaggccccgactgctcccagccatgccctccaggacactggggagaaaactgtgcccagacctgccaatgtcaccatggtgggacctgccatccccaggatgggagctgtatctgccccctaggctggactggacaccactgcttagaaggctgccctctggggacatttggtgctaactgctcccagccatgccagtgtggtcctggagaaaagtgccacccagagactggggcctgtgtatgtcccccagggcacagtggtgcaccttgcaggattggaatccaggagccctttactgtgatgccgaccactccagtagcgtataactcgctgggtgcagtgattggcattgcagtgctggggtcccttgtggtagccctggtggcactgttcattggctatcggcactggcaaaaaggcaaggagcaccaccacctggctgtggcttacagcagcgggcgcctggacggctccgagtatgtcatgccagatgtccctccgagctacagtcactactactccaaccccagctaccacaccctgtcgcagtgctccccaaaccccccaccccctaacaaggttccaggcccgctctttgccagcctgcagaaccctgagcggccaggtggggcccaagggcatgataaccacaccaccctgcctgctgactggaagcaccgccgggagccccctccagggcctctggacagggggagcagccgcctggaccgaagctacagctatagctacagcaatggcccaggcccattctacaataaagggctcatctctgaagaggagctcggggccagtgtggcttccctgagcagtgagaacccatatgccaccatccgggacctgcccagcttgccagggggcccccgggagagcagctacatggagatgaaaggccctccctcaggatctccccccaggcagcctcctcagttctgggacagccagaggcggcggcaaccccagccacagagagacagtggcacctacgagcagcccagccccctgatccatgaccgagactctgtgggctcccagccccctctgcctccgggcctaccccccggccactatgactcacccaagaacagccacatccctggacattatgacttgcctccagtacggcatcccccatcacctccacttcgacgccaggaccgttgaggagccaggatggtatggcagaggccagcacacctggctgttgctgctcaaggctggggacagagcctagtgtacccctgccaggagcagggagtggaccggcaggctgtgaacatgaacaacgcttaacagagcaagtgatgggagccttgttcctgggttctaccatgggagacgctgatcagcaggatgcctggctccctttcccaacccactgctcccaaggcctccagggccctgtgtacataaactggtgggttggaagttgctgggtaactctgatttcagacatgcgtgtggggtaccttttctgtgcatgctcagcctgggctctgtgcgtgtgtgtgtttctgtgattttagaagggtaccaggcacaggttctgtcctagggcacttaccatttagtagggagatggaaccaacccaattaactctagcaatagcctcctaactggcctcctccattgattcagtgaaccttccaatgcatggctcataatttcaaaatacaggctggttagttactccctacctgaaagccttcataggtgcctctttgctcttctgccagtatcaaaacttttgaaggccttaaaggccctgctttgcctggcccatctgtctctccagcctcaccttgaactgtgttcctgtcactgcacgccagtcacaccggcctctaggtcctcctgtaggccactcttctttctggcacagggacctgcacacctggagtgcccttcctcccccactcgcctgttcacccctgcttttcctttacacctcctcctcagggaagtgcccaccctccgtacatctttcacagccctgattgcagctgtgttcactcaccaggtacctgcagaaggcctacagggtgccaggcacttctttaatgtgttctttctttatgtgattatttgattaatctctgcctcccccactagactgtaagctccctgaaggcaagaatcctgtgcttatgctcaatattagctctcccttggcacagagtaggcactcaacaaatgctccccaaaaggctgagtggctgactgaattaagtaccagtgacatgcagtaactgctaagatagatgagccatctgtatgctctgacagttacagactgaataagttggagacttccctaaagggtggcatttccccagggtaacaacgcagagctcaggtgtgggaaggtgccaggggcaggggtgcagaggggctgaggctgaggggggtgcagaggctggagaaaggataacaggagagagtatacaggcatgccttgatttattgcacttcacaggtagcagaatttttaaagaaattgaaggttttgggacatatatgtgacagcaataggttaagaaaagcaaagcagagaaattgaagatttgtgtcaacactgctttaagcaaatctgttggcaccatttttccaatagcatgtgcccattttgggtctctacattgcattttggtaattgcttgcaatatttcaagcattttcattgttattatatgtgttatagtgatctgtgatcagtgatctttgatatattattgtaattgtttcggggcgccatgaaccgcacccatataacacggtaaacttaatcagcaaacgttg

SEQ ID NO: 36630 - DNA, 4970 bp, Artificial Sequence
  derived and/or modified sequence
agtcaggctggggctcgaagtggggaccctcgccccgtcctcggctgtccagtcctcctcctcgcagaccccggcggttcctaccccaggccgcaggggagacggggccccaaggcaggcttcatatcctgaacgctgggatcccccaggacattccctggcccccaggccccaggtcccaggccccagggctgagctgtgggcaggccccacctggcctctgcaatgtcaccgcctctgtgtcccctccttctcctggctgtgggcctgcggctggctggaactctcaaccccagtgatcccaatacctgcagcttctgggaaagcttcactaccaccaccaaggagtcccactcccgccccttcagcctgctcccctcagagccctgcgagcggccctgggagggcccccatacttgcccccagcccacggttgtataccggaccgtgtaccgtcaggtggtgaagacggaccaccgccagcgcctgcagtgctgccatggcttctatgagagcagggggttctgtgtcccgctctgtgcccaggagtgtgtccatggccgttgtgtggcacccaatcagtgccaatgtgtgccaggctggcggggcgacgactgttccagtgagtgtgccccaggaatgtgggggccacagtgtgacaagccctgcagctgcggcaacaacagctcgtgtgatcccaagagtggggtatgttcttgcccttctggtctgcagcccccgaactgccttcagccctgtacccctggctactatggccctgcctgccagttccgctgccagtgccatggggcaccctgcgatccccagactggagcctgcttctgccccgcagagagaactgggcccagctgtgacgtgtcctgttcccagggcacttctggcttcttctgccccagcacccattcttgccaaaatggaggtgtcttccaaaccccacagggctcctgcagctgcccccctggctggatgggcaccatctgctccctgccctgcccagagggctttcacggacccaactgctcccaggaatgtcgctgccacaacggcggcctctgtgaccgattcactgggcagtgccgctgcgctccgggttacactggggatcggtgccgggaggagtgcccggtgggccgctttgggcaggactgtgctgagacgtgcgactgcgccccggacgcccgttgcttcccggccaacggcgcatgtctgtgcgaacacggcttcactggggaccgctgcacggatcgcctctgccccgacggcttctacggtctcagctgccaggccccctgcacctgcgaccgggagcacagcctcagctgccacccgatgaacggggagtgctcctgcctgccgggctgggcgggcctccactgcaacgagagctgcccgcaggacacgcatgggccagggtgccaggagcactgtctctgcctgcacggtggcgtctgccaggctaccagcggcctctgtcagtgcgcgccgggttacacgggccctcactgtgctagtctttgtcctcctgacacctacggtgtcaactgttctgcacgctgctcatgtgaaaatgccatcgcctgctcacccatcgacggcgagtgcgtctgcaaggaaggttggcagcgtggtaactgctctgtgccctgcccacccggaacctggggcttcagttgcaatgccagctgccagtgtgcccatgaggcagtctgcagcccccaaactggagcctgtacctgcacccctgggtggcatggggcccactgccagctgccctgtccgaaggggcagtttggagaaggttgtgccagtcgctgtgactgtgaccactctgatggctgtgaccctgttcatggacgctgtcagtgccaggctggctggatgggtgcccgctgccacctgtcctgccctgagggcttatggggagtcaactgtagcaacacctgcacctgcaagaatgggggcacctgtctccctgagaatggcaactgcgtgtgtgcacccggattccggggcccctcctgccagagatcctgtcagcctggccgctatggcaaacgctgtgtgccctgcaagtgcgctaaccactccttctgccacccctcgaacgggacctgctactgcctggctggctggacaggccccgactgctcccagccatgccctccaggacactggggagaaaactgtgcccagacctgccaatgtcaccatggtgggacctgccatccccaggatgggagctgtatctgccccctaggctggactggacaccactgcttagaaggctgccctctggggacatttggtgctaactgctcccagccatgccagtgtggtcctggagaaaagtgccacccagagactggggcctgtgtatgtcccccagggcacagtggtgcaccttgcaggattggaatccaggagccctttactgtgatgccgaccactccagtagcgtataactcgctgggtgcagtgattggcattgcagtgctggggtcccttgtggtagccctggtggcactgttcattggctatcggcactggcaaaaaggcaaggagcaccaccacctggctgtggcttacagcagcgggcgcctggacggctccgagtatgtcatgccagatgtccctccgagctacagtcactactactccaaccccagctaccacaccctgtcgcagtgctccccaaaccccccaccccctaacaaggttccaggcccgctctttgccagcctgcagaaccctgagcggccaggtggggcccaagggcatgataaccacaccaccctgcctgctgactggaagcaccgccgggagccccctccagggcctctggacagggggagcagccgcctggaccgaagctacagctatagctacagcaatggcccaggcccattctacaataaagggctcatctctgaagaggagctcggggccagtgtggcttccctgagcagtgagaacccatatgccaccatccgggacctgcccagcttgccagggggcccccgggagagcagctacatggagatgaaaggccctccctcaggatctccccccaggcagcctcctcagttctgggacagccagaggcggcggcaaccccagccacagagagacagtggcacctacgagcagcccagccccctgatccatgaccgagactctgtgggctcccagccccctctgcctccgggcctaccccccggccactatgactcacccaagaacagccacatccctggacattatgacttgcctccagtacggcatcccccatcacctccacttcgacgccaggaccgttgaggagccaggatggtatggcagaggccagcacacctggctgttgctgctcaaggctggggacagagcctagtgtacccctgccaggagcagggagtggaccggcaggctgtgaacatgaacaacgcttaacagagcaagtgatgggagccttgttcctgggttctaccatgggagacgctgatcagcaggatgcctggctccctttcccaacccactgctcccaaggcctccagggccctgtgtacataaactggtgggttggaagttgctgggtaactctgatttcagacatgcgtgtggggtaccttttctgtgcatgctcagcctgggctctgtgcgtgtgtgtgtttctgtgattttagaagggtaccaggcacaggttctgtcctagggcacttaccatttagtagggagatggaaccaacccaattaactctagcaatagcctcctaactggcctcctccattgattcagtgaaccttccaatgcatggctcataatttcaaaatacaggctggttagttactccctacctgaaagccttcataggtgcctctttgctcttctgccagtatcaaaacttttgaaggccttaaaggccctgctttgcctggcccatctgtctctccagcctcaccttgaactgtgttcctgtcactgcacgccagtcacaccggcctctaggtcctcctgtaggccactcttctttctggcacagggacctgcacacctggagtgcccttcctcccccactcgcctgttcacccctgcttttcctttacacctcctcctcagggaagtgcccaccctccgtacatctttcacagccctgattgcagctgtgttcactcaccaggtacctgcagaaggcctacagggtgccaggcacttctttaatgtgttctttctttatgtgattatttgattaatctctgcctcccccactagactgtaagctccctgaaggcaagaatcctgtgcttatgctcaatattagctctcccttggcacagagtaggcactcaacaaatgctccccaaaaggctgagtggctgactgaattaagtaccagtgacatgcagtaactgctaagatagatgagccatctgtatgctctgacagttacagactgaataagttggagacttccctaaagggtggcatttccccagggtaacaacgcagagctcaggtgtgggaaggtgccaggggcaggggtgcagaggggctgaggctgaggggggtgcagaggctggagaaaggataacaggagagagtatacaggcatgccttgatttattgcacttcacaggtagcagaatttttaaagaaattgaaggttttgggacatatatgtgacagcaataggttaagaaaagcaaagcagagaaattgaagatttgtgtcaacactgctttaagcaaatctgttggcaccatttttccaatagcatgtgcccattttgggtctctacattgcattttggtaattgcttgcaatatttcaagcattttcattgttattatatgtgttatagtgatctgtgatcagtgatctttgatatattattgtaattgtttcggggcgccatgaaccgcacccatataacacggtaaacttaatcagcaaa

SEQ ID NO: 36631 - DNA, 642 bp, Artificial Sequence
  derived and/or modified sequence
ggctggggctcgaagtggggaccctcgccccgtcctcggctgtccagtcctcctcctcgcagaccccggcggttcctaccccaggccgcaggggagacggggccccaaggcaggcctctgcaatgtcaccgcctctgtgtcccctccttctcctggctgtgggcctgcggctggctggaactctcaaccccagtgatcccaatacctgcagcttctgggaaagcttcactaccaccaccaaggagtcccactcccgccccttcagcctgctcccctcagagccctgcgagcggccctgggagggcccccatacttgcccccagcccacggttgtataccggaccgtgtaccgtcaggtggtgaagacggaccaccgccagcgcctgcagtgctgccatggcttctatgagagcagggggttctgtgtcccgctctgtgcccaggagtgtgtccatggccgttgtgtggcacccaatcagtgccaatgtgtgccaggctggcggggcgacgactgttccagtgagtgtgccccaggaatgtgggggccacagtgtgacaagccctgcagctgcggcaacaacagctcgtgtgatcccaagagtggggtatgttcttgcccttctggtctgcagcccccgaact

SEQ ID NO: 36632 - DNA, 3114 bp, Artificial Sequence
  derived and/or modified sequence
atgagcccgccactctgtccactcctgctgctggccgtaggcctaaggttagcaggaacgctgaatccctcagatcccaacacctgttcattctgggagtcattcactacaactacaaaggagagccactccaggccttttagtttactgccttctgaaccatgtgagcgcccttgggagggaccccacacctgtccacagccaactgttgtttatagaacagtatatcggcaggtggtgaagacagatcataggcaaagactgcagtgttgccatgggttctacgaaagtcggggattctgcgtgccactatgtgctcaggagtgtgtgcatgggaggtgcgtcgcacctaatcagtgccagtgcgtgccaggatggaggggggacgactgtagctctgaatgtgcaccaggaatgtggggacctcagtgcgataaaccttgcagttgcggcaacaacagcagctgtgatccaaagagcggagtgtgctcttgtccatccggactgcaaccacctaattgcctgcagccttgcactccaggatattacggccctgcgtgccaattccgctgccagtgccacggagcaccgtgcgacccccagacaggagcctgtttttgcccagcagagcggaccggaccatcctgcgatgtttcctgttcccagggcacctccggctttttttgtccttctacccacagttgccagaatgggggtgtattccagacaccacagggaagttgctcttgcccgccaggctggatgggcacaatttgcagcctgccttgcccggaagggttccacgggccaaactgtagccaggagtgtcgctgtcataatggaggcttatgtgacaggttcacggggcagtgtaggtgcgcgccaggctacactggcgatcgctgccgggaggaatgccccgtcggcaggttcggtcaggattgcgccgagacttgtgattgcgcacccgacgccaggtgctttcccgctaatggcgcttgtctttgcgaacacggttttacgggcgatcgctgcacggatcgcttatgcccagatggattctatggactgagctgtcaggccccatgcacctgcgatagagagcactcgctcagctgccacccgatgaatggcgagtgtagctgtctgcccggatgggcaggcttgcattgtaacgaaagctgcccccaggatacacacggaccaggctgccaggaacattgcctgtgtctacacgggggagtgtgtcaggcgacttccggcctgtgtcagtgtgctccagggtacacaggaccacactgtgctagcctatgtcctcccgacacttacggtgtgaactgttcggcccgatgctcctgcgaaaacgctattgcatgctccccaatagacggagagtgcgtgtgcaaagaagggtggcagcgcggaaactgttcggtcccgtgcccccctgggacgtggggattcagttgtaatgcatcctgtcagtgtgctcacgaagctgtttgctcccctcagactggcgcttgcacttgtactcccggatggcacggcgctcactgccagcttccatgccctaaagggcaatttggtgagggctgcgcctcccgatgtgactgtgaccacagcgatggttgcgaccccgttcacggcagatgccaatgccaggcaggctggatgggagccaggtgccatctgtcctgcccagagggcctgtggggcgtgaactgttctaacacctgcacatgtaagaacggaggtacctgtctgcccgaaaatgggaattgtgtctgtgcacctgggttccggggtccttcatgtcaacggtcttgccagcccggaagatacggaaaacggtgtgttccatgtaagtgcgctaaccattctttctgccatcctagcaacggcacctgctactgcttggcgggatggacaggccctgactgcagtcagccttgcccacctggtcattggggcgaaaactgtgcgcagacgtgccaatgccatcacggcggtacttgtcaccctcaagatggttcctgcatttgcccgctgggttggaccggtcaccactgtctggagggatgtcccctaggaaccttcggggcaaactgctcccagccctgtcagtgtggacccggagagaagtgtcatcccgagacaggcgcttgcgtatgtccccctggtcacagcggagccccttgtcggattggcatacaggaaccttttaccgtgatgcctactacccctgtggcctataattcgctgggggctgtgatcgggatcgccgtgctaggatccctggtggtggcactggtcgcactgttcatcggctacagacattggcaaaagggcaaagaacatcaccacttggccgtagcctactcatccggcagactggacggtagcgagtacgtgatgccggacgtgcccccatcgtatagccattactatagcaacccaagttatcacaccctttctcaatgcagcccaaatccaccccctcccaacaaggtcccaggtccactcttcgccagcctccagaaccccgaacggccaggaggggctcaaggccacgacaatcacaccacactgccagcggactggaaacatagaagagaaccccctccaggtccgctggatcggggatcttccagattagaccgctcttacagctactcttattccaatggccctggcccattttataacaagggcctaatttcagaggaggagctcggcgcttctgtcgccagcttgagcagtgagaacccatatgctaccatccgagacttaccatccctccctggtggacccagagaatccagttatatggagatgaaaggcccaccctctgggtcgccacccagacaacccccacagttctgggactctcagagacgcaggcaaccccagcctcagcgggatagtggcacgtacgaacagccatcccccttgatccacgaccgggacagcgtcggtagccagccaccacttcccccaggcctgccccctggccattacgatagccctaagaattcccatatcccaggccattatgatttgccgccagtgagacacccaccatctccgccactaagacgtcaggaccgatag

SEQ ID NO: 36633 - DNA, 3114 bp, Artificial Sequence
  derived and/or modified sequence
atgtctcccccactctgtcccttgctactgctggccgtaggcctgagactggctggtactctcaacccaagcgaccctaacacatgctccttctgggagtccttcaccacaacaaccaaggagagccattcaagaccattcagccttctgccttcagagccatgcgagcgcccttgggagggcccacatacttgccctcagccgaccgttgtataccgcaccgtgtaccgacaggtcgtcaaaacagaccacagacagcggctgcagtgttgccacggcttttacgaatctcggggattttgtgttccactgtgtgcccaggaatgtgttcatggcaggtgtgtggctcccaaccagtgccaatgtgtgcccggatggagaggcgatgattgtagttcagagtgtgctccagggatgtggggcccacagtgcgacaaaccatgctcctgcggaaataactcctcctgcgaccccaagtcgggtgtgtgtagttgccccagcggcctccaaccccctaactgtttgcagccttgtacaccagggtattacgggcctgcatgccagtttaggtgtcagtgccacggggctccttgcgacccccagacaggagcttgcttctgtcctgcagaacgcaccggccctagttgcgacgtgtcctgttctcaaggtaccagcgggttcttctgtccaagcactcacagttgtcagaacgggggagttttccagacaccgcagggctcctgctcatgcccgcctggatggatggggaccatctgtagtcttccctgtcctgagggtttccatggtcccaactgctcgcaggagtgcagatgccacaatggaggactgtgtgaccggttcaccggccaatgcaggtgcgcacccggatacactggcgaccgatgtagggaggagtgccctgttggcagattcgggcaggactgcgcggagacatgcgactgcgccccagatgcccgatgcttccctgcaaacggggcttgtttgtgcgagcacggcttcaccggagatcggtgtacggataggctgtgccccgatggattttatgggctgagctgccaggccccttgtacctgtgatcgggaacacagcctcagctgccatccaatgaacggggagtgtagctgcctcccaggttgggccggattacattgtaatgagtcttgcccacaggacactcacggccctgggtgccaagagcactgtctttgtctacacggaggcgtatgccaggccacctccggactctgtcagtgcgccccaggatacacgggccctcactgcgcatcgttgtgcccacccgatacatacggagttaattgctcagctcgatgctcatgtgagaatgcgatagcctgtagtcctatcgacggggaatgcgtatgcaaggaaggctggcagcggggaaactgctccgtgccttgccctccaggcacatggggattcagctgcaatgcttcttgtcaatgtgctcacgaggctgtgtgtagtccccaaacaggggcatgtacctgcacccctggatggcacggagctcattgtcagctcccctgcccgaagggacagttcggcgagggttgcgccagcagatgcgattgcgatcactcagatgggtgcgaccccgtccacgggaggtgccagtgtcaggccggttggatgggcgctcgttgccacttgtcctgtcctgagggactctggggtgtgaattgctctaatacatgcacttgtaagaatggcggtacatgccttccagagaatggcaactgcgtctgtgcccctggcttccggggaccatcatgccaaaggagttgtcagcctggccgttatgggaagcgatgcgtcccttgtaaatgtgctaaccactcattttgtcacccatctaacggaacttgctactgtctcgcaggatggactgggcctgactgctctcagccctgccccccaggtcactggggggaaaactgtgctcagacttgtcagtgtcaccacgggggaacgtgtcatccacaggacggaagctgtatttgtcctctcgggtggactggccaccattgtttggaagggtgtccgttgggaacgttcggagctaattgttcccagccctgccagtgcggcccaggagagaagtgccatcccgagaccggggcatgtgtgtgtccaccgggtcattcaggagctccatgccgtatcggtatccaggagccctttaccgtgatgccaaccacaccggtcgcctacaactctctgggggctgtgattgggatcgcggtgcttggctcccttgtggtcgcactggtggccctctttataggatataggcactggcagaaagggaaagagcaccatcatctggcagtggcctattcatctggcaggctggacgggtcagaatacgttatgcccgatgtcccgccaagctatagtcattattactcgaatccctcataccataccctaagccagtgttcacccaacccgccaccccctaataaagtgcccggacctctctttgcctctctgcagaaccctgaacgtcctggcggagcacagggccacgataatcatacgactctgcctgcggactggaaacatcggagagaaccccctcccggacccctcgacagaggcagttcgcgccttgaccggtcctactcctactcttacagcaatggacctggaccgttttataataaggggcttatcagcgaggaagagttaggcgcaagtgttgctagtctgtcgtctgaaaatccctacgccaccatccgtgacctgccatccttacccggtgggccacgagagtcctcttatatggagatgaaaggacctccgtcaggatcgccgcctcggcagcctcctcagttttgggattcccagcgcagacgacagccacagccacagcgagactccggaacatacgagcagcccagccctctcatacacgacagagatagcgtcggtagtcagcccccactccctccaggcctgcccccaggacactatgattcaccaaaaaactcacacatccctggacactacgatctcccacctgtgcggcaccctccgtccccacctctccgtaggcaggacagatag

SEQ ID NO: 36634 - DNA, 522 bp, Artificial Sequence
  derived and/or modified sequence
atgagcccccctctgtgtcccttactgctcttggcagtaggcctccggctggcgggtaccttgaacccttctgacccaaatacgtgttccttttgggagtcattcactactactaccaaggagagtcactctcggcctttcagcctgctgccgtcggaaccatgcgagagaccttgggaggggcctcacacctgcccccagccgactgtggtctatcgtaccgtctataggcaggtcgtgaagacagaccaccgacagaggctgcaatgctgtcatggcttctatgagagccggggtttttgcgtacccctctgtgcccaagagtgcgtgcacggacggtgtgtcgccccaaatcagtgtcagtgcgttcccggatggagaggcgacgactgctccagcgagtgcgcccctgggatgtggggccctcagtgtgacaagccttgctcatgtggaaataattcttcctgcgatcctaagtccggcgtttgttcctgtccttcaggcctgcagccaccaaactag

SEQ ID NO: 36635 - protein, 262 aa, Artificial Sequence
  derived and/or modified sequence
MEHLERCEWLLRGTLVRAAVRRYLPWALVASMLAGSLLKELSPLPESYLSNKRNVLNVYFVKVAWAWTFCLLLPFIALTNYHLTGKAGLVLRRLSTLLVGTAIWYICTSIFSNIEHYTGSCYQSPALEGVRKEHQSKQQCHQEGGFWHGFDISGHSFLLTFCALMIVEEMSVLHEVKTDRSHCLHTAITTLVVALGILTFIWVLMFLCTAVYFHNLSQKVFGTLFGLLSWYGTYGFWYPKAFSPGLPPQSCSLNLKQDSYKK

SEQ ID NO: 36636 - DNA, 789 bp, Artificial Sequence
  derived and/or modified sequence
atggagcacctggagagatgcgagtggctgctgagaggcaccctggtgagagccgccgtgagaagatacctgccctgggccctggtggccagcatgctggccggcagcctgctgaaggagctgagccccctgcccgagagctacctgagcaacaagagaaacgtgctgaacgtgtacttcgtgaaggtggcctgggcctggaccttctgcctgctgctgcccttcatcgccctgaccaactaccacctgaccggcaaggccggcctggtgctgagaagactgagcaccctgctggtgggcaccgccatctggtacatctgcaccagcatcttcagcaacatcgagcactacaccggcagctgctaccagagccccgccctggagggcgtgagaaaggagcaccagagcaagcagcagtgccaccaggagggcggcttctggcacggcttcgacatcagcggccacagcttcctgctgaccttctgcgccctgatgatcgtggaggagatgagcgtgctgcacgaggtgaagaccgacagaagccactgcctgcacaccgccatcaccaccctggtggtggccctgggcatcctgaccttcatctgggtgctgatgttcctgtgcaccgccgtgtacttccacaacctgagccagaaggtgttcggcaccctgttcggcctgctgagctggtacggcacctacggcttctggtaccccaaggccttcagccccggcctgcccccccagagctgcagcctgaacctgaagcaggacagctacaagaagtag

SEQ ID NO: 36637 - DNA, 4597 bp, Artificial Sequence
  derived and/or modified sequence
cggtggctgacgagatccggcatggagcatctggagcgctgcgagtggttgttgcggggaacgctggtgcgggcggccgtgcggcgctacctgccctgggccctggtggcctccatgctggcgggctccctcctcaaggagttgtccccgttgcccgagagctacctcagcaacaagcgcaacgtcctcaacgtgtattttgtcaaagtggcctgggcctggacgttctgtctccttctgcctttcattgccctcaccaactaccatctgaccggcaaggctggcttggtcctgcggcggctgagcaccctgcttgtgggcacggccatctggtacatctgcacctccatcttctccaacatcgaacactacacgggcagctgctaccagtccccagccctggagggggtcagaaaggaacaccagagcaagcagcagtgccaccaggaagggggcttttggcatggctttgacatctcaggtcactccttcctgctgaccttctgcgccctcatgattgtagaagagatgtctgtgctgcatgaggtgaagacggaccgaagccactgcctccacaccgccatcaccaccctggttgtggccctgggcattctgactttcatctgggtgttgatgtttctgtgcacagctgtttatttccacaacttgtcccagaaggtgtttggcaccttgtttggtttgctgagctggtacgggacatacgggttttggtatccgaaagccttttccccaggacttcctccccagagctgtagtttgaatttgaagcaagatagttacaagaaataaaagagtaacagaggggggacagaaggacaatggctaatctatttttcaaatatatattttgcttagttatttggctaaattattgatcctacttcagagggaaagtgtaccaggcagttttggtgggtggtgctgaagtctggggagtgagtttagtcttcagactattcttggcgacatcaccagtgttgcaagcaccaccattcccagttaggcactttttgtccctggtaagacttgacctttatctggaacactccttttgtccctagagtggggacctaaggctcagcaaaagggcagaatcaggaaagcctttatggtgtggctaaaggagtggccagagccttgggactcctttgctgccttctccctggttccagttgtctttagattttcacggctcttactgctgttacttaacagtattttccagccaggcatggtggttcacacctctaatccctgcactttgggaggccgaggcaggcggatcacctgagattgggagttcgagaccagcctgtccaacatggcgaacctcgtctcttctaaaaatacaaaaattagctgggtgtggtggcacatgcctgtaatcccagctactcaggaggctgaggcaggagaattgcttggacctaggaggtggaggttgcagtgagctgagatcgcaccactgcactccagcctgggtgacagagcagactccacctcaaaaaagaaaaaacaaaacaaaacagtatttcccactggtcagttttgcataggcatctatttcaggcagggtttttttcttttttttgagatggagttttgctcttgttgcccaggctggggtgcaatggcccgatctcggctcaccgcaacctccacctcccaggttcaagcgattctcctgcctcagcctcccgagtagctgggattacaggcatgcgtcaccacaccaggctaattttgtatttttagtagagatggggtttctccatgttggtcaggctggtctcaaactcctgaccgcaggtgatccacctgcctcggcctcccaaagtgctgggattacaggcatgagccaccgcgcccggctcaggcagggttctttataaaaacagcctgatgcctgaaggacactctctggttgtaatatttgtttcatccatgaagtgtttaaatattgcaactgacttgcgattagccaccaaaacaggcccttttagatgcagtgcctctccgaccaagtattggatgattcatacgtaatggactatgatcattttctgtccatgttttctattactatatgctggtttttttggagcaataagattactttttttctgttctattttgagcgaatcctttacagtttttgataagaactgtgacatttgttctttgttgataaaactcctgaaaataactcacaaggccagtgctgcactctggcacatgtaggttgttttgagggtttgttggttggttggttggctggttgattggttggttggtttagaacactaatgtacttgttatgaaccaaactctggtcttacagtcttaaattccacctcatggggctgttttctctgttagcaatgaaacctgggccaggtgtagtggctcacacctataatcctggcactttgggaggctgaggtgggaggattactggatcccaggagtttgagaccagcctgggcaacatagtgagaccctggtttctataaataaataagataatcaaaccagaaagcaggcattttagtaacagcctgttgaattttaaggtgaatcaaggtaattttgcagaatgcgttcttgcaccgaaatgtccctgaccacatatcagtggtatagactgaacagtgtgcttcagggtcatgtgctgagtgcactgatcactctgctgtggcccagggcatctgtacctgttggacaagattatgataattcagaagtgaagtaaaatgcctccctctgatggcaaaaagccaacctgtttgcaaaatcacccttattgaagggtggcatggctgtggtccctccctcctgttacttgcatcaccaaccaaactaaaccaaaccatacctgggcctgttcagctggacttgaaatcagtttcctttttctctcccctttgcagcacttttcagtttccagctttgtcattctgtggcctttgctgtgacaatgctgggaagggttagaaatcctgtcacctccatccacaaaggcacagttccacgccctgtgataagatatcccctcttctctcccagactgtctccttaagcctttcaaactgagccccttgctgttggggtaatcacccttaaggccgccttgatgcccctctctccaatcaagtccaatagtagcattaactgagaagcactacacctgactggcttcactgaagcttaagtggttgaggatgaatcttcggtgtaaaatcttttactataaggatatattttaaatatttcatatcccatcaagttggaggttaattttatccatcacaatgagtcatgatttgttgcacccaaaaggagcagaaacacaggtgatgagatatgggaggtggcaccatggtgctttggaggcgttggtaagatgtgaccctctgttgcctatgcccataaaccagtggtgggagtggccatggagtagatggcaggggcttgttgaagggattgaaagctctcctaggctaggcatggtggctcacacctgtaatcctagcactttgggaggctgagatgggaggatcacttgaggttgggccagcctagccaacatgataaaaccccgtctcgactaaaaatacaaaaattagccaggtgtggtggtacacgcctgtaatcccagctactcgggaggctggggcaggagaatcgcttgaacccaggaggcagaggttgcagtgagctaggatcacgccactgcactccagcctgagcgacagagtgagactctgtctcaaaaaaaaaaaaggctctccaaagtgtcatgttcagcaccaaaagggaataggcacagggtgaccccagaagttcatttgtgacacttaaatctccagatatttatcccacgtgggtctgatgcgggctcagcactaaattaactgtatgtggaaagtgtcaattgcagagccttctgtatcgatgaggcttccgccacttgtccatgcttagcccccttgcctcttccttgggagcatgctttctattcctatgtgaaacagcctgacataagtgaaaggatttgggctcaagcaaacatgagatgtgggttcatatcttggcaccactcctgatagctgtgtgatcatggcaaacctcgttttcatcgtctgtcaggtggagatgaagagaaatggtgcatgtaaagtgctcagcatctgtgcttagcaggccatagtctccctgcctcctttttcttgagtaagcctttagaactttctgactcctctagagaaggcagagaaacgaatatattttgggtgccatttggagtctgggtcttttgttaaaattgtcctgtattatgttgaaaagtgtcggttacccccaggctctgggggcatctgtgatcatagaatactgccatgcttattttgcctttctatgttgagattaattcactgacgcctcattttccacgtgcatctgtcatagtctgggtaccagattgtatttagagaatggctcttgccactgttatgtacacacagatcgtgtgtgtaaacaagcaaattaaagtaaactgagataatgaaatcccata

SEQ ID NO: 36638 - DNA, 789 bp, Artificial Sequence
  derived and/or modified sequence
atggaacacctcgaacgttgtgagtggttgttaaggggcacactggtgcgtgcagccgtgaggcgctacctaccctgggcactcgtagcgtcaatgctggccggatcactccttaaagaactgtcacccctccccgaaagctacctgagcaataagcgaaacgttctgaacgtatactttgtgaaagtggcttgggcctggacattctgtctgctccttccctttattgctctgaccaactaccacttaaccgggaaagccggccttgtcctcagacgtctgtcaacgctgctcgtgggaacggcaatatggtacatttgcacttccatcttttccaacattgagcactacacaggctcttgctatcagtcccctgcccttgaaggcgtgaggaaagagcaccaaagtaagcagcaatgtcatcaagaaggcggattttggcatggttttgatatttccggacactccttcttactgaccttctgtgctctgatgatcgtggaagagatgagcgtgctgcacgaggtgaaaaccgatcgcagccattgtctgcacactgccatcaccactctggtggtggcccttggtatcctgacgttcatttgggttcttatgttcctctgcaccgccgtgtactttcacaacctctcccagaaggtcttcggtacactgttcgggctgctctcctggtacggtacatacggattctggtatccaaaagccttttctcccggattaccacctcagtcttgctcacttaatctgaaacaggatagctacaaaaagtag

SEQ ID NO: 36639 - DNA, 789 bp, Artificial Sequence
  derived and/or modified sequence
atggagcacctggagcgctgtgagtggctgctgcggggcaccctggtgcgggctgctgtgcggcgctacctgccctgggccctggtggcctccatgctggccggcagcctgctgaaggagctgagccccctgcctgagagctacctgagcaacaagagaaatgtgctgaatgtgtactttgtgaaggtggcctgggcctggaccttctgcctgctgctgcccttcatcgccctgaccaactaccacctgaccgggaaggccggcctggtgctgcggcggctgagcaccctgctggtgggcacagccatctggtacatctgcaccagcatcttcagcaacatcgagcactacacaggcagctgctaccagagccctgccctggagggcgtgaggaaggagcaccagagcaagcagcagtgccaccaggagggcggcttctggcacggctttgacatcagcggccacagcttcctgctgaccttctgtgccctgatgattgtggaggagatgtctgtgctgcacgaggtgaagacagacaggagccactgcctgcacacagccatcaccaccctggtggtggccctgggcatcctgaccttcatctgggtgctgatgttcctgtgcacagctgtgtacttccacaacctgagccagaaggtgtttggcaccctgtttggcctgctgtcctggtacggcacctacggcttctggtaccccaaggccttcagccctggcctgcccccccagagctgcagcctgaacctgaagcaggacagctacaagaagtag

SEQ ID NO: 36640 - DNA, 789 bp, Artificial Sequence
  derived and/or modified sequence
atggagcacctggagcggtgcgagtggctgctgcggggcaccctggtcagggcagccgtgcgaagatacctgccctgggctcttgtcgctagcatgttagcggggagtctgttgaaggagctcagtcccctgcccgaaagctacctctccaacaagcgaaatgtgctcaacgtttattttgtcaaggtggcgtgggcgtggacattctgtcttctacttccttttattgcgcttacaaactaccaccttacgggaaaagcagggctagtgttacgaagactgagcactctgttggtggggacagccatttggtatatttgcacatccatcttcagcaacattgagcattacactggctcctgttaccaaagcccggctctggaaggggtcaggaaggagcaccagagcaaacagcagtgccatcaggagggtggtttctggcacggtttcgacattagcgggcattcttttctcctgacattctgcgcactaatgatcgtcgaagagatgagtgtgcttcacgaggtgaagaccgacagatcccactgcttgcataccgccatcacgacgctggtcgtggccctgggcatccttacctttatatgggtactgatgttcctttgcaccgcggtttactttcataacctttctcagaaagtttttggtaccctgttcgggctgctctcttggtacggaacctacgggttttggtacccaaaggccttttcccctggccttcctccccagtcttgttcgcttaacctgaaacaggactcctacaaaaagtag

SEQ ID NO: 36641 - DNA, 789 bp, Artificial Sequence
  derived and/or modified sequence
atggagcacctcgaaagatgtgagtggctgctccggggaactctcgtgcgcgctgccgtccggagatatctcccctgggctcttgttgcttcgatgttagcaggaagtctcttgaaggaattaagccctcttccggaatcatacctttcaaacaagcgaaatgttttaaacgtgtactttgtgaaggttgcgtgggcttggaccttctgcctcctgcttccttttatcgcacttaccaattatcatctcactggaaaggccggtctggttctccggagactgtcaacgctgttggtgggcacagccatatggtacatttgcacgagtattttctcaaatatagagcactacacaggctcatgctaccagtctccagctctggagggggtacgaaaagaacaccaaagcaaacagcagtgccaccaggaaggcggtttttggcatgggtttgatatctctgggcacagctttttgttgactttttgtgctctgatgatcgtggaggagatgagcgtgctacatgaggtgaagacagaccgatcgcattgcctgcataccgctattacaacactggtcgtggcccttgggatcctgaccttcatttgggtgctgatgtttctgtgtactgctgtctacttccacaatctctcccagaaggtcttcggcaccctgtttgggctcctcagttggtatgggacttatggattttggtacccgaaggcattcagccccggtctgcctccacagtcctgctctctaaaccttaagcaggactcctacaagaaatag

SEQ ID NO: 36642 - protein, 290 aa, Artificial Sequence
  derived and/or modified sequence
MLKREMKPESDRPRKVRFRIASSHSGRVLKEVYEDGQPSGSLDSECASICGIDGLGDSDGQQNGHIESEGDENENDQDSLLVLARAASEKGFGTRRVNILSKNGTVRGVKYKVSAGQALFNNLTKVLQQPSTDLEFDRVVIYTTCLRVVRTTFERCELVRKIFQNHRVKFEEKNIALNGEYGKELDERCRRVSEAPSLPVVFIDGHYLGGAEKILSMNESGELQDILTKIERVQHPHECPSCGGFGFLPCSVCHGSKMSMFRNCFTDSFKALKCTACNENGLQRCKNCAG

SEQ ID NO: 36643 - DNA, 873 bp, Artificial Sequence
  derived and/or modified sequence
atgcttaagagggaaatgaagcccgaatctgatcgaccgagaaaagtgcggttcaggatcgcttcctcccatagcggccgtgtgttaaaggaagtgtatgaagacggccagcccagtggatccctagacagcgagtgcgctagcatctgcggaatagatggcctcggcgatagcgatggacagcagaatgggcatatagagagcgagggagatgagaacgagaacgaccaagacagcctcctcgtccttgctcgcgctgctagtgaaaaaggcttcggtactagaagagtcaatattttgagcaagaacggcacagtgcggggtgtgaagtacaaggtaagcgctgggcaggcgctcttcaacaacctgactaaggtgctgcagcagccctctactgatctcgagtttgaccgcgtagtaatctacacgacgtgtctgagggtcgtgagaactacattcgagcggtgcgaactggtccggaagattttccaaaatcacagggtgaagttcgaggaaaaaaatatagccttgaatggcgagtatggaaaggaactggacgaacggtgccgacgcgtgagtgaggccccatcgcttcctgttgtctttatcgatggacactacttggggggggccgaaaagatcctgagtatgaatgaatctggggagctgcaggacatcctgactaagatagagcgcgtacaacacccacatgaatgcccgagttgcggagggttcggatttttgccgtgcagcgtgtgtcacggcagtaaaatgagtatgttccggaattgtttcactgatagctttaaagccctgaaatgtacagcctgcaacgagaatggcctccagagatgcaaaaactgcgcaggttag

SEQ ID NO: 36644 - DNA, 991 bp, Artificial Sequence
  derived and/or modified sequence
atgcttaaaagggagatgaagccagaaagtgacaggccacggaaagtccggtttcggatcgcgtcctctcacagtgggcgagttctgaaggaagtgtatgaagatgggcaaccgtcaggctctctggattctgaatgtgccagtatctgtgggatagatggactaggtgattccgatggacagcagaatggccacatagagtcagaaggtgatgagaatgagaatgaccaggatagcttgctggtgttagcaagggctgccagtgagaagggttttggtacaagaagagtcaacattttaagcaaaaatggcacagtcagaggcgtcaaatacaaagtgagtgctggccaggctctatttaacaatttgaccaaagtattacagcaaccatcaactgatctagaatttgaccgtgtagtgatttataccacctgccttcgtgtggtccggacaacctttgaaagatgtgaactggttagaaagattttccaaaaccatcgcgtaaaatttgaagagaaaaacatagccctgaatggtgaatatggaaaagagttagacgaacgatgccgacgagtttctgaagctccttccctccctgttgtgttcattgatggccattaccttgggggtgctgagaaaattttgtcaatgaatgaatcaggagaactgcaagacatcctaaccaaaattgagagagtacagcatccacatgagtgtccctcttgtggaggctttggctttcttccatgctccgtgtgccatgggagcaagatgtccatgtttcgaaactgcttcacagactctttcaaagccctgaagtgtacggcttgcaatgaaaatggtcttcagcgttgtaagaactgtgctggttaattggagcttctacccaggaaaaacctcattttattaatcaaaggcaatactttggtttatatatatatttttaaatggttatgtttatggattaatcaataaactttgtttattataa

SEQ ID NO: 36645 - DNA, 873 bp, Artificial Sequence
  derived and/or modified sequence
atgctgaagcgggagatgaagccagagagtgaccggcccaggaaggtgcgcttccgcatcgccagcagccacagcggccgggtgctgaaggaggtgtatgaagatggccagcccagcggcagcctggacagtgaatgtgccagcatctgtggcattgatggcctgggggacagtgatggccagcagaatggccacatcgagagtgaaggagatgaaaatgaaaatgaccaggacagcctgctggtgctggcccgggccgccagcgagaagggcttcggcaccaggagagtgaacatcctgagcaagaatggaacagtgcggggcgtgaagtacaaggtgtctgctggccaggccctcttcaacaacctgaccaaggtgctgcagcagcccagcacagacctggagtttgacagagtggtgatctacaccacctgcctgcgggtggtgaggaccacctttgagcgctgtgagctggtgaggaagatcttccagaaccaccgggtgaagtttgaggagaagaacatcgccctgaatggagaatatggcaaggagctggatgagcgctgccggcgggtgtctgaggcccccagcctgcctgtggtgttcattgatggccactacctgggcggcgctgagaagatcctgtccatgaatgaaagtggagagctgcaggacatcctgaccaagattgaaagagtgcagcacccccatgagtgccccagctgtggcggcttcggcttcctgccctgcagcgtgtgccacggcagcaagatgtccatgttcaggaactgcttcacagacagcttcaaggccctgaagtgcacagcctgcaatgaaaatggcctgcagcgctgcaagaactgtgccggctag

SEQ ID NO: 36646 - DNA, 873 bp, Artificial Sequence
  derived and/or modified sequence
atgctgaagcgggagatgaagcccgagagcgaccggccccggaaggtccggtttaggatcgccagtagccattctggaagagtgctcaaggaggtttacgaggatggacagccatccggttcgctcgattcagagtgtgcttcaatatgtggcattgatgggctgggcgacagtgacgggcagcaaaatggccacatcgaatccgagggcgacgagaatgagaacgatcaggattccttactggtgctcgctagggccgcctcagagaagggatttggcacacgccgggtgaatatcctgagcaagaacgggaccgttagaggtgtcaagtataaggtgagcgccggccaggccctttttaacaacctcaccaaagtgttacagcagccaagcaccgaccttgagttcgatagagtggtcatttacacaacctgcctgcgggtcgtacggacaaccttcgagcgttgcgaactggtccgcaagattttccaaaatcacagggtgaaattcgaagaaaaaaacatagcccttaatggcgagtacggaaaggaattggatgagcggtgcagaagagttagtgaagcaccttccctgccagtggtgtttattgacgggcactacctgggtggcgctgaaaaaattcttagcatgaacgaatctggcgagctccaggacattctcaccaagattgaaagagttcagcatccccatgaatgcccgtcctgtggtggcttcgggttcctcccttgtagtgtttgccacggctctaaaatgtccatgtttaggaattgcttcaccgactctttcaaggctcttaagtgtaccgcatgcaacgagaacggactgcagcggtgcaaaaactgcgctggctag

SEQ ID NO: 36647 - DNA, 873 bp, Artificial Sequence
  derived and/or modified sequence
atgctaaaacgagaaatgaaaccagaatcggaccgtcccagaaaagtgcgcttccgtatcgcttccagccacagcggcagggtcctgaaagaggtttatgaggacggccagccatccggcagcctcgactcggagtgtgcatcaatctgcgggattgacggcctgggcgattccgatgggcagcagaatgggcatatagaaagtgaaggagacgaaaacgaaaacgaccaggacagtctgctggtgctcgcccgagccgcttccgagaaaggattcggcactaggagggtcaacattctgtcaaaaaacggcacagtcagaggggtgaaatacaaagtatccgctggccaagcactttttaataacctcactaaagtcctacagcagccctcgactgacctcgagttcgatcgagtcgtgatatatactacttgtctccgggtagtgaggacaactttcgaacgctgtgaactagtacgcaagatcttccagaaccaccgggtgaagtttgaagagaagaacatcgcccttaacggcgaatatgggaaggagctggatgagaggtgcaggcgggtctcagaggctccctcactgcccgtcgtcttcattgatgggcactacctaggtggagctgagaaaattctcagcatgaatgagagcggcgagctccaagacatcttgacaaagattgaacgagtgcagcacccgcatgaatgccctagctgtggtggcttcggattcctgccatgttctgtgtgccacggctctaaaatgagcatgttcagaaactgctttacagacagtttcaaagcactgaagtgtaccgcttgcaatgagaatggactccagagatgtaaaaactgtgccggttag

SEQ ID NO: 36648 - DNA, 873 bp, Artificial Sequence
  derived and/or modified sequence
atgctgaagagagagatgaagcccgagagcgacagacccagaaaggtgagattcagaatcgccagcagccacagcggcagagtgctgaaggaggtgtacgaggacggccagcccagcggcagcctggacagcgagtgcgccagcatctgcggcatcgacggcctgggcgacagcgacggccagcagaacggccacatcgagagcgagggcgacgagaacgagaacgaccaggacagcctgctggtgctggccagagccgccagcgagaagggcttcggcaccagaagagtgaacatcctgagcaagaacggcaccgtgagaggcgtgaagtacaaggtgagcgccggccaggccctgttcaacaacctgaccaaggtgctgcagcagcccagcaccgacctggagttcgacagagtggtgatctacaccacctgcctgagagtggtgagaaccaccttcgagagatgcgagctggtgagaaagatcttccagaaccacagagtgaagttcgaggagaagaacatcgccctgaacggcgagtacggcaaggagctggacgagagatgcagaagagtgagcgaggcccccagcctgcccgtggtgttcatcgacggccactacctgggcggcgccgagaagatcctgagcatgaacgagagcggcgagctgcaggacatcctgaccaagatcgagagagtgcagcacccccacgagtgccccagctgcggcggcttcggcttcctgccctgcagcgtgtgccacggcagcaagatgagcatgttcagaaactgcttcaccgacagcttcaaggccctgaagtgcaccgcctgcaacgagaacggcctgcagagatgcaagaactgcgccggctag

SEQ ID NO: 36649 - protein, 2699 aa, Artificial Sequence
  derived and/or modified sequence
MDVKERRPYCSLTKSRREKERRYTNSSADNEECRVPTQKSYSSSETLKAFDHDSSRLLYGNRVKDLVHREADEFTRQGQNFTLRQLGVCEPATRRGLAFCAEMGLPHRGYSISAGSDADTENEAVMSPEHAMRLWGRGVKSGRSSCLSSRSNSALTLTDTEHENKSDSENEQPASNQGQSTLQPLPPSHKQHSAQHHPSITSLNRNSLTNRRNQSPAPPAALPAELQTTPESVQLQDSWVLGSNVPLESRHFLFKTGTGTTPLFSTATPGYTMASGSVYSPPTRPLPRNTLSRSAFKFKKSSKYCSWKCTALCAVGVSVLLAILLSYFIAMHLFGLNWQLQQTENDTFENGKVNSDTMPTNTVSLPSGDNGKLGGFTQENNTIDSGELDIGRRAIQEIPPGIFWRSQLFIDQPQFLKFNISLQKDALIGVYGRKGLPPSHTQYDFVELLDGSRLIAREQRSLLETERAGRQARSVSLHEAGFIQYLDSGIWHLAFYNDGKNAEQVSFNTIVIESVVECPRNCHGNGECVSGTCHCFPGFLGPDCSRAACPVLCSGNGQYSKGRCLCFSGWKGTECDVPTTQCIDPQCGGRGICIMGSCACNSGYKGESCEEADCIDPGCSNHGVCIHGECHCSPGWGGSNCEILKTMCPDQCSGHGTYLQESGSCTCDPNWTGPDCSNEICSVDCGSHGVCMGGTCRCEEGWTGPACNQRACHPRCAEHGTCKDGKCECSQGWNGEHCTIEGCPGLCNSNGRCTLDQNGWHCVCQPGWRGAGCDVAMETLCTDSKDNEGDGLIDCMDPDCCLQSSCQNQPYCRGLPDPQDIISQSLQSPSQQAAKSFYDRISFLIGSDSTHVIPGESPFNKSLASVIRGQVLTADGTPLIGVNVSFFHYPEYGYTITRQDGMFDLVANGGASLTLVFERSPFLTQYHTVWIPWNVFYVMDTLVMKKEENDIPSCDLSGFVRPNPIIVSSPLSTFFRSSPEDSPIIPETQVLHEETTIPGTDLKLSYLSSRAAGYKSVLKITMTQSIIPFNLMKVHLMVAVVGRLFQKWFPASPNLAYTFIWDKTDAYNQKVYGLSEAVVSVGYEYESCLDLTLWEKRTAILQGYELDASNMGGWTLDKHHVLDVQNGILYKGNGENQFISQQPPVVSSIMGNGRRRSISCPSCNGQADGNKLLAPVALACGIDGSLYVGDFNYVRRIFPSGNVTSVLELSSNPAHRYYLATDPVTGDLYVSDTNTRRIYRPKSLTGAKDLTKNAEVVAGTGEQCLPFDEARCGDGGKAVEATLMSPKGMAVDKNGLIYFVDGTMIRKVDQNGIISTLLGSNDLTSARPLTCDTSMHISQVRLEWPTDLAINPMDNSIYVLDNNVVLQITENRQVRIAAGRPMHCQVPGVEYPVGKHAVQTTLESATAIAVSYSGVLYITETDEKKINRIRQVTTDGEISLVAGIPSECDCKNDANCDCYQSGDGYAKDAKLSAPSSLAASPDGTLYIADLGNIRIRAVSKNKPLLNSMNFYEVASPTDQELYIFDINGTHQYTVSLVTGDYLYNFSYSNDNDITAVTDSNGNTLRIRRDPNRMPVRVVSPDNQVIWLTIGTNGCLKSMTAQGLELVLFTYHGNSGLLATKSDETGWTTFFDYDSEGRLTNVTFPTGVVTNLHGDMDKAITVDIESSSREEDVSITSNLSSIDSFYTMVQDQLRNSYQIGYDGSLRIIYASGLDSHYQTEPHVLAGTANPTVAKRNMTLPGENGQNLVEWRFRKEQAQGKVNVFGRKLRVNGRNLLSVDFDRTTKTEKIYDDHRKFLLRIAYDTSGHPTLWLPSSKLMAVNVTYSSTGQIASIQRGTTSEKVDYDGQGRIVSRVFADGKTWSYTYLEKSMVLLLHSQRQYIFEYDMWDRLSAITMPSVARHTMQTIRSIGYYRNIYNPPESNASIITDYNEEGLLLQTAFLGTSRRVLFKYRRQTRLSEILYDSTRVSFTYDETAGVLKTVNLQSDGFICTIRYRQIGPLIDRQIFRFSEDGMVNARFDYSYDNSFRVTSMQGVINETPLPIDLYQFDDISGKVEQFGKFGVIYYDINQIISTAVMTYTKHFDAHGRIKEIQYEIFRSLMYWITIQYDNMGRVTKREIKIGPFANTTKYAYEYDVDGQLQTVYLNEKIMWRYNYDLNGNLHLLNPSNSARLTPLRYDLRDRITRLGDVQYRLDEDGFLRQRGTEIFEYSSKGLLTRVYSKGSGWTVIYRYDGLGRRVSSKTSLGQHLQFFYADLTYPTRITHVYNHSSSEITSLYYDLQGHLFAMEISSGDEFYIASDNTGTPLAVFSSNGLMLKQIQYTAYGEIYFDSNIDFQLVIGFHGGLYDPLTKLIHFGERDYDILAGRWTTPDIEIWKRIGKDPAPFNLYMFRNNNPASKIHDVKDYITDVNSWLVTFGFHLHNAIPGFPVPKFDLTEPSYELVKSQQWDDIPPIFGVQQQVARQAKAFLSLGKMAEVQVSRRRAGGAQSWLWFATVKSLIGKGVMLAVSQGRVQTNVLNIANEDCIKVAAVLNNAFYLENLHFTIEGKDTHYFIKTTTPESDLGTLRLTSGRKALENGINVTVSQSTTVVNGRTRRFADVEMQFGALALHVRYGMTLDEEKARILEQARQRALARAWAREQQRVRDGEEGARLWTEGEKRQLLSAGKVQGYDGYYVLSVEQYPELADSANNIQFLRQSEIGRR

SEQ ID NO: 36650 - protein, 170 aa, Artificial Sequence
  derived and/or modified sequence
MDVKERRPYCSLTKSRREKERRYTNSSADNEECRVPTQKSYSSSETLKAFDHDSSRLLYGNRVKDLVHREADEFTRQGQNFTLRQLGVCEPATRRGLAFCAEMGLPHRGYSISAGSDADTENEAVMSPEHAMRLWGRGVKSGRSSCLSSRSNSALTLTDTEHENKSDSEN

SEQ ID NO: 36651 - DNA, 8100 bp, Artificial Sequence
  derived and/or modified sequence
atggacgtgaaggagagaagaccctactgcagcctgaccaagagcagaagagagaaggagagaagatacaccaacagcagcgccgacaacgaggagtgcagagtgcccacccagaagagctacagcagcagcgagaccctgaaggccttcgaccacgacagcagcagactgctgtacggcaacagagtgaaggacctggtgcacagagaggccgacgagttcaccagacagggccagaacttcaccctgagacagctgggcgtgtgcgagcccgccaccagaagaggcctggccttctgcgccgagatgggcctgccccacagaggctacagcatcagcgccggcagcgacgccgacaccgagaacgaggccgtgatgagccccgagcacgccatgagactgtggggcagaggcgtgaagagcggcagaagcagctgcctgagcagcagaagcaacagcgccctgaccctgaccgacaccgagcacgagaacaagagcgacagcgagaacgagcagcccgccagcaaccagggccagagcaccctgcagcccctgccccccagccacaagcagcacagcgcccagcaccaccccagcatcaccagcctgaacagaaacagcctgaccaacagaagaaaccagagccccgccccccccgccgccctgcccgccgagctgcagaccacccccgagagcgtgcagctgcaggacagctgggtgctgggcagcaacgtgcccctggagagcagacacttcctgttcaagaccggcaccggcaccacccccctgttcagcaccgccacccccggctacaccatggccagcggcagcgtgtacagcccccccaccagacccctgcccagaaacaccctgagcagaagcgccttcaagttcaagaagagcagcaagtactgcagctggaagtgcaccgccctgtgcgccgtgggcgtgagcgtgctgctggccatcctgctgagctacttcatcgccatgcacctgttcggcctgaactggcagctgcagcagaccgagaacgacaccttcgagaacggcaaggtgaacagcgacaccatgcccaccaacaccgtgagcctgcccagcggcgacaacggcaagctgggcggcttcacccaggagaacaacaccatcgacagcggcgagctggacatcggcagaagagccatccaggagatcccccccggcatcttctggagaagccagctgttcatcgaccagccccagttcctgaagttcaacatcagcctgcagaaggacgccctgatcggcgtgtacggcagaaagggcctgccccccagccacacccagtacgacttcgtggagctgctggacggcagcagactgatcgccagagagcagagaagcctgctggagaccgagagagccggcagacaggccagaagcgtgagcctgcacgaggccggcttcatccagtacctggacagcggcatctggcacctggccttctacaacgacggcaagaacgccgagcaggtgagcttcaacaccatcgtgatcgagagcgtggtggagtgccccagaaactgccacggcaacggcgagtgcgtgagcggcacctgccactgcttccccggcttcctgggccccgactgcagcagagccgcctgccccgtgctgtgcagcggcaacggccagtacagcaagggcagatgcctgtgcttcagcggctggaagggcaccgagtgcgacgtgcccaccacccagtgcatcgacccccagtgcggcggcagaggcatctgcatcatgggcagctgcgcctgcaacagcggctacaagggcgagagctgcgaggaggccgactgcatcgaccccggctgcagcaaccacggcgtgtgcatccacggcgagtgccactgcagccccggctggggcggcagcaactgcgagatcctgaagaccatgtgccccgaccagtgcagcggccacggcacctacctgcaggagagcggcagctgcacctgcgaccccaactggaccggccccgactgcagcaacgagatctgcagcgtggactgcggcagccacggcgtgtgcatgggcggcacctgcagatgcgaggagggctggaccggccccgcctgcaaccagagagcctgccaccccagatgcgccgagcacggcacctgcaaggacggcaagtgcgagtgcagccagggctggaacggcgagcactgcaccatcgagggctgccccggcctgtgcaacagcaacggcagatgcaccctggaccagaacggctggcactgcgtgtgccagcccggctggagaggcgccggctgcgacgtggccatggagaccctgtgcaccgacagcaaggacaacgagggcgacggcctgatcgactgcatggaccccgactgctgcctgcagagcagctgccagaaccagccctactgcagaggcctgcccgacccccaggacatcatcagccagagcctgcagagccccagccagcaggccgccaagagcttctacgacagaatcagcttcctgatcggcagcgacagcacccacgtgatccccggcgagagccccttcaacaagagcctggccagcgtgatcagaggccaggtgctgaccgccgacggcacccccctgatcggcgtgaacgtgagcttcttccactaccccgagtacggctacaccatcaccagacaggacggcatgttcgacctggtggccaacggcggcgccagcctgaccctggtgttcgagagaagccccttcctgacccagtaccacaccgtgtggatcccctggaacgtgttctacgtgatggacaccctggtgatgaagaaggaggagaacgacatccccagctgcgacctgagcggcttcgtgagacccaaccccatcatcgtgagcagccccctgagcaccttcttcagaagcagccccgaggacagccccatcatccccgagacccaggtgctgcacgaggagaccaccatccccggcaccgacctgaagctgagctacctgagcagcagagccgccggctacaagagcgtgctgaagatcaccatgacccagagcatcatccccttcaacctgatgaaggtgcacctgatggtggccgtggtgggcagactgttccagaagtggttccccgccagccccaacctggcctacaccttcatctgggacaagaccgacgcctacaaccagaaggtgtacggcctgagcgaggccgtggtgagcgtgggctacgagtacgagagctgcctggacctgaccctgtgggagaagagaaccgccatcctgcagggctacgagctggacgccagcaacatgggcggctggaccctggacaagcaccacgtgctggacgtgcagaacggcatcctgtacaagggcaacggcgagaaccagttcatcagccagcagccccccgtggtgagcagcatcatgggcaacggcagaagaagaagcatcagctgccccagctgcaacggccaggccgacggcaacaagctgctggcccccgtggccctggcctgcggcatcgacggcagcctgtacgtgggcgacttcaactacgtgagaagaatcttccccagcggcaacgtgaccagcgtgctggagctgagcagcaaccccgcccacagatactacctggccaccgaccccgtgaccggcgacctgtacgtgagcgacaccaacaccagaagaatctacagacccaagagcctgaccggcgccaaggacctgaccaagaacgccgaggtggtggccggcaccggcgagcagtgcctgcccttcgacgaggccagatgcggcgacggcggcaaggccgtggaggccaccctgatgagccccaagggcatggccgtggacaagaacggcctgatctacttcgtggacggcaccatgatcagaaaggtggaccagaacggcatcatcagcaccctgctgggcagcaacgacctgaccagcgccagacccctgacctgcgacaccagcatgcacatcagccaggtgagactggagtggcccaccgacctggccatcaaccccatggacaacagcatctacgtgctggacaacaacgtggtgctgcagatcaccgagaacagacaggtgagaatcgccgccggcagacccatgcactgccaggtgcccggcgtggagtaccccgtgggcaagcacgccgtgcagaccaccctggagagcgccaccgccatcgccgtgagctacagcggcgtgctgtacatcaccgagaccgacgagaagaagatcaacagaatcagacaggtgaccaccgacggcgagatcagcctggtggccggcatccccagcgagtgcgactgcaagaacgacgccaactgcgactgctaccagagcggcgacggctacgccaaggacgccaagctgagcgcccccagcagcctggccgccagccccgacggcaccctgtacatcgccgacctgggcaacatcagaatcagagccgtgagcaagaacaagcccctgctgaacagcatgaacttctacgaggtggccagccccaccgaccaggagctgtacatcttcgacatcaacggcacccaccagtacaccgtgagcctggtgaccggcgactacctgtacaacttcagctacagcaacgacaacgacatcaccgccgtgaccgacagcaacggcaacaccctgagaatcagaagagaccccaacagaatgcccgtgagagtggtgagccccgacaaccaggtgatctggctgaccatcggcaccaacggctgcctgaagagcatgaccgcccagggcctggagctggtgctgttcacctaccacggcaacagcggcctgctggccaccaagagcgacgagaccggctggaccaccttcttcgactacgacagcgagggcagactgaccaacgtgaccttccccaccggcgtggtgaccaacctgcacggcgacatggacaaggccatcaccgtggacatcgagagcagcagcagagaggaggacgtgagcatcaccagcaacctgagcagcatcgacagcttctacaccatggtgcaggaccagctgagaaacagctaccagatcggctacgacggcagcctgagaatcatctacgccagcggcctggacagccactaccagaccgagccccacgtgctggccggcaccgccaaccccaccgtggccaagagaaacatgaccctgcccggcgagaacggccagaacctggtggagtggagattcagaaaggagcaggcccagggcaaggtgaacgtgttcggcagaaagctgagagtgaacggcagaaacctgctgagcgtggacttcgacagaaccaccaagaccgagaagatctacgacgaccacagaaagttcctgctgagaatcgcctacgacaccagcggccaccccaccctgtggctgcccagcagcaagctgatggccgtgaacgtgacctacagcagcaccggccagatcgccagcatccagagaggcaccaccagcgagaaggtggactacgacggccagggcagaatcgtgagcagagtgttcgccgacggcaagacctggagctacacctacctggagaagagcatggtgctgctgctgcacagccagagacagtacatcttcgagtacgacatgtgggacagactgagcgccatcaccatgcccagcgtggccagacacaccatgcagaccatcagaagcatcggctactacagaaacatctacaacccccccgagagcaacgccagcatcatcaccgactacaacgaggagggcctgctgctgcagaccgccttcctgggcaccagcagaagagtgctgttcaagtacagaagacagaccagactgagcgagatcctgtacgacagcaccagagtgagcttcacctacgacgagaccgccggcgtgctgaagaccgtgaacctgcagagcgacggcttcatctgcaccatcagatacagacagatcggccccctgatcgacagacagatcttcagattcagcgaggacggcatggtgaacgccagattcgactacagctacgacaacagcttcagagtgaccagcatgcagggcgtgatcaacgagacccccctgcccatcgacctgtaccagttcgacgacatcagcggcaaggtggagcagttcggcaagttcggcgtgatctactacgacatcaaccagatcatcagcaccgccgtgatgacctacaccaagcacttcgacgcccacggcagaatcaaggagatccagtacgagatcttcagaagcctgatgtactggatcaccatccagtacgacaacatgggcagagtgaccaagagagagatcaagatcggccccttcgccaacaccaccaagtacgcctacgagtacgacgtggacggccagctgcagaccgtgtacctgaacgagaagatcatgtggagatacaactacgacctgaacggcaacctgcacctgctgaaccccagcaacagcgccagactgacccccctgagatacgacctgagagacagaatcaccagactgggcgacgtgcagtacagactggacgaggacggcttcctgagacagagaggcaccgagatcttcgagtacagcagcaagggcctgctgaccagagtgtacagcaagggcagcggctggaccgtgatctacagatacgacggcctgggcagaagagtgagcagcaagaccagcctgggccagcacctgcagttcttctacgccgacctgacctaccccaccagaatcacccacgtgtacaaccacagcagcagcgagatcaccagcctgtactacgacctgcagggccacctgttcgccatggagatcagcagcggcgacgagttctacatcgccagcgacaacaccggcacccccctggccgtgttcagcagcaacggcctgatgctgaagcagatccagtacaccgcctacggcgagatctacttcgacagcaacatcgacttccagctggtgatcggcttccacggcggcctgtacgaccccctgaccaagctgatccacttcggcgagagagactacgacatcctggccggcagatggaccacccccgacatcgagatctggaagagaatcggcaaggaccccgcccccttcaacctgtacatgttcagaaacaacaaccccgccagcaagatccacgacgtgaaggactacatcaccgacgtgaacagctggctggtgaccttcggcttccacctgcacaacgccatccccggcttccccgtgcccaagttcgacctgaccgagcccagctacgagctggtgaagagccagcagtgggacgacatcccccccatcttcggcgtgcagcagcaggtggccagacaggccaaggccttcctgagcctgggcaagatggccgaggtgcaggtgagcagaagaagagccggcggcgcccagagctggctgtggttcgccaccgtgaagagcctgatcggcaagggcgtgatgctggccgtgagccagggcagagtgcagaccaacgtgctgaacatcgccaacgaggactgcatcaaggtggccgccgtgctgaacaacgccttctacctggagaacctgcacttcaccatcgagggcaaggacacccactacttcatcaagaccaccacccccgagagcgacctgggcaccctgagactgaccagcggcagaaaggccctggagaacggcatcaacgtgaccgtgagccagagcaccaccgtggtgaacggcagaaccagaagattcgccgacgtggagatgcagttcggcgccctggccctgcacgtgagatacggcatgaccctggacgaggagaaggccagaatcctggagcaggccagacagagagccctggccagagcctgggccagagagcagcagagagtgagagacggcgaggagggcgccagactgtggaccgagggcgagaagagacagctgctgagcgccggcaaggtgcagggctacgacggctactacgtgctgagcgtggagcagtaccccgagctggccgacagcgccaacaacatccagttcctgagacagagcgagatcggcagaagatag

SEQ ID NO: 36652 - DNA, 513 bp, Artificial Sequence
  derived and/or modified sequence
atggacgtgaaggagagaagaccctactgcagcctgaccaagagcagaagagagaaggagagaagatacaccaacagcagcgccgacaacgaggagtgcagagtgcccacccagaagagctacagcagcagcgagaccctgaaggccttcgaccacgacagcagcagactgctgtacggcaacagagtgaaggacctggtgcacagagaggccgacgagttcaccagacagggccagaacttcaccctgagacagctgggcgtgtgcgagcccgccaccagaagaggcctggccttctgcgccgagatgggcctgccccacagaggctacagcatcagcgccggcagcgacgccgacaccgagaacgaggccgtgatgagccccgagcacgccatgagactgtggggcagaggcgtgaagagcggcagaagcagctgcctgagcagcagaagcaacagcgccctgaccctgaccgacaccgagcacgagaacaagagcgacagcgagaactag

SEQ ID NO: 36653 - DNA, 8100 bp, Artificial Sequence
  derived and/or modified sequence
atggacgtgaaagaaagaagaccatattgttccctcaccaagagcagacgagaaaaggaacgcagatacaccaacagctctgccgacaacgaagagtgcagggtgcccacccagaagtcctactcatcctccgaaaccctgaaagccttcgaccacgactcctcaaggctactgtacggaaatagggtcaaggacctggtgcacagagaggctgatgaattcacccgccaggggcagaacttcacactgcgccagttgggtgtttgcgagcctgccacacgccgcggactcgctttctgcgcggagatgggattgccacatcggggctatagtattagcgccggaagtgacgccgataccgagaacgaagccgtgatgagccctgagcatgcgatgaggctgtggggccggggcgtcaagtctggcaggagctcctgcttgtccagtaggtctaattccgctttgacactgacggatactgagcacgaaaataaatcagactcagaaaacgagcagcccgccagtaatcaaggccagagcacacttcagcctctccctccatctcataaacagcacagtgcccagcatcatccgagtataacgagcttaaaccgtaattccttgacaaatagacgtaatcagtcccctgctccgccggcggccctccctgccgagctccaaacaacgcccgagtctgttcagctgcaggactcatgggtgctcggtagcaacgtgcccctagagagccggcacttcctgttcaagactggcaccggcaccacgcctctctttagcactgcaactccgggttacacaatggcttcagggtccgtgtacagcccaccaactagaccgctgccgcgcaacacactgtcccgctccgctttcaaattcaaaaaaagcagtaaatactgctcatggaagtgtaccgccctgtgtgccgtgggcgtctctgtgctgcttgcgatattgctttcgtatttcatcgccatgcacctattcggcctgaactggcagttgcagcagacagagaacgacacatttgagaatgggaaggtgaattcagacactatgcccacaaatacagtgtctcttccttccggcgacaatggcaaactgggcggattcacccaggagaataacacaatcgattctggagagctcgatattggtcgcagggccattcaggagatccctccagggattttctggagaagccagctgttcatcgaccagcctcagtttctgaaatttaatatatccctgcagaaagatgcccttattggggtatacggacggaagggcctgccccccagccatacccaatacgacttcgtcgagttgttggacggatcaaggctgattgcacgcgaacagcgcagcttactggagaccgaacgagccgggcgtcaagctcgctccgttagtttacacgaggccggcttcatccagtatctggactcaggaatttggcatttagctttctataacgatgggaagaacgccgagcaggtaagcttcaacactattgtgatcgaatccgtcgtggagtgtccacggaattgccacggcaacggagagtgcgtctccgggacatgtcactgctttcccggctttctcggtcccgactgttctagggctgcttgcccagtgctgtgctccgggaacggacagtacagcaagggtaggtgtttgtgtttttccgggtggaagggtactgaatgcgatgtgcccacaacccaatgtattgatccgcagtgcggcgggcggggcatctgtatcatgggtagctgcgcttgtaattcgggctataagggagagtcatgcgaggaggcagactgtatcgatccagggtgctccaatcatggcgtgtgcatccacggtgagtgtcactgctctccaggctggggaggctcgaactgtgagattcttaaaacgatgtgccctgaccaatgcagtggacacggtacctatctccaagagtcaggatcttgtacctgcgaccctaactggactgggcccgattgttctaacgagatctgcagcgtagactgcgggtcccatggcgtctgcatgggcggtacttgcagatgtgaagaaggttggacagggccggcctgcaatcagagggcgtgccatcccagatgtgcggagcacggtacgtgcaaggatgggaaatgcgagtgctcccaggggtggaacggcgaacattgtaccatagaggggtgcccgggtttatgtaactccaacggtcggtgcactctagatcagaatggctggcattgtgtctgccaaccaggctggagaggagccggatgtgacgtggcaatggaaacattgtgtacagactctaaagataacgaaggagacggattgattgactgcatggaccctgattgctgtcttcagagttcatgtcagaatcagccctactgccgcgggctgccagaccctcaggatatcatatcacagtccttgcaaagcccgtcacagcaggccgccaagtctttctacgaccggatatccttccttattggctccgattcgacccatgtgattccaggtgagtcaccattcaacaagtcacttgcctcagtgatccgaggtcaggttcttactgctgatggaacgcctctgataggggtgaatgtatcattctttcattatccagaatatgggtacaccataacccggcaagacggtatgtttgaccttgtcgccaacgggggggcaagtctgacattggtgttcgaaagaagccccttcctgactcaatatcacactgtctggatcccatggaatgtgttctacgtgatggacacccttgtaatgaagaaggaggagaatgacattccctcatgcgacttgtcaggattcgttaggcccaaccctattattgtgtcatcacctttatccactttctttcgctcaagccctgaagactctccaatcatccctgaaactcaggtattgcatgaggaaaccacaattccaggaactgatctcaaattgtcctatctgagtagcagagccgccggctataagtctgtgttgaagataaccatgacacagtcaattattccgttcaacctgatgaaggtccatctgatggttgcagtggttggcagactctttcagaagtggtttcctgcctctcctaatctggcgtataccttcatatgggacaagaccgatgcctacaatcagaaggtttacggtctgtcagaggcagttgtgagcgtgggatacgaatacgagtcttgtttagatctgacactctgggaaaagcgcactgccatccttcaaggatatgaattagatgcctccaatatgggtggttggacgttagacaaacaccacgttctcgacgtgcagaacgggatcttgtataaagggaacggggagaaccagttcatctcccagcagccccccgttgtctcctcaatcatgggcaatgggcgaaggagatccatcagttgcccttcctgtaacggccaagccgacgggaataaactgctggctccggtggccctggcttgtggtatcgatggttcgctctatgtgggggattttaattatgtgcgacgaatttttccctcaggcaatgtgacttctgtactcgaactctcttccaaccctgctcacagatactacctggccactgaccccgttacaggcgatctgtatgtgagcgatacaaataccaggaggatctaccggcctaaatctttgaccggggcgaaggatcttaccaagaacgctgaagtagtggcggggaccggagagcagtgcctgccttttgacgaggcacggtgcggcgatgggggtaaggccgtcgaggcaacgctgatgtcccccaagggcatggccgtagataagaacgggcttatctattttgtcgatgggacgatgatacggaaagtggatcagaatggcatcatcagcaccctcctgggttctaatgatctgacgagtgcccgaccactgacctgtgacacatccatgcatatctcgcaggtgcgcctggaatggcccactgatctagccattaaccccatggacaatagcatttacgtcctggacaataacgtcgtcctccaaattaccgaaaatagacaagtccggattgcagccggacgcccaatgcactgccaagtgcccggcgttgagtatcccgtgggcaagcatgccgtacagacaaccctagagtcagcaaccgcgattgcagtatcctattcgggtgtcctctacataaccgagactgacgagaagaagattaacagaatccgacaagtgaccacagatggcgagatttcgctggtagcagggattccatccgagtgtgattgcaaaaatgatgccaattgcgattgttaccagtccggcgacggctacgcgaaggacgcaaagctgtctgcaccaagctccctagcagcctcccccgacggtaccttgtatatagccgatctggggaacatccgcattagagccgtttctaaaaataagcccctcctcaattctatgaacttttacgaggtagcctccccgaccgaccaagagctgtacatcttcgatattaacgggacacatcagtatactgtgtctttagtcactggggactacctctacaactttagctacagcaatgacaacgatatcaccgcggttactgacagcaatgggaataccctgaggatccgacgagacccaaacagaatgcccgtgagggtggtctctcctgataaccaggttatttggcttacgatcggtactaatgggtgtctgaagtctatgactgctcaaggcctcgaactcgtgcttttcacataccatgggaatagcggcctgctggccacaaaatccgatgaaacaggctggacaaccttttttgattatgatagtgaagggaggttgaccaatgtgacttttcctacaggggtcgtgactaatctgcatggcgacatggataaggcaatcaccgtggacatcgaaagcagctcccgggaggaagacgtcagcattaccagtaacttgagttcgatcgattccttttacaccatggtgcaggaccagttgcgaaatagctaccaaatcggatacgacggctctctgcggatcatatatgcatcaggtctggactctcactaccagactgagcctcatgtgctggctggcacagccaaccctaccgtcgctaagcgcaacatgactttgcctggcgaaaacggtcagaatctcgtggaatggcggttccgaaaggaacaagctcagggcaaggtcaacgtcttcggcaggaaattacgggtgaacgggagaaacctgctgtccgttgatttcgatcggaccactaagaccgagaagatttacgacgaccacaggaaatttctgttaagaatagcttacgacacatccggccatcccaccttgtggctcccaagcagcaaactcatggccgtcaatgtaacttatagctctacaggacagattgcctccattcagcggggtactacttcggaaaaagtcgattacgatggtcagggaaggattgtaagcagagtgtttgcagacggcaaaacttggagttacacctaccttgaaaaatccatggtgctgctcctgcattcacagaggcagtacattttcgagtatgacatgtgggatcgcctatcggcgatcactatgccatctgtggctcgtcatacgatgcagactattcgcagcattggttactaccgaaatatctacaatcctcccgaaagcaacgcgtcaataatcactgattacaatgaggaaggccttctcctgcagaccgcctttctggggactagtcggagggtactcttcaaatatcgacgtcaaacccgattaagtgaaatattgtacgattctacccgggtgagctttacctacgatgagacagctggagtgctgaagacagtgaatctccagagcgatggtttcatttgtactatccgctaccggcaaatcggacccctgatcgaccgccaaattttccgattcagcgaggacggcatggtgaatgcccggttcgattacagttacgacaattcattccgagttacatcaatgcagggagtaatcaatgagacccctctcccaatagatctctaccagttcgatgatattagcgggaaggtggagcagttcgggaagttcggtgtgatctattatgacatcaaccagattatctctactgcagtgatgacttatacaaaacatttcgacgctcatgggcggattaaggaaattcagtacgagatattccgaagtctgatgtattggatcacaatccagtacgataacatgggtcgcgtaacaaaaagggagatcaaaatcggccctttcgctaatactacaaagtatgcttatgaatatgacgtggatggccagctgcagactgtgtatctgaacgaaaagattatgtggcgatacaactacgatttgaatggaaatcttcacctcctgaatccctccaattccgcaaggttaacacccctaagatacgatttacgcgaccgaatcacacgtttgggcgacgtgcaatatagactggacgaggacggattccttcgccagagaggaactgagatttttgaatacagtagtaagggtctcctgacaagagtgtatagcaagggaagcggatggactgtgatctatcggtatgacggtttgggacggcgcgtgtcttcgaaaacctctttggggcaacacctgcagtttttttacgcggatttaacatatcccacccgaatcacccacgtatacaatcactcaagtagcgagatcacatccttgtactacgaccttcagggacatttatttgcaatggaaatctcctcaggggacgaattctatatcgcatcagacaacactggcactccactcgctgtttttagctcaaatggtttaatgctgaagcagattcagtatactgcttacggtgagatatatttcgactcaaacattgacttccagctggtcatcggctttcatgggggcctgtacgacccgcttacaaaactaatacattttggggagcgcgattatgatatcctcgcaggccgttggacaaccccagacattgagatatggaaacgtatcggaaaagatccggctccctttaacttgtacatgtttcggaataacaaccctgcttcgaagattcacgacgtgaaagactatatcaccgatgtcaactcatggcttgtcacctttggctttcatcttcacaacgccattccagggtttccagtgcccaagttcgacctgacagagccctcctatgaactagtgaagagccagcaatgggacgacattccgccgatctttggcgtgcagcaacaggtcgccaggcaggccaaagcctttctgtcactcgggaaaatggctgaagttcaggtgtcccgccggagggccgggggcgcgcagtcgtggctctggttcgcaacggttaaatccctgatcggcaaaggtgtcatgctcgctgtcagccaaggtcgcgtgcagacgaatgtcctcaatatcgctaatgaagactgtattaaggtggctgctgtcctgaataatgccttctacctggaaaatctccacttcactatagagggcaaagacacacactactttatcaaaacaactacccccgagtcagatctcggaacattaagactcacctctgggagaaaagcccttgagaatgggattaacgttacggtctctcagagcacaaccgtcgtgaacgggagaacacgcagattcgccgatgttgagatgcagttcggtgcactggccctgcacgtgaggtacggcatgactctggacgaagaaaaagctagaatacttgagcaggctaggcagcgtgcgctggccagagcttgggcacgcgagcagcaaagggtaagagatggtgaggaaggtgcgcgcctgtggacagaaggcgagaaaaggcagctcctttccgccggcaaggtccagggctacgatgggtactacgtgctgagtgttgagcagtatccagaacttgccgattctgccaataatatacagtttctgcgacagagcgaaatcgggcggcgttag
